United States Patent Application Publication US 2015/0354009 A1 - sequence listing, part 15

SEQ ID NO: 354 - DNA, 32967 bp, Homo sapiens
gagacttgaaaggcacttgtgcagttgacttgtcctgctccactgttttggaactctgaaaccatggaaagaagcctggctgaggtgctagacaataagaaacacgtggcccctgctgacgacctgccaatgccgtgacacagaagtgaggcctcttagatcatccagccgccagctgaccagaaaggtgagtaagagcccagctgagcagaaccaaggtaaaagaaccacccagctcactcagaatcccaagctaaccaaacgattgtaaaacgtcactaagttttgtggtgatttgttacactgcaaaagtggatacagtagcacatacctcagtggcaattttacacatctttgattagcttctatcactgccacataactgtgagctctctaaaagcacagactattctgaccttaggttactgtgccaacctcaaagccaagcataatacctggaacacaccaggcatccaaccaataacatgctgagcgaatgcaaggagcaaagagagatacacattgtaacacaagcgaataggggaagttcaaaacaaaggactgaggacatctatttgtacaaaataaaaacttttaatcagcagcacacggcagcgaggaatacaagaccaaaatcacatttaatctgtctcaaagggttcaaagtctagggtacaggaggcagtacaaaatcaacgaagtgtactgtttgagcattccaacacttcgctccttcagacagtattaggaccccgtcccaaagcgttaggacaaggccctaacgctgcctgaaaaagtgaagtgacggaggatcccagagaggtttcttgaagcagataaagtctgaattgaggccgggcccggtggctcacgcctggaatcccagcactttgggaggctgaaggggggcggatcacttgaggccaagagttcaagaccagcctggccaacatggcgaaaccccgtctctactaaaaatacaaaaaatcaggccagcatagtggtgcacgcctgtaatcccagctatttgagagcctgaggcaggagaatcgcttgaacccaggaggcggaggttgcagtgagccgagattgtgccactacactccagcctgggcaacagagcgagactccatctaaaatacatatataaataaacaaagtctgaatagagtccttgcagtatttactgggaaaagcagcacacgcaaggccaggagggtcaaagggacagaggcgttcaaaggacaaaggagagcctcctgtttgtttggggttttattctttttgaatttttgttcccccaggccaactctaagagccagaactgttcgttatttatctcagcacaggttcggtgtaagcgttgcctccttacccgacgctcaggcccttcaggtccgggacccctgcttcttaattatgtttctattactcccagtgtctaacacaatctcttccacgaagtcggaacttgatacatatttgctgaataaacgaaaagttaaagatgaggcagaaagcacagctccttccaagggcagctctcaagagcccacgttttcagattcagcagtgaagcggacgcgtctggtacgagactacaagtcgcacaggcggagagggggcccccgggcctctggtttcacgtctccctcctggtccccggcggaccggcgtcttttctcccctgctcggagtagcctagcagcgctggaggctggctgtctggtaagcgcggctgttagagaggatggaggcgccgtagccccgcggtgcttctcacagccttcgccggcagggacgcgcgggacaaccgcgcaggcggctctgcaggggtgggcgcgccatcacccctctcggtccctgcctgcttggcgctttccgagccccagccgcgctcaggctgcctcgggcattgaccgcgggggcgcgcgccccgtttccatagaaacgcccggcctgccgcggcggcgcgaggggcgggctttcaggctcccggcggctgcttgcgccccagcgcgcgcccaggcgccttggaatccccgtccttgggcccccgcaaggtccccggccgtgcgcgaggcagcatgatgaggcgcaccctggaaaaccggtaacagcccgagcccagctgcccagggccgcccacactggagggctggggtgagggaagtggaagcctctgtccatggggcctctgcgccgaattccgaccctgagtgggaggctgcacggtccccgctgtgacctggggcctaattccttgggctgcagccaccgccggcggcgaagaggagcccggggcccggccggctgccacccacccacgccaccgggtctcgggtccccacactgccgcgggcagtgcggaagcctaggaggcagccgggcgcccaggccgcgctgcgcggagcagccggagcagccacctccccagttaaggccaggcccacccggcctgggccttttcctgtgcctacacagtccggatagtgaggtcaggaccccatggagagcagtccgcgccgggagacgctgggtcgttgatgggtttacgccttcaaagctgcagaatgcccggggaatgtttgcatgttaaattaacgtgaagccttctcatctctaacgagaatgttttgccttttgtgtcaccttttccctaggaacgctcaaacgaaacaactgcaaacagctgtctcaaatgtggagaagcattttggagaactgtgccaaatcttcgctgcctatgtgcggaaaactgccaggctgagagacaaagcagacctcctggtgaatgaaattaacgcgtatgctgctacagagaccccgcatttaaagctgggcctgatgaactttgcagatgagtttgccaaacttcaggattatcgacaagcagaggtatggagtgagatcacagtgtcattgttatgaatgagccatgaagtagtggatgaaggaaccgtggaaactttcacttgtaatctacctaactgcagaggtggatgcaaacttgataaaacgtacattttcataagactgtgtgagtctattaaagagaagcgttctgtgttttattttacccttttcaagctaacctttagggcatcttgaggtcttgaatttccccactttatttgccaacttttggccaaggggtggctgtttactgggggtagtgggaatagtacccagggggaagaaaataagcataacttaatgtcttgtgtggcacataagtacgttttaaagaatgactggagatggaaatgttgggaatggtaatgtggatggataaattattaataaatgggtaagacatcattgctgcatccatggtttggaaaattgaccaatggtttactaacaacaacaaaatgctatgaattgtatcatggaagcaaaccaatactgagacaccgtgtggactttttgctctgggtagcaggagaagtgtccttgtgattgttttctttctaaaagcccatatttttcctttaaatacttaataagcacttttacttgtatttattttcagtttcacggcataggttaacttatcagaagttgcccagttagaactgcgttgcttttttatacttttcagaacctaaaacgggaatttcaattttcaaaaaacagaatgagtataaaaaaaattgaactcatcattgctatccatacaaatttgaagagtaatcatatttggaggtacttttggaaaaatgtggagttcttgtcatgaaacttctgtaataaacaagtaactctcaattatatatgataactggggacttaatgtttcaaagataatttatattcacaggtaatcctaaaatcttattttagccaataatttcaatgcccctttgtagaaaacctttgtgctatttatcaaatagcaaagtgaattgatttgcatttgttctccttttatttcccttgcttaccaaatggtggaggtcctaatgaacaatgacaaaaaggtaggcaacaaaaaggagaacagaaaaaagacttagataatccttaaactgaataatcagtatggattataagaaatggtgtaaagcaaactgtcctgaatatccatgattttaggattcctaatatttgaatacttgatgagaagtcgatttttattttcctaacatgttttaaaatgaaacattcatatacatttcatttacagaaactaaagaaaaatcaatatgaaattaagtgtatttgtcaattatataaatatgtatcattaaaaagcccttttcctgctattaaaaaatgttcattttaagcaattgaatacatcacctatcttgagaaaaaaaattttaatgtccaagagttatttttcttatgctatatttaaatacttgccttaaaaaaaatctctcttcagtgccttccactagtactacttgtaaaagaagtaattactcaaaatgtgatttaaaaacctgtaacgtttaagaaaaactatttaattctaaatgaaacagagatgaaacatacagtttgacagctcagcaactcagaccatttatcttgttctgtaggcttcgataattcacaaatggcttctcagaaaaaaaaatgcagcaaatacagtgatctctaagcttttttgcttttcaaggttatgttgctttaaatgtttccaagatgctctgtctttcagctttgattttcttttctgaaaagttgagctattacagttcagagataatatatgcaaagtatccattactgtgctgaacacactgaaaatgttagctgtattaaaatttgaactgtcttaacacccttaaactactactttaaggtaaaaaagtaatcctaagatgatgatgtggccaggatgagctcctgggaaacctgagacattttcttgtcattttgctcaccaggtgcttttctacttttactattactgtgcagcttaacagtttttaatgtgttttgagtttagattctgagtcttatcaatttctagtgattagccttttatttataggttaaaatgttaaacgttctaatttaaaattttaataattttcaataggttgaaagacttgaagccaaagtagttgaacccttgaaaacttatgggaccattgtgaaaatgaaacgggtaagtaaatccattttctcacttaactgtgagttactctggcaaagactatgaggtttccaattgtttttttaaataagaaatacaaagtagtggccaagagtggtggctcatgcctgtaatcccaacactttgggaggtcgaggcgggcggatcacgaggtcaggagtttgagaccagcctggccaacatagtgaaaccccgtctctactaaaaataaaaaaaattagctgggcatggtggcatgcacctgtaatcccagctactcaggaggccgaggcaagaaaatcgcttgaacccaggaggcagaggttgcagtgagctgagatagcgccactgcactccagcacaggcgacagtgtgagactctgtctcaaaaaaaaaaaaagaaaagaaatacaaagtagtatatagtcattctttttactctgaaagatcacttagatctttaagaataatgaaatagttttaatgagcttattaagtatactgtagcaatatagacattattatggaaactttaaaataattatgaaaaatatatggacagaaattgctttactatatgaatataagtttttctttaaagcgatagcatttagacttttaaaatgtgtgagagagttctatttttaaaagttactttattgataatttacatcagcagtccccaaccattttggcaccagggaccggttttgtggaagacaatttttctttagttcacaatagggtttgcactcctatgagaatctgatgctgcctctgatctaacaagaggcagagctcaggccttaatgctagctcgcccaccactcacctgctgtgctggcccagttcctaataggcctgggggttgggagcccttgatttatgtgcgataaaattcttccattttaagtgatcattgagttttggacaaatgtttatacccatgtaaccactaccgcaatcaaaattacacatttatatgcatatatctattatggttaatagttttgcactgaaattgtgtcattattttgagagaatattaaacacattctcacatacatagacactaattatgtaatacttgtaattcctgtggtaatggtaccaggatcacacaagaagtattcttccattcttaaaacaattcttaaaagaattcttccattcttaaaactgaattttcttaagtcagacatttttactaacaaaaaaatgccaatttgcaggatgacctcaaagcaacactcacagcaaggaatcgagaagctaagcaattaactcagttagaaagaacacgtcagcgaaacccatctgatcgacatgttattgtatcctttgaatttgggtctttaaaaaaatgtttaaggtatggagtacaaaagtaaatgtatatagaaattgtgcatttttacttttaaacgagtagagaatttgaatataaagattgaaaagaaatgcatttaggaattctcactatagaaattttaaagaggttacgccacctaattcaaatccccttatattgttttacacagtagactttgcaaacgaacaaacaaaaaattcagatgtttttataaacagtaaattcaaatttctgaattttattttcacatggtgatgactaaatattaattctacaattaaagatctattgttaatcctaatatatcagtgtcctctatgccctgctttgagaaaaggaaagaaaattttcccatttaatttccttcatcttttagaaataaaacaactatgtgacatcatgacttccagccagttaacctcaggagtcttaagagtataattaagatccaagttggacacaaacctagaaaggactgtctactataacaaggttcttctgttaaacatgactttcttaaactacaatgtgccttgttcgtgagtaaacaaaagcatacaaaatagtgcctaattgccagcaactgagatgggtaggactgtgtagaaagcactaacatctggctgggcgtgttggctcgtgcctgtaattccagcactttgggaggccgaggcaggcagatcatgaggtcaggagttcgagaccagcctggccaacatagtgaaaccctgtctttactaaaaatacaaaaattagccaggcatggtagtacacacctgtagtcccagctacttgggaggctgaggcaagagaatcgcttgaacgtgggagatggaggttgtggtgagctgagatcacaccactgcactccagcctggaaaacaaagcgagactatctcaaaaaaaaaaaaagaaaaagagaaagaaagcactaacatccctactgcctctttttcccattccttcttctatatgtctccttcctgcttccttaaggttgttactgcccagctcagccagaaaccacatgaggagtggctctttgagagcatttgaggttccagaacacctccattcctgaggggagtctcttgagcagcgatttggggctgcgccagttgcttggtccttcttcctttggaccaaaggtacagaagcccaactttgtactaaacaaaaatgggcagccatagggctgggagtgcccactggagactgggacagaaatatctagatagtcatagtggcataagatccgcaaatggagattatagaatctgtgttttaagcaagtcagacaaaccagagaatgctggaaaatttatgactgataactagagatcaaggcagaggctatggggcagggtgggtgggggggttcaccagtgtttaagaattaagctagggatgaaaattttttgttttgttttgttctttgtggcctggagttggggaggtggtgatacatgaagacatctggaatcctgagtagttggcaagattgaatcaggagtactggtgtctacagtaaacacagaaatgaatctattcctaagacaaacatttttctgacttggatgctgtgctgtaaacactgctgtggaagggagataatcttagagcacagatgaagcaggtctttgggttcacatggtgaggaaataaatataacctaagagattactgccacaggtgagtcagtgtgctcactgggtaagatctgcaacttgtgtattttgacaacctgagaccaaaacatgaaggacaatctacatacaaatgtagtcaatataaatatacaaatattcgatcatagtattatggcatatttcccaggataaactcttaaaattcatctatgtagaagtatgtttaagtttgatatgtaagataaaatggagtccctctgatagagaggatagggaaaagaagaatcccatggctctgcctgctcaccccccaagtagggctccaggtgactcctgaacaagcttcctataatgcagtgtgagaaataccaatctggcttacccttttaaaaatcattttgaactcttaattaattccatttaatatactgatatctgtattcatggagttgtatcttagtattttaatccaaagcatttcctactcaagttggtatattatagaattttgaagaattttcagtgaaaagaagaaatattagaaatctatattctctttgctaaaaatggatgtgttactttaggtgagttgctatgctcaagtaaagggatttgagactttcagaaataaatagtagttgctggagggtgatagaagatgaagctacacatatcccggttatggcttctgtttccccatgcttccctgatttagccaactctacttactcttctaaattttaaaatgaaaatatcaataaatgaggagggtaaagacatgagtcaaaaggaagtagtcacaagtaaaaagctgcatcagtcatgtgtaataaacagtattaggaattagtctgcttgaatattctcattagcacaaggttaacatgtatcaaataactgttagagattttttcatagtagtaagtcttcaaaggagctctattttatctttgaatttcctgtgatgaagttgtggtttaaagaatctcaaacacagaaatacagagaaatgtttttgattcctggttatgattaagttgaaagtttgtatgattttttaaaattctacaccccatattgtaaatgtatatacaaacacagagaggtataaatgaatataattttaagtacttagtatcttgaaaatgtgtagttgaatgaactgaattacataagtaaccataattgatatatggttacaattaatatataacctaattgtaagtgtatataattctatgagtatataaatttattgaaaaagctgttatactctctttgaaatgtattttttcctttatgaaaaatttcagtcacaggtgggtaataaagtggtgtgtcaagaaatggatccttatagtaaacccttttacttgtttcaatttatacattttcttgaaaaagaaagcaaaagctaaatgtcacagtattacttatcacagaactttgacaacaaatgcaaactttttctatgattaattattaaatgatgatatatgtgacttttgagtaaatataatattagcacaagaaacaaaactttattaggaagaatttaatccgaaaactgggctgtgtctttttaaatttctgtgttaccttttaagaaaaactcttaaatgtttttgggcaacttttgttctagcagacgagatgcttaaagagagatacacagttagattagaaatattactatagctactgactatatatggctgttgaattcttgaaatacaactagagtaactttggagctagtttttaattttttatttaattttaattagttttaatgaaaatagccccatatggctagtggccaccatattgattggacagaacagatccagataatatgagtacatgtccaagcgtgttagacttgccatctaattttagttactagtgtatttattttttgtaataagcattaactaaatagaagcagtgtaacatggttgtcttgtaaagaagaatctacaagtagaagtcccatgctgaaatatttgtagtgtatattgtattccacctgatgaggatattatagaattaggaatatttaatgcatttggagaacaagtagaagtaagcaaggtagaaagaaagagtctttggttatatacctgctaactcaaaatacctcaatgttgtaatgatttcaaaaatcaaactctcagtggtagaaattgtcatagctgtctctctactgtgtgccactctccttagtcatttccaaagatgatttcatgtaatccatacaatagtcctatgagataagcataaagagtaagagataataggccaggtgcggtggcttacacctgtaatccctgcacttcgggaggctgaggctggtggatcacttgaggtcaggaattcaagaccagcctggccaatgtgacgaaaccccatctcttctaaaaatacaaaaaattagctgggtgtggtggcatgcacctgtaatcctagctactcaggaggctgaggcagaagaatcacttcaacccaggaggcggaggttgcagtgagccgagagcgtgccactgcactctagcctgggcaacaagagcaaaactctatctcaaaaaaaaataaataaaaaagagataatctgtaattgagagaattgaaataatttttactaagtcataagtccttttcaggggagaaatggctaatggagagagagacaaaagaaaaataatttttgataaatggcacaggtagtgaaatagagggaagcagtagaaaatatgggagatggttttacagtaggttatccaagggtgtctggaaaaaaaattattttatagacagaaagggaaggatttgggggtagtttttgttcttagggttttttttctagatcatgaatcatatcactaaataaagttctttattctgcatgtgcttacatagatcattttattatatatggtaaaatataatattaacaatttacactgttatgccaaaaagccagtactgcaatggtagaatttaccagtaggctcaattgaatgaattctcatttgattttttttatatccttggttggggaatacttttgtaggcagaaacggaattacagagagctgcaatggatgctagccgaacaagtcgtcatctggaggaaactattaacaactttgaaaggcagaaaatgaaggatataaaggtaataaagtaactgttagggttcaaaacatgtttttaacctttttttttactttaatgaaaaatttaaattactctaaattttttagcccataataccccttataaagaaaatatgataaataagggggcgggcacagtggcttatgcctgtaatcctagcactttgggaggccaaggcaggtggatcagttgaggccaggagtttgggatgagcctgggcaacatggaaaaaccccatctctacaaaaaactagccaggtgtggtggcacatgcttgtagacccagcttcttagggggctgaggcaggaggatcacctgagcctggggaggtcgaggcagcagtgagccatgaccgtgccactgcactccctgcagtccagcctgggcaacagagccagaccctgcccaccccaccccacaacaacaaaaagaaaacagaaaaagcaaaaaatattacaaataaaatgtattggttttttttttagtagaaacagtgatatataaaagaccaacatttccaaccagaagccagatattcagctttttatcacaaatactatttaatcaaggggaactaacatttattgtgtttttatatgccaggcactttacataaattcttgcagtcttcacagcaactccatgaggatgaggtggtgttatgaaattaagcagccaggcacagtggctcacacctgtaatcccagcactttgggaagctaaggcgggcagatcacttgaggtcaggagtttgagaccagcctggccaatgtggggaaactccatctctactaaaaatacaaaaattagccaggcgtgatggcacacacctgtaatcccagctacctgggaggctgaggcaggagaatcacttgaacccaggaggtggaggttgcagtgagccaagaagatcatgccactgcactccagcctgggtgacagagcgagactctgactcaaaaaaaaaaaaaaaagaaattaagcagagacataaaatattttacccaaagtacaatagccagaaataggagctataaaccaattttttaatctgtggtttctgttataatacagtcattaatttttatagcttaatattttgtagtaactacatatcatcaaataagtaaacagggtaatagtagccaaccacgtaaatttgcatctactatgatatggtatcttagtcaacaaaatcacaagaattgccttattctaacacatatgtagatttgaaactttcttggggatcatgaaattcagcaggtctttttgataaccatcttggaaacacttgaaggacctcttatgaccatcttacagactaaaactcatctaaggctctttttggctcactgaagattttcctgtaacaggctttaaatatgtttgtttttattttactactattgacaaatcttccttcataagctatattctttcaataaaataagcattatctgccacttaattatattatttatctctgaaatccatgaaacagtattcatttacatcttttattttctttaatttcctgtcatagtttcaaaggatttctgagctcaatttagtcacaggctctgtactcttctatgtaatagtagattgctacccacagaagaacatctcaggaggctgtcccgagacaaattcctttaccaagctaggagagtatggtcagggtataaagttttataattgctgacattccctcttaaactgagcaaggaaggagaattattaagataattaattagccttaacctgaaaaatgggaatggagacttgtgagctatgcctgattccactgttggataaaggcttctttagtgatgggaaactgattccttgctccatcattgttcctcagacctgcaaatttttcatttacacatggaaatttgtctctattctgatctttgggctcacttctatgttctgcctggatgctggttttaattccctgagcattacacagtaccaaaccccacagagaaagtgagtgcagcattcccagctacaattcctgctaccttggatttcctgaagcaacaggagatggagtaaggtgctgtatggtggagggtgcacagagaagaaaagagcttctgagcttttctctattgtgccccctaaagaggaaagtctcttgattttaggaagtctcttggtcacagaagaaaaattttttaaaagacaggaagaaacttacactttaaaaacattgggctataattcactgtgcaactctggtcttgagtgtatacacagatatatatcaccactcaatgttagaacattgtcatcacttcaaccttgtacagtttagcttttgcccccctgcctgcctcccaaccctaagcagccaccactaatttatggattgagctattctgcacatttcatagaatggaatcatcaaatatgttgacttctgtgactggcttctttcacttagcctgctttcaaggcatatccatgttgtaggatgtatcagtacttcattcctttttttgaccaaatagtattccattgtatggatataccacattttgtttactcatttcatggacatttcggtggtttccaccttttggctattgtgaatgctaatataaacatttatgtacaagtctttatgtagacatatattttcatttcttttggatatatacccaggagtggaattgctggattatttgtaactttatgcttaagcatttgaggaagtgccagaccattttctaaagtgaatgcaccattgtgtttgcccaccagcagtatatgagagttacaacttctctgcatcctcactacttgctattcatcagacttcttgattgtagttctcctagtggatttgaagtagtagttttattgtagtagtcgtctcattatagttttgacttacattccatgatgatgctttttttttttttttcttaagatagagacgaggtctcactatgttgcccaggctggttttgaactcctggtctcaggtgatcctcccacttcagcctcccaaagtgctggcattacaggcgtgagtcactgtgcctggcctgatgatgctttttggccatttgtgtatatctgccttgaacaaatggctattgagatcctttaccctttttttctccttttttttcttttttttttttttttcgagacagattctcgctctgtcgcccaggctggagtgcagtggcgcgatctcggctcactgcaacctccacctcccaggttcaagtgattcttctgcctcagcctcccaagtagctgggattacaggcatgcaccaccacacccggctaatttttgtatttttagtagagatggggttttaccatgttggccaggctggtcgtgaactcctgacctcaggtgatctgcccacctccacctcccaaagctctgggattacaggcgtgagccaccatgcccggctcctttacccttattttaactggattgtcttatttctgagttgtgagagatttttatatattctagatagaagtcccttatcagataatctgcagtttttcccattctgtgggttgccttgtcactttcttgatagtgtctttgaagcacaggtttttaattttcatgaaatccaatttatctctcttttcttacttgtgctttgatgttatagctaagaatccactgccaaatccaaggtcatgaatatttattcctatgttctcttaacaattttatagtttcagcccttatatgtctttgatccatttgaattaatttttatatatggttaaattttgtaaaggttaaatttcattcttttgcatatgactgtctggttgcagcaccatttgttgaagggactattctttcctcaattgaatggtcttggcatctttgttgaaaatcagttgatgtggttttacttctgggctccctttccttttcattgatctatgtgtctatccttatgtcaataccacactgtcctaacattgctttatggtatgtttttaaatcaggtaatgtgagtctttgtactttcttctttttttaaaattgatgtggctattctggatctatggcaatcctgtatgaatcttagaatcaatttgtcaatttctacaaagaagtcagttcgggttcttacaaggattgtatcaaatatgtagatcaatttgaggagtattgacatcttaagagtaattcttccagtccatgaacatgggatatttttccatttattttaatattctttaatttctttaaacactatttgtagttttcagaatataaattgtgcacatcttttgttaaacttcttcctaagtattttatacttcttgttgctatcgtaaatggatttgttttcctaatttcattttcagattgtcacaaatgtatagaaatacagttgatttttgtatactgacttatgtcttacaaccttgccaaacttgattattagttctaatagttttttagtggattcgttacaattttccacatataaattctgttttctgcaacaacctacaatttaaatgcaaactcccataaccctagcagactcccagaaatatgagcactagatatcaataccagagtctgttagggttctgaatctccattctgcacatcattcctcatcactgtcaaattgcttcctttccaagtaaagccgcatttgggatcttttataataaagagggatgtagaaatctcacaacagtagcctcaaagatcagtcaataagggttacattatagcccccttactttttttttttttaatagagctggtgtctccctgtgttgcccaggcttgtctcaaactcctgggctcaagcaatcctcccacctcaacctccccaggtgctgggattacaggtgtaagctactgtgcctggctggcccccttatttctaataaaaacaatagtcagatattaccatgttgatcttagcatgtctcataaacatttctgtgagataaatgcctggaaaagtcagattattgataccactcttaatttggggagaaacggaacattcctattcttacctgttatcaggctactgcttctgataagggcagagtttgtggctcctttaaccattctggaagcagaaatgattggcagtagtgagcactgctcataactgtgagtgcattactgtgtttgaggtgagtttaattgataagtccatttgaattttggtattggtattaaacagcaaggtaatacatttttgaagacttttcataggaactttgcagagtgtctctctgaaatcggctggcatagaacttagtgtacaaaatgagagaaaaatcacaatcctgtttgtttccatgtattaggaaaagtcatcagtatatgatgaatgtcaagggaatttcacagttacaaaaaaggtacttaaccaggagttgctcctgtaacaaatggggatgggaactcagtatgtagtgaagtagctgacatgagcaagaaacatcataattaatttttatagctttatttttattataaatataaatcataaaacttatccataaaattagacaaaaatttagtctcaccacccaaaaatattcattttttattttatccttccagatttttcctatgcatatatacagagacatagtaataacaataacaaacatttcttaaacattgtctgtgtgccaggtaccattctaagcattttgcatgaataaactcattaattcctcaaaacatcattatgaggaaggtactatttttagtcctaacagttatacatcaatgggaccaccgtatatatagcatctcttcttaaaacttatggatatatttatgccaagaaacagatccatatcatttttttgttatctttatgatattctgcagtatggttatactagttcatttaaccagtcctcattggtgaatgtctaggttatttttgcaattgtagctgtcactgcatcattacacattgttaaacagcagcctttgtgctggcccagttattctcttgagataaattaccagaagtggagttcctccttcagagcatacttttaattttaatatatatttttaaaacttctgtccacaaaggttaaaccaatttacgttcctactaaaccttgcataagcacaggtacaatggtgagtttgtttttttgttgttgttttgagacagagtctcgctctgtcacacagtctgtagtatggtggcatgatcttgggttactgcaacctctgcctcccggattcaagtgattctcctgcctcagccacccaagtagctggcattacaggcgtgcaccaccatgcccagctaatttttgtatttttagtagaaacagggtttcaccatgttggccagggtagtctagaactcctgacctcaggtgatccacctgcctcggcctcccaaagtgccaggattacaggcatgagccactgcacccggcctgtgtttgttgttttttttttttaatatgacaatgttgacaccataagttgcagtatttttaataataggtaaaaaatcagtatcatttgtgttattactgctgagctttttaaatgtatttagcgatacattcctttagtaaattatatttttccttaacctatatttctgttggatgttggaatttcttactaatttctaaaaattctttatattgagaaaattagcccttcaaattaaagagaaagtatgttgcaaatgtattttctcattttactgcttagtgtttttgccacctctaagttttctttttattgccaaatccatcttcttatctttggtttcttccttggtgtcatgcttagaaaggttttcatcccctaggttatataaatacttgcttatattttcttgatttttaaaatactttaaacattaaatatttagctggcagctgtgttttgcatgtggtacgacatggatatataactttaattttcaaatggataaacagttctcttacatcctttattgaatatcctatacgctggagagctgtcatttcctctttgcgaaaatgttcttaaaaccttttcgttaaagatctcttttgttaatcaaacaagatggatgctttactgttagtcattacatccaatttagctagttgactttgttgttcttgttgagacagaagtctccaaatgttgcccaagctggtctgggacacctggacccaagggaacctcctccctcagcctgccaagtagctgggattataggcacatgccattgtgcctggctagtttacttcttgagcattaaaaatgggtgtattggcttgtcatcgactcttcgttcagttttccctctaggagtttccacactcaagaaaacctgactcctttctggtttgcaactatcataaggacactaacaactaagagtaggtcccagccctggtcagaagccattcctcctctaaggtattcctgggtatctagagatactttaatatgaaatccaaaattgtattttagcataatgccgtttatccatcagttgccagcctggtatacctgagccctctataacttacatgaagtgacagtaagggtcattgtgaatcatcgttacaagtcttttttacctaggccctgtcctctcagactgacgtatatcactgagtagcaatcagagcctcttaatgctcccttaagtgtttttccaatcatctaggaagaatggggctggaggaaagaatcacaggccactgataagtatctatatggctatcctccaaagtatatgaccactcctttctgggttatcttaggagagcagggatgaaggaaaatgtgtatttgactactgcctactaatataatccatgcttgagtattttctgccttgttcttattcagcccagttctctctacattgcttattttgttataattaacaaaatgataagatcatatttattaaaaacttgcctggtttccatcttttccacacctactgattacctcaccccctgcttagatcaacatgcacatcttcactcatactctttgttcatgatcttccttgtcataggtttccatcatgcttatagaggttacctgcacggtttatctgtgaaggaaatgattgattccggcaagaacagcacagttcagtgggcaatagcaaaaaaaccttaaatgagctataaccttgtagccttagaatcagatctgtgtctaaagagtctgacctgtgagcaacactgggcaagtcaatatttgtaaactagaacgctctatgcaaatatatggtgttatcatcagtggcaggagtgtcattactaccaagtaactcctttatgtttagagaatacaagtagcatacagtgtggaacataattcctgtttaaaaaacgttctcctgtttaaacatcagttggaattgctaaaacaccagcttcataactgaactgctctaatacttaataagcatatggtattaaaattatatagtagcatacattttagtcagatcttatgttattataaatgtcaattactaggtataaagagaactaactaaaataaaaaataagagggaagtggatggtgataaaggaaatactttgtattatttgaaggtttggcagcaaaaggtcttcacaactgtttttcagttatcttttgtactttatttaccctatagaaaaacagatacttctgtattttataaaataccaagactatagtgaggaataaagttactatattcataaagaaatttaaatcattgtttaaattcaattctttggttttttttagactatattttctgaatttatcacaatcgaaatgttatttcacggcaaagctttagaggtctacactgctgcctaccagaatatacaaaacattgatgaagatgaagatttagaggtaggactatgtctatctaagctcagttcttctgttaatgtggaaatatttaaaagagaacattagtatgtgattaatatcttttttttttttgagacagagtctcactctgttgcccaagttggagtgcagtagtgtgatctcagctcactgcaacttccgtctcgtgggtttaagcaattcttctgcctcagcctcctaactagcttggattacaggtgcccgccaccatgcccagctaatttttgtatttttagtagagatgcagtttcaccatgttagccaggctggtcttgaactcctgatctcaagtgatacgcccacctcggcctcccaaagtgctgggattacaggcatgaaccaccgtgcccagccatgattagtatcttaactttgaacactatagtggttattatgtgtaatccaaaatagatgaacttttatgattttccatttattttcaatttttcaaattaaccatggcaaaagttccaagagttaatttattaatagctagtaaaatataatttacataaagccattaaataaaatactgtgtatcattttgactggtgatataagcccactgaagtgtgctaaaaaatagttaacatttattgacttcagtaacatttgagtgtttacatcatgcacaatgcccaaagctttacatgcattttctcattcaaacctcaaaatcttaggtggtaggtgctgctataactctcattttacaactacagaagcaggcttagaggatttaaataacttatttgtggccacttagctagtaaatagcagaatcaggattctgactgactgtgtaatgtaatcactaagctatgaaataaatgtaggttatgtaagcttgctttatgctgatggttttagttaaatgcaaataattctgattggccaactaacattagagcaagtaaatatcaaagactggtcctcaatgagcaattctgtaaatatccaaccctcttaccttccaaacggaaaaaatgaaggtacgaaagtatttatgctgaagtaactgttcaagacatactttccccatctcatctctaatatagaagtgaaaaaagccatgtaatcccacatataacaagagttctgtattaataaaatatggaagtgtctaccacttaacaaatttgaagattcccccgattttttttttttttttttgtatcttcccccgccttccaagacagagtcttgctctgtcacccagtctggagtgcagtggtgcgatctcggctcactgcaacctccgcctcctgggttcaagtgattctcctgcctcagcctacctagtagctgggattacaggtgcctgccaccatgcccggctaatttttctatttttagtagagatggggtttcaccatgttggccaggctgctctcaaactcccgacctcataatccgcccgccttggcctcccaaagtgctgggatcacaggcgtgagccactgcgcctggcctagttttttttgtatcttaactatcagtaaagagaccctctgagccttcctgtcccattactccacgggctccaggaaacttaaaaccagaatataggttaaagagaatgaagaaagtacatattacagtatgtgtatatgtgtttctaatgtcaaaatctaatttgttttatatcagttatatatacatatttatatttctctatttgtcaatcatgacttcccaagtgttaattccaaacactacagctaaggtttcttaactttcactccttttcatgtcctgcttttaaaaattgattatgaaggccaggcacagtggcccacacctgcaatcccagcactttgggagcccaaggcgggtggatcacctgaggtcaggagttcgagaccagcctggccaacatggtgaaaccccatctctactaaaaatacaaaaattagccaggcttggtggcacgcgcctgtaatcccagctactcgggaggctgaggcagaagaatcgcttgaatccgggcgtcagagtttgcagtgagccaagatcatgccactgcactctagcctggcaacagagtgagactccatccaaaaaaaaaaacttgattatcaagctttcatctgtcatttataaaataataaaatagcaaacgtttatataattactttgagtcagctactgatctttgcattttaactatatcattttaatcctctcaataactttgataaaagtacttatttctgatttctgtggatgagaaaactgaagcacagtgaggttaagaaacttcccagagatctcatagctagtaagtagcagagctggaagtctgatccggaagtctgactacaaggcccattatgctttaatcctctctacattagacttccagaagtatggttcttgatgagtggcattaaccatttcctgcaagaagtaacactgcatttagtggcagcttcaaaagtgatcccccaattctccttcaagactgtagtccactttataagtattttcattcttctttgtataatacctttgacataccatttgttaactgaccttaaagttccttcaagcccttcagtccccaaggttttcctcctcatcccagaggtcctagatatttttttgtcacaccacttcctttataactttttaccagtactcttaatcagccatctaagtagtttgtgggagaagagctctatgtaaaactaaaggtctccggaatatgtggtagatttttttttaatatcaactcccctactttctagtgaagtaatactgagcaagttaacttcttcgctcttcagcttcctcctttctaaaatggagatactgtagtacttacctcatatagtgtttgttcaacaactgtttattgagcacctcatatgcaccaagcaccattctaagtgtgaaggatgtagcattctaagaaacagtccaagttgtcaaagcagtaactttaaatctaccagggaattcagacattaaaaactgtgtaatgatttttttatatgaccagtcctataaagaaaaaaaaaaagtgttgtgtgtgatggagggttacaaatagtctggagaatcagagtgatttcttagaatcttgagggatgcatgggaggatgcctggcaaaaactttcaggtagagggcatagatagatataccaaggtcctgaggcaggactgttgtgaagaaagaacagtgtatttaaaacaacacagttgagaatcatggcatgtcatggaaaaaaacaaaaacaaaacagcacagtatagggcacgagcacgtgttcaatgaaccacaggcataaactattattatgccattattgtggagagaacagtctggagagaactgtggaaccaggggaagtaactaattgatgtaactgatatatcaaacaggtacctaccaagaggaaagatcctgtaaatacaggtttcttggaaagaagtaaagaaaacatgcagaaaaagacagaaataacttgctattcttccagatagtccatgctttgtaagaaccgctgagatttattccagctgcagccagtgttttgtagttaggcacctccagttatatcacaaaccatcttaattgttcttcacataaaaagtactgtcagctgggcgcggtggctcatgcctgtaatcccagcactttgggaggccgaggcaggcggatcatgaggtcaggagttcgagaccatcctggccaacatgatgaaactctgtctctactaaagatataaaaaattagccaggcatggtggcgcgtgcctgtaatcccagctactcgagaggctgagatggaaggaatcgcttgaacctgggaggcagaggttgcagtgagctgagagtgtgccaattgcactccagcctgggtgacagggtgagactctatctcacaaaaaaaaaaaatattgtcaggtcacctctgtattaacttcagagcacattcagatcttgagaactgctcttagaagagatcttggaccatgttggaaaatgcattattgccaataaattggagtaaaatgttaattgtaataaatatttaactggtatagacttgtatcccaagggttacatactgttttccatttcccactttaaattccatctttgctagaaaagttaatgttttaagaaaaatgtttctcctccaaataccagctaatgagtcattgcatttattttttatttatttatttatttttttgagacggagtctcgctctgtcgcccaggctggagtgcagtggcgctatctccactcactgcaagctccgcctcccggattcacaccattctcctgcttcagcctcctgactagctgggactacaggcacccgccacctcgcctggctaattttttgtatttttagtagagatggggtttcaccatgttagccaggatggtctcgatctcctgacctcatgatccgcccgccttggcctcccaaagtgctgggactgcaggcgtgagccacggtgcccggcccaagtcattgcatttttatgtcataccaggatgtcagtggtccatgtctggcaccaaaattgaatttggtccttggtaacctgttaacctaattagcacccctgaattactttaaaacacaagtctcacctcctgtcttttatccttgactccttccgtgtcctgaagttctcttaaaggaatgtgtagccaccccctaatttaggtctccttttccccccctcatagatgttaattaaattcacttttgccaaatgaatgatgttaactatgtttgcaacttaactgttaacatcattcatttggcaaaaatgaatttaattaacatcttctatttgccagggaggagatgcatagataaaacagggctccgttggtctagagaacttaagactcattgagacagatatgtaatcaattacaaaacactgagttaaaaagcagtacttgagggtatgaacagtaggtgctactcagacaacaggggaatgcagaagaaagatggcgttttacattgtgcttgaaggacaagtaattcttgaaggacagtttgttgtaattctaggctaaggaaccagcattgcaaaggcatagtataacttaggttctgcatttacagtcaagagccacaaaaagttttagaatagagaaagaggccaagcgtggtggctcacacttgtaatctcagcattacgggaggctgaagcaggaggattgcttgcggccaggagtttgagaccagcctgggcaacatagcgagacactgtctgcacaaaaagtgaaaaaattagccagagtacccctgtggtcccagctactcaggaggctgaagcaggagaatcacttgagcccaggagttcgaggctacagtgagctatgactgcactactgcaattcagcctaagtgacagtgggtccctgtctaaagagagcaataacatattttggccttaaataaaaagtaagctgtgaagggtatgtagagtcaataaaagagaagtgcctcaggtgagaaatgtataagttttatatatataaaattttttttaagacagggtctcatcctgttgcccatgctggcgtgcagtggcacaatcacagctcactgcagccttgacctctgagcttaggtgatcctcccacctcagcctcccaagtagctggaattataggcacgtcccactatgcctggctaattttcatattttttgtagagatggagtttcgccatgttgcccaggctggtcttgaactcctggggctcaagcgatccgcctgcgttggcctcccaaagtgtcaggtgagaaatttagggagaatgcccaggcttatagtttggtcttctaggtaaaagataatgtctttcattgtaatagctaatctagagctacacggttcagtaaagtagccattaggcatatataactatttaaagttcaatttaaaaattcagctcctcggccacgtgaaccacatttcaagtgcttagtagccacacatggccagtggctacgtttctgtacagtacagaacagcaagcatttccatcatctcagaaagttcttctggacagtgctggtctagagcaggagatagttgggagcatgaatacagctatcacagggtatgcttgtcaggggattagttgaagggtagtcattaacagtgtagataagatctttcagagaaactttttttttgagacagggtctcactctattgcccaggatggagtgcagtggcgtgttgtgatcttggctcactgcaacctctgcctcccaggctcaagtgattctcctgcgtcagcctcccaagtagctgggactacaagcatgcaccaccacccctggctgattgtttttttgtttggagagatagggtttcgccatgttgcccaggctgatctcaaactcctaggctcaagtgatcctcctgccttggcctcccaaagtgctaggattataggcatgagccactgtgtgcagcagcattgtttttatatataataagtggcctaaaggaaaccctttaaaaatattttaggtataagtagtagaaaaggagatgtaaagaaatagagaagccaggacaatgaaagagtttagtagcatttaagtttcaggaagggggtcagtgaggatgaagaggaaaaaaagaccttggtgatgtgaggaagagcaattttagtgggaggtgaaaagctcaattgtagtttgttgataaataaatggaaaagaaatttgtttaaaaagaaaatggagatgaagtcgaatattcaagaaagttttttaagtagttataccttgagataactaaaaaaaaaaagactgatcttgagcttgttttttaggagagggaacctgtgacaacaaaagcttttgttggttgggtttgaagttttggttaaaggaaaaatgcacattggaactaaatcagaatggtatttttaaagagaaagaaggaaaaggaggggcgaaaagcttgagggaaagttcaagagattcatatctgataaccttacctattagtctatatagagaaatggtgggggtagggtagaaaagatggagctagaaaggcttaaaagtggtaaacatttggaaatagtgccttaaggaaagagaactgacaagtcatggcattccagatcctagtaaggttggaatccataaattatagtggttccaatttactcttatgtaattttcatagcagtactgcagagttaaattggtaagagttgagaatttgcagaacagaaagattcaaaggtatgagtcgcagcctccctactagcttgcatgctctttgagggtctcaacttctgcagttctcctggcaaaagcatttaaatgattgtttcatgactaattactgtttaatatctgtcatcatcttacatagttcaaatagaatttttagctttcatctttctagcttatttttgttgtcttttcttttacatttacaataattggaattttgtccatttggggggagttgtttttttaaaaaaaaatcttaactaaggaacttaatttgactgtcttgattttgtttagcatctactttataatgctattttatcattacaataggttttccgaaattctctgtatgcaccagattattcatctcgtttagatattgtaagagcaaattcaaagtcacctcttcagagatcactgtcagctaagtgtgtatctggaacaggacaggtgagcaagaaaccgtactctaaaggaatttgagctgctgcctttggaattgttgagttctaaaaatgtttcccctcagtcatatcacctcggtaacttatcctcccctggacctatttcttctcttctataaaatgacagaagattgcattaagtgcagctctattatttcttaattatcttttatactgtaattacatattactctctaaagcataacacttgagagcagaagtggaaaagacaaaagaatgctaatgcagatgtgttatctgctataatatgaagagcagattctgaagtccaacttaggtttaaatctcactatcaaaacttagtggatctcattaaattataaagttaaataccaaattatactaaaaaagggcttttactgaacacagaaatcatttcattttttttctatatccagaaagcttgagtttcccagtatctagagcaggggctgacaaactttttctttaagatgtggagactaacattcttaggctttgtgggccatatggtttctaccccaacaactataaataacaactgttaagtaacacataaagcagtatgactgtgttctaataaaattctatttacaaaagcaggaggctggctgggccgcaacttgccaaaccctgatctagagagctatgcccttttcatatctagccttcagaatataaaattcaacaaacttattttcaagatacaacttttaggtaaatttgataccatactttctattttcatttgattctcctgtaagcatttattttgttttatatgtatgtatctctcccccaacccaattgtattttttttattccggcattaagtgccttgaacataaattccataaatttacttttatagtccatataaagttttgactacaactaataatgtcaccttagctaacacttgtatagcacttcagaatgcattatcccagggtttctcaacctcagcactgctgactttgggacaaataattgggcccaccagggaggaagaaggggacggaatactgtcctgtatattgtgacgacatcaagcagatattagcatcccccgcctctacctacaacatgccagtagcacacataaacacacagccccaatactgacaaacaacagtgtctctagacattcccaaatgtcccctgggttagatataatcaccctcaagagaagttttaagcaatatgccccacgtggcggcagtcaggcaacttaaaactggtgaattcagattctcaactcattccatttaaatcacactacttttacatcagtatttctgtcccactgcctagctgaaatatccttctatttttgccatccattttatgattctcaaatgctgtttctgtgacccaaaatttatttttaatattcataatatagagtctatacttttaatgtttttgaagtattgatggctatccaactaaaatcaaatggctaattacacatttttattcaaaaaaatgtgatgaatgaaaaaactggcttctgagcttaaaattcatagggaattttcactactaaaaattatgacatggacatttttttgaaatatttgttgtgtgccctttaatagcataaaaatataccaagaatgtaaaatttttttaagttagtatttttattttaaaaagtgtgttaacttttaacaggtatccacttgtcgactaagaaaggatcaacaagcagaagatgatgaggatgacgagttagatgttacagaagaagaaaattttcttaagtaaactacacatttccattttcatcataaatgacttgaaatccacaatgactaaattgtagaactttatactcactttgctatgttaagcctcaaagtgaagtccaactggaaacagaaaaataattaaaggaaacttatgctgaccaaaaatgaaggctttaaaaaatattgcataccagtcatttcaacatcctacctagtgttacatgatttttgtgtaagtgcctttttttttaaagatggtgtatttcaaagtatttcatattaatgtactatatctacttgaagttccaatagtacattatgacagaaaccaaaagatctaacaattctgcttagctttttggttaagactccatgctttcattaccagaaaagggtcttacgtagtcattatgattcatggaattctattccatgaagccttaagaaaaaaaactttttttaactttccctgaaactttatcatttgataagtaaatttacttttcaagaagagtataaccaaagagtaaagataatgtgacactaagttatcaatgttttatgaatacacataaggcataaatttcagctgtaaaaaagctacattcaatctgactctggttttaaaacaaaactgctgtcataattatacatgatactgcaacttttggaaggctaatttggtggaatgttgcctcatcatagaacaccatagatcattaaaaattctataaaaattttaccaagctaccatatagttaataaaagggtatacagtcacttttatttctgaaaatataaaacattgagcctttcagtgtatctgatgcttctcttttggtaaggaatacttttatttcatggatcccaggcaggcatataaaagttacggaatttataaaatcatttgggataattagaaaatgcaattattcataacagaaaaataaagactttctagaaagcttctgactttgtcaatcatggctctgttcttaacaaagcactccttcctgagaatagtcctaagtgacaaagttgtttcagtacttttttgtaaaatatttaaaacattttaaaaccctaaattgatattcttaagaaactcaagatatcattggatatttactgcttcctcactcagtatttaaatttggttgtacttcgggggaaaacaacagagttattattttgctgcttactaaatagcaacttctcttgagcattatttgccttgtttgtaaagttaaaactgcgtaaaacagtaattctggaataaaacatacattctgcctacctcaaagaaatattctaagaacaaaaggaatactatccatgaaaatactttcattaatgtaaaattttcattatttagaccagcctaggttggcaaacttcttaaagggccagatagcaaatactgttattcttcgtgggtttaggcaaattcaagactattatacaggtaactatgtaaccatgtaagacttaagtacacttaaaaaatgtgaaaaaccattcctagcttccactacaacaacaacaaaaaacaggcaaccaatccaaccaacccagcctgtaagtctccatctcttatctccaaaataggaatacaaattgagtatcctttatctgaagtgcttgggaccagaagtatttaagactttggatttcttcagattttggagtatttgcattataccagttcaacattcctaacccaaaaatctgaaatcttaaatgctgcaatgagcattttctttgagcatcatgttggcactcaaaaagtttgtgattttcggagcatgtgaaatttcagattaccagattaggaatactcaacctgtagtacatttactaggattatcagaattaaatgatagttaattcatacataattatacatcatatagtatctaatacagctcaataaacaacagctaatatttactgcaaaaacagaggcagcaaggtcactacttaacaggtgatatatggatcaagaatcactgctcttaacagtgatctcagtaaattaatagaaatgcactcctaacatgatttttacctatctcttggttgtgggattgactttctagacatgatctacatttttttagataatttctagacaaaaatgtttggctttaagacaaatgccactgggtatcaggctagagaatacacctccagtgtacctggtataccttgaggataggagaggaaaaactggctatgagacgacaattactgaagctgagtgatgtgtacatgaaaatttactattctttttttatatttgaaattgatgaggtgctgggaagctggctttctgaggggacaacaggaggggaattccttgatttgctgcatttatcactttccatggtgtaaaatactcctgccatggccaatttgttattgacatatcactaaaggcagagttggagagagatgtgcaaagatggctcccaactagaagataccactttctgtaatcaactttttataatgaagtttaaaaatattaagccctgatacattatagggtaaaaggaaatattcatataaattaatttaaaaatcaaaatacaaggctgggcacagtggctcacacctgtaatcccaacacattctgggagaccaaggagtgaggattgcttgaggccagaaatttgagaacagcctgggcaacacagtgagactctgtctctacaaataataaaaaatttagccagacaaggtggcacacacctgtagtcccagctctcaggaggctgaggcaggaagacagcttgagcccaggagttagaagctgcagtgaaccattatcagaccactgcactccagcctggccagcagaacaagactctgactcttaaaataataaaactacaaagcttatgtttactctagctggcctcttatctaccaccaccatcccacctcagcccagtttgaaatgcaattccacagtaagtaatccctcacgttaagcttcatcttagctttattcctttgtatctgagaagcattttttaactttccatatattattcaaaatgggtgaccaaatgaaccatctatacaatctttgctcaattaaaaatatcatttctactttcttcattgtgcttggtttggatattccaaacaatcaatttaacattatcctagctacttacaagcttatactttaaagaatcatactgaggtgctttttcatatcaaatttacctgtttatt

SEQ ID NO: 355 - DNA, 124679 bp, Homo sapiens
accagatttgaagattgtaccaggagagccgcagtgttccagagctactgaggggctgggccgggatttgctgtattcgagaagacccccttggacccgagaggctgtgggcttggggagcatgaggaggtttcacagcagaaaggacaccccggggctcctggataagccagaaaatgtgccaggggaagtcgggctccaagggcaccactctgggcttccagctgtgtgggctggaccaagaaggctcagagaaatgatctcaggcttgaagtggggagaagaaactgtattatgaaggcagatgaacagttcctgcaaaagtgagatttgtgtgtgcagctgggccgcaccggaccagggatgagactgggtgcccgggactcgcctatactgcctgggggtgcagcccgcactcctcactatagtcaaatcgactatgcgtgctttccaggggcctgggagaggactccatgtggagggatgcttaccttgtgggctttggaatataagccctttcatcttctccgctggtcctcaccacgttggcaaggcaggtattgtgaccctgttttctcaggtgaggacatggaggctgagaggggtctagagactggcctggctagtaggaggctgagtcaggatttgaaccagcagatcatctgaccccggagccagtcgtgggcagcacagcgggagctgcaaccgaggctcttgactcctgcctcgtcattccctgaggtccacaggacaaccagttggggacctggggccccatcctgatgccctggggagaggtgctaggccccttttgggtctatgggctacttttgggccagtggagctgggtaaagaccatctcaaaccctgtgccaggggaggtcagactccaagagcgccacctttgggcttccagctgtgtgggctggaccaagaaggctcagagaattagggggttcgtatttgatccttttccttccaagactgggattaccagataaaacacagggcatccagttacatttgaatttcaggtaacaatttttttaagtgtaagtatgtagccaatattgcatgagaaatactcatgctaaaaagttattcgtcgtttatctgaaatgcaagttcaaatttaaccgagtaccctgtatttttatttgctaaatctagaaaccctctccaagaggctccttggcccactcacagggagagcccgatctccctctagacaggggaggccccctttctcaggccagaaaagatcttgtagtaaactactcaagaggctgaggcaggaggatcgcttgagcccaggaattcaagacctgcctgggcaacagagcaagaccctgtctctagggaagatatcctaccgtagcctccctcggggactcccattcctcccacctcagggccagtcaagggaacaggcctctgctctgggcagaagtgccggcagccgctctctgaaaagctaggtgttgcctcaggggctcccggtgtcctgtggaaaatgcctggccacggtttccatggttcccaggctccaaccctgcagttctcggccctcattcaggaggggcctcggcagggtggggggtgccgtctttcccttgccggagccccaaggactctgccggctccctcgctttggcagcagcactgcccaccctgtctctggaggttcccccgcctcaatccacccagctaccccgaaaggcacaatcataggcctttctcgtcttttaagggtttttacttccatggggaactatgtgttggatgagaaaagtacccggggaaggcgacagaggttcagaaagctctgcgagtcctggacgctggtctgccttcttggctcaccctggaaggtggacgctggccccacacatcccctcttaaagacgcaggccgatagccagcagatcctggggcttgctggccccaagtgagttgtcagggtttcagaggacgccagtcatggcaaccccagctccatggctgccacacaggcctgggcttcccaggactgcctccttcttgttcgcttatgtagatgaaaaatgaggtaacggcactcccctgccccaccctcctcccagaagtgcccagggtgtaaacgcaatagcttgtgtgaagtccactggaacccaggctcaccaagtcagtcttaaccaacacaggccccagcacccgcagagcagacactgcgatgacaacggacgacacagaagtgcccgctatgactctagcaccgggccacgccgctctggaaactcaaacgctgagcgctgagacctcttctagggcctcaaccccagccggccccattccagaagcagagaccaggggagccaagagaatttcccctgcaagagagaccaggagtttcacaaaaacatctcccaacttcatggtgctgatcgccacctccgtggagacatcagccgccagtggcagccccgagggagctggaatgaccacagttcagaccatcacaggcagtgatcccagggaagccatctttgacaccctttgcaccgatgacatctctgaagaggcaaagacactcacaatggacatattgacattggctcacacctccacagaagctaagggcctgtcctcagagagcagcgcctcttccgacggcccccatccagtcatcaccccgtcacgggcctcagagagcagcgcctcttccgacggcccccatccagtcatcaccccgtcacgggcctcagagagcagcgcctcttccgacggcccccatccagtcatcaccccgtcacgggcctcagagagcagcgcctcttccgacggcccccatccagtcatcaccccgtcacgggcctcagagagcagcgcctcttccgacggcctccatccagtcatcaccccgtcacgggcctcagagagcagcgcctcttccgacggcctccatccagtcatcaccccgtcacgggcctcagagagcagcgcctcttccgacggcccccatccagtcatcaccccctcatggtccccgggatctgacgtcactctcctcgctgaagccctggtgactgtcacaaacatcgaggttattaattgcagcatcacagaaatagaaacaacgacttccagcatccctggggcctcagacacagatctcatccccacggaaggggtgaaggcctcgtccacctccgatccaccagctctgcctgactccactaacacaaaaccacacatcactgaggtcacagcctctgccgagaccctgtccacagccggcaccacagagtcagctgcacctgatgccacgattgggaccccactccccaccaacagcaccatagaaagagaagtgacagcacccggggccacgaccctcagtggagctctggccacagggaatcccctggaagaaacctcagccctctctgttgagacaccaagttacgtcaaagtctcaggagcagctccggtctccatagaggctgggtcagcagtgggcaaaacaacttcctttgctgggagctctgcttcctcctacagccccttggaagccgccctcaagaacttcaccccttcagagacactgaccacggacatcgcaaccaaggggcccttccccaccagcagggcccctcttccttctgtccctccgactacaaccaacagcagctgaaggacgaacagcatcttagccaagaccacaacctcagcgaagaccacgatgaagcccccaacagccacgcccaccactgctcggacgaggccgaccacagacatgagtgcaggtaagtggctcctgctggtgatcttcggggatttgggatgcggagtttccaggacgtctccgcacttgaggagtggagaggagggaaggatctggagcctactcacagcctgctcctgctgttgcctcttcgtgatcttctagtggttcttggcgaaatcaggaaaaggcagatggagggttgtgtatggaaaggggtggggatggaagtccggagaaatggtttgcggtcttggctctgcctgtaacaacccgagtgaccttgggcaagtccctgtccctctctgggcctcagtttctccacctgtatttggagagggttggaatgggcactgaagtcctgtccagctctgaccttctgtgaagtgcactgttgagcagctctggaagcttctgttccagccatagccacacagaggagcagcaggcaggcatcaggcccaaactgctgctctctgatgggcttggaccccatgaaagtggggcctgctggatgcatttcctgggattctgtggaagctgatcaggttgctggggcaagtggaggcaggatagaggtgaagggctgtgggatggagaacctcagaagactccatctggggtccgggaaaggacagagagggtatatgaggggtcgggccctccagatctaagggtggggtggtggcatgtttcttgagttggttcctggaaagggagctgaaatggtttaatcgctcttccatgaaacgcaggcggtgaggacagccaccagacaggtaaacacactgtgcattgatccttttacgacttttgtgaaactgatggacaggcaggcagggaggagtcctgggagagagtctggggcactccatcttggggtaactcttttgctctcctcctttaattataattattaaataattaaataataaataattagagaagtgcacagatacatatgcccctggacgttcagatcagcgtggtggataatagtaacgtttcagaagtagggtctggttaaataaactactgcacatctttaccaagggatggtgcttcctatggaaaaagtttcctaaggaaaaaggttcctgtggaaaaaggttcctgtggaaaaaggttcctatggaaaatgctttcctgaagagcacatgctttgaaggtggccagacttgggtggaaactgaaactctgctagtgactagatgtgtaattcagggaacattccttcactctttcagcttcagtttccttatctttaaaaggaaatgatcataatagcacttatgctgctgtgagatttaaatgagataatgtgtccacagtactcagtacagtgccggacacacagtaagcactcaaacaatggtaatgattattataatgtattttaaaatatgacactatattcaaacataccattataatatgtcaaatgggaatgtggacacaatatatgagacaacctgttcacaactgtttaatgaggaggttatccaacattaggaatgatttgatccttcaataaaaaatcaatgtgtgaaggttcctaggcatgaaagaaagttcagaaggatatgtacgaaatattgttgtctctctggggattgggattacagggattttttcctcttttctttttgttaagtttgtgtttcctaaagtttctgcaataaacgtacgatgcttgtataataaaaattataggttttccttaattgcatagtcagggcttgcctccctgcgcctcctaccccaactccccaacatacagtagttctgagggatttcaccccctgctccgggagagagcgggcttagcctggattctgggagaagctcttgcttggtcccagacccaagtaaaacagcagttcctgttgtgtttggggtgtggccactgccctgccctatacagaaaataggatgcgttgcgttattcctttgtttctctgacaagcttgccaacttattcctgttccgggagaaccgggggctgtcagcactgaaagggggctcagaaatcccatctcattttcagatgggggtgctgaggcctggcctggggaaggtgcttggagggtgttgaggcctggcctggggaaggtgcttgggggtgttgaggcctggcctggggaaggtgcttggagggtgttgaggcctggcctggggaaggtgctggggggtgttgaggcctggcctggggaaggtgcttggagggtgttgaggcctggcctggggaaggtgcttgggggtgttgaggcctggcctggggaaggtgcttggagggtgttgaggcctggcctggcctggggaaggtgcttgggggcgttgaggcctggcctggactggggaaggtgcttgggggcgttgaggcctggcctggcctggggaaggtgcttgggggtgttgaggcctggcctggcctggggaaggtgctggggggtgttgaggcctggcctggcctggggaaggtgcttgcacagggtgacatcatttcagggagtagttgcctctgtccctggccagtctccagtctccagcttcatatcctcccactggagagcagagacgatgggggtgtccctgtgtatgcttaagtgcaatggcattttaagaaaactattagcaattttatgaaactaaattgctgctgttttattagcagccacagtcagcaaggccctggctgggtgcttgctccgtgaagctgtatacgtgtgactgcctcagcagcgctggctgctcctgctcttgaatctaaaaagcagctggacaaaatgttcacgttttcgctcaaaaccaaacaaacagaaaaactcaattagcttgtttgtgtgggctgaagcacctctgtttgcccgccccccgcagtgacccccatagtgtccccggaatggacggactcacgggctgtcacatcgcgcacgtcttccccggagaagggatgtgaatcttggtggggtggggggcactacctggcccagcacagggtgcaggtgggtgacccgggagactctccccgctccagacctgtcatcatgttgccatctgaggcggcactcacaggtttgcggggctgcacatctttgggggcctccactcagcctggcacagtgtgtgcccagcaagtagacgaccgcatcctcgccagcatacatgtgctagaaacttctgtcaggaaacgccgctcttcacagccaagggtggaaactactggatgcattgcagagctgacgccctccctccggcctggctccgagccatgcctggtgtggtggaggggtggaggccaccctcaccgggccctgtgtgctgctctgatgccgctgagggggccggggcctgggtgtgccctcagcgcatccactgcagaggggagcctgcgcccacgttttggctctgtgggtaaaggtggccaccccctgagcttgtagaggtgtgggacacttcccgatgctgcctgccatgattttacatgaaaagccaggaaaaggcactgaggagccacctgaccccacggaatgccatttcctggggttgcttggccagaagtcattgacacagccctgccagccagaagctggggcagggacggggtcctgccttctgggacaggttctgtgtgtgcgtgaccatgtcccagaggtctctgctcagccctgggggcgggtgggggtggggttggagggtggatggtgggggtggggccaagttagcccgagcggtctgtgaggtgagaagggccggggtctctcctcctctcctccgcaccccaccccgccttgctctgaatctctccctctctctgtctctgttggtctctttccctctctactccccattctggtgtctttggagccctgggtaaggtgtgtgctgagtccggtctggtttggggtagatgttctttgatctgttaccacacctggagggaaagcccctggcccgccccccctccgttcctgcagagccaggccccccaaccagtcggtgggcaggatgcccaccagttgcccccatctggcccagggggacctttcctctgctctccagggaccactgcaggtggtgtggcccctgaggggagcataagggtgcagtgcctgactcaggggacacagaagccccgtccatacggccttttacacagcacagcacccagccctcggcagcccagagcaggaaccaacagggtaggtgcccaggggccccaaaggtcagagttcctcgcacagctgccagggagcacagggaccgcagcacagggtcttctgctcagcaccgggaccccgctcgctgcagctaaagaaacagatacgtccaagggctccacggccggggccgggcacctggaacagggtggtcctggggcggccacatccactccttccaggtgagttcccggtgactctcggcctgcagtcggccttgctgaattctcttaggccacctggctgccccctgctacgcgtccagctgttgatcgcccactgacctgtagaagacctggtcagcccctctgtcttccgtcacccatggaggcgcctgcaggtgctccgcgcagcccgcccggccctgcacagacccgaggcggcaccagggggcgctgccggcccgaggacgcgggcgcggggcggaggctgcggggcaggagccgctgtgcgcgttcaggcagctgcccgggacccctggcaccgaccgcagcccccagaggcccccggggggtttccgcctgagcctaaaccgaagacagggcatgttttcagtcatcccgaccccacagactcagcccgttagttcccgcgctgcccggcgccctagtacccagagccggtggggactccaggccaccaaaggcaggggcggggcgggcggttgaaggaagattgggacacggagaagagggacaaggcctggggcccgaggggtcaggacgctctgccagcctcaccacccgcaacacccaggcacggacgcacgcacacactccacacgtgtgaacacgcacgcatggctgcacacacgtgcacagagaggcacagcccgcaggaacacagatgcacgcacacaggcacaggcacgctccctcactcactctctctcacacaccccaggtgcagacacccccacccagaggttgcagctcggatggagaaacaggctgggtcacaaaagccccgggaggcagcccctgctgtctggcgtcttctctggggaaagctttccggagcctgatggaggaagacagaggaaagagacctgtgttccctgatgcactggccagccgcttcccggggaggaggaggcagaaatacacagtaactgattgttgcctttggtctgtgaactgtactatggaacactggaacttactccttcacctgactgcatgtttgtgccccataaccagcctcactttctgtctgcctctcacccacacaccctgcctagcctctgggaaccaccagccaactctctgcctctgtaagagccactctttcagtgcccacaaatgagtgagaacatggtacatttgtctttctaccccggcttacttcccttaacatgacagccttcaattccatccatgttgttgtaaacgacatgatttcattcttgtttatggctgcggagtattccattgcgtaagataccacgtgttctgtatccattcatccattgataggcacccaggttgattccatttggcttttgaaagtgtgtagttggagaatccaatgtgccccctcgggttttcaaaatgtgggcatcttgagtgcgggaaaggaagtgcctgccgctccccagggcacccggtggcatctgcagaggggaggcagccacagcaggcctgccgtggtgacagcaaatagccaggcggccagggaggctcctgcggtgacagccccgggtcacagggtcagaagcagcccaccggggccggggtggcttgcgttagtttgggaacattttaagccattaccactttaaatactgattttgcctattctttctctccttcccagaactccagttactcacgtgtggtgtcttctcattgtgtctgctgtctcttcccatctcactggggcagtagggctgccataagccagcaccacagaccaggggctccacaaccctggtggctgcaagttcaagatcaacacagggacagggttagtctagtgaggcctctcttcctggcttgtggagggccacctgctccctgtgtgcacaaggccttttctctgtgcacacgcatgtgcacgcgcacacacgtgcacacacatgcacacacgcgcacacacacgtgcacacacacgcacacatgcacacacacgcacgcaatctggtgtctcttcctcttctcataaggactccagtcctatcggatcagggccccaccctgctggctgcacttcaccttaattacctccctaatgtcttctctccagacagactctccttggtgggtggggctttgtgagggtttgaatgtccgtgttccccgaaattcatctgttgaaatcctcacccccaaggcgatggtgttaggagatggggcctgtggtagggacggggtcctgaaggtggaccgctgatcatgggatcggtgtcctcataaaagaggccccagagcgcccctcccccatcccccatgtgaggacgcagtgacacaccagggaagccggtcctcaccacacacggaatctgccggtaccttgatctgagactccccagtcttcaaagctgtgagaaatgcattgttgtttctgagcccccagtctatggcattttgttatggcagccagaactaagccaggcttccgcatgggcattctgggaggacgcggttcagtccctcacacttgctctctctattttcctccttatgcttctgtccttcattctgagaatcttcttctgacctactttctagttattcattattgttcagtgatatctaaactgtttttaaacccacttactgagttctgaaacatcgcttgtattttttccaggcaatcatttttgtattgcatttacaaataggcatggaaatagagactgcaatgggaaaatagagaacgcaatgagaaaagttggagttctagaaagaaagtggagggagaataggaagaatacaatcagcaaagaaaaaaaaacaaatctttcctttttgtgtaatttttatttctccactgaagttcttgaccttctctttttcttctcatggacaatgtctccagcgctctctgcagccggcgtctgagggtgctgcgtctgcattctcgtgtagacgttttcatttgctgggtttctcaccgcttatactcacattgccatctctccatgtgtgcctggctctttctttctttgcctgacattctgtttgcagtgttttggaaggagaatctgaggccagaatgatggctcctccagagagggtgagcctgagtgccggcagcctggaggggcagggcggtggctctggtgtcctgcggtttgcgtgggctctctctgcacttacactcacaaaaagacagtatctcaggcaggaattctcgcagggtgcaggcttctcttttgacagtttaatgtcacgcgtgggttcctttgtaaacatcagatcaatagcggagttccaaattaaaacattaggataagaagcccatgttgactcatccgtccctggaatggcctagaagacggggcacttggtgttcggagatgcgtctgtctcaggccggcctccacgggtcaggtagcctagggtgggaggaggagggcggcgggcagccccacagccgagatccaggagaaaggaagagccactcactttctcttcttcacaaagtcctgggaacgcagggaggggagacggggtctcgttctcaaaggcagctttgtagccaaactgctccctcccggcaggaagagaatccccgctcagaagaaaggaggaccacccccgatgacggcaggtggccccaagtgtttggatgcggtgggccccactggtttgggcctaacctcaagcggctgctaatggttccatgacacttttcccgctaacacttcacagagatgtctgactgatgtccactgctcagctgcaccgctgagctggtgagcattcaggcagagcacccacctctacttttctcaccccgaaaatcagagactggttctcagctggtgcagccaccgccccagcgtgccggatgcaggactttccctgcgaacactggacagtcccagcaaagcagacggtgggtcgctctgtatctctgaagaacagctgggcctgcgtgtgtcattctcaggcatctggcgcagggcttctcctccaggaaggtggctgctcagctccgggcactgccaggggccacggaccccgcatcctttccaggctgttccgcagcatctgccctcatactcacagccaccgctgcgtgtgtcccagggattctcagaatagaattctgtgcctctctcgcctctggaagtgaccgcgctctgtaggaaaatatcacagcacgccggcctcgaaaggccacgacgtggccctaaactgttctaagtatgtcagttacttagaacaatcagaaaggggcagaacaagctggggtgtggagtcaggggtcagggcacagacagcatctcttgtcttgcagagagaatgctagcaatttgcaagttacttgaaaaggtttgtgattttccaacgccctgagtaattctagccaaaatgcgtgactcgcctcacactagatgcttgctgtaattgtgtctctgtattaaactgaccgttctttggagcttcagaatggaccaggaggaaaaggtaaataccaacctcgctacaacctcagaggcatcaacgccctcctgctacagacgcatctgttctcgcctggctcctgccggctgccctgggagaggccacaaaatgccctccacggagacaaggcctgagaaccttcgggacgcccgctgccgctcactgtgttgaagaactgcccgttccgcaccccgggccctagacacacggctctgcagaggacgaggaagtgccgtcaggtgagacttcaccatgaaatatcttctgagacacaacaatctccctgaattaaaactacagactctaatttataaaaactgtgtgtttcaaaagctccaagtgtttacattctccgattcatcattccttcttctaatttattttaggaaataatgcaaagtactcacaaaaatttatatagaaagatgttcattgcagaattcattataataaaaacctttaaatgctctgagtgcccagcgtcagcatggtgataacatacatacgagggaatattgtgcagctgcagttagttcttattacatttcacaggcatcttaaatgctttgtgaacaccggtgcatagatttttttgtttggtatagatggcaatgattagatgggtgaaataataaaaaaaatggacatataattttaaaaatattgagtgacagaaaaaaatgaaaaaatgttaaagaactttttggttatgatattatcactaaaaggccgtgtctccttgctcccttctttggggacggttctgggcttgcctggcccgtgggtgggaattgtggtgctccaagtgccttcagctgctgctggggtcccaggagcccagcctaggtgttcttccatcctcaccaccccatggcctccatggagccccacggcagcctcaggaaggagggcagtatcgtcagaacacagtcctcatggaccccccaagagacccttgggcagaatgccccatcccacccaggtccagcttcactcagcacgtaaacaggaacacggctgcaggcaggctccacgcaccccgtccccagggaagccgcagccctcgtcccacgtatcccgggcaggcatctgtaactgagggctgcgtggtcgggtgagcagcgaggcacatgctggctgggcggggaggggcggccctgagtggtcgtcttgctcagtgctagaggggctctgagccgaaggtctgagggtcctggagctgccatggcagatccccacagtctcggcagctcaaaacaacagggactcattctctccccgctcagcagggaggggtctgaaatcgagtccatgggccgtgctccctccagaggctccaggggaggaccctgccacctccaccagcttctgtggctccaggcgtccctgggccgcggccacaatgctgcacctctgcctcggtctccaggcgacctcctcctctgtctgcgtctaacctccctctgcctctgtgtaaggacacttgccgtgcatgtagggccaacgagttaatccagaatgacctccttatctcaagatctttaacttaaacacagccacaaagacctgcctcctatttgaagagaggttctctgcacagttccagggtcaggaggtgaacaccaggtggcccagcctcagccaccccagtgatgatgtgtgaggtttcagaacagctgtgctgccctgttaggagctatacacgcagaaaggcaactccgccagcgtcaggggtgccggatgcatgcaggatcagaaggcgtcggatttcccagggaagctggggagcaaggatcctgcaccaagggaggcaggaggccggagaccagcccaggcccagtccaggaggagcctggccaggagtcccaccaaagccactggagcctccgtgacccagccctggagggtcagcactgtccctcaaacggattcttcacacacaggtctctctgtctgtgggggctgcagggccagtgcctgaggagcccggacttcacacaggggtctctctgtctgtgggggctgcagagccggtgcctggggagcccggactgccggaaacctttgcggtgggaggctgcagatgggacttcttggcctgtgtttatgtggagcccaggctgcgggcaccacagccaggcacaggtcaggggtaagttgtgggtgatgtaaggactagaagcgtaagtaatggcctgacccccatgtcctggctgtgctgtgcggtgggaaagacatgggctccggcggctgctggggatggcctggcttgcacctgctgggtccccccctggccaccagcctcacccaagggcagttggtgactgcctgcctcactcctgccaaccctcaggggcctaggagtcctgcgtggtgggtctaggaaccatgctggaggacaggcctgtgccagggccaccaggatgtctatggcaggagccggtgctggcgaaccccacaccttgagccccagagccaggatcctcagcccaggaaagggaccagaggcgggaaaaccacacggcaaaggctgtcccgtgaggtcacggctccgtcaccgctgcccacacacggaaggcagccgcggctgggtgaagccatcttcacagacatgccgtccttgaggctctcacacatgcacacagacgctccgtcctctcccacccgcccccccgccaccccgggcaggccaggaagtcccatctggggcctcccaccccgagggttgccgtcagtccgtgtgcccaggcatcggggcctgaagcctccacagacagcgagacctgtgtacgaagcagactctgtcctagggacagtgctgaccctacaaggctgggtcactggaggctccccgggtccagtggctttggtgggactcctggccaggctcctcctgggccgggctggtctccggcctcctgcctcccttggtggagcacccttgctccccagcacctcccaggttcacacagctcctccctggggctgcgcactgacccaggggcaggaggtgggccatcctctcggtggactgaagaccttgtccgaagggaaagcagggccggcccaaggcctggctggaagagtgggtcttggtggcaaaggcggcccgtgggggcagcccacgcgaatgcttccccggcgccctgagcccctgaccgcggctgagcctgcggtactctggcccctctcgtggaaagatgacctgggtctaccatgctcagtatcacccaaaaattcctacagaagtctctcgggacaagaaaaggccttcttccctccctcctcctttcctcttcctttctttcatcagggaacagcttccggctgcctgcactgtttgggcgccgtcataaggagccgtgacggccttcacagagctccggggctcacgggtgtggctgacctgccacaaatggggcgacagaggagagggagggtcgggcaccgatggctcaggagggaagagatcccttctgtatggggagacgggggcttcctggagggcactggagcgaggggctcaccagagtgagacatccaagggatctgggggaccggccatgggacactgcggtcccacgtggctcctggatgtgctgtgtgtttgctgagctggaggggacggggagcccatgtgtgggagagggagaggccatgcacgccctgagtcgggctttacaaaaaccttctgggggcagcaggagaggagccacgcagaggcagagccagggagaggcggtggggtagtgagggggatgtcggggtgcacgggttaggagacccccgagtcctgggacctgcatgctgatagtcaaggttgcagaggcggctgctgtggtgaccacagggcagggagaggcagtggggtagtgagggaatgtcggggtgcacagcaccagaccctcccagatcttctgattcagtcctggggggaccctaccccagatcttccaattcagtcctggttcggcctgagaatttgcatttttaacatgtccagggaccacagtttgaaaacctccacggctgacatgtaatgggatgacatggtccaataaatgaaggaaaaataacaggtggcaacctcaggcagcttcatcccaaccagtaagaaagtaaatccttttgtaaactaagaggaagtattaatatgggcgtttgagcaaacatttaagtgttagaacaaagaattaaaaactagcacaggcacccctgaagcatgataggatggcaacagaagggctgatttagtttccaagaaataactgacaggcagtgttgtgcgtgtgtctactacttaggaacccaaaacaaaccttcagaccgttttcatgagtactgagaccaagaaaaccactgggcagtgggtggtctggaaatgtaaatgttgatggtactccagtaatgagtcatggaacaatgtttcatattgaaaatgtttttgtaaatgtgggtttcaaggtttcaaagtgaacccgtatgtgttaggagaaaggacacaccaaagaagtaaaataattgggtcaatataaaaagaaagtagaatactgcccagagagaagatgtggataattcctaacacggatcaaaggcaccaaaaaggtgagctgtgagtaagatattcagacctgcaccatcccctgcattagacacagacaacatcttggtaggcaactgggtgaaaattcagagacaaccctaggaactatgaggatgaaaaaagttagcattcatggaatgaggcactgacgaaactgaaaagctggaataaccccatgaaataacgagaataattgtagtattctgaaccggggcacaggacacaggactggagtggaaggccgcatgagaccaccccgggaaagacccagggatcacactggcccaaaggtgggcacttcccaactccgggatttgtgatacaggcactccaggctccaccatagaactgtgtccagcacgaaggcagtgctgtcttgcgggaggcagggctgcaccaccacaggggcgggaaggggcccggcagggaggcgcccagtgtttccagctgcaccggtcggggaccgcgctgatgcagagcgcgggggcgcaggttaaacctaaaggagggaagcttttgggggcggaacagacaacggagaacgctgcacactgcccttcccacgcgaattgtgctttgccttttttttttttttttttttttttgagacggagttttgctcttgttgcccaggcctggagtgcaatggcctgatctcggctcactgcaacctccgcctcccgggttcaagcaattctcctgcctcagcgtcccgagtagctgggattacaggcgtgcgccaccacgcccggctaattttgtatttttagtagatactgggtttctccatattggccaggttggtctcgaactcctgacttcaggtgatccaccggcctcggcctcccaaagtgctgggattacacgcgtcagccaccgcacccggcctgcttgctttttttttttttttttttgcagagtctcgctgtccaccgggctggagctgcagtgatctcggctccctgcggcctcgacctcccgggctcaggcgatcctcccgcctcagcccacggagtacatgggaccacaggagcccaccacgcccgactacttgctgtaatttttgtagggatggggtctagccccgctgcccaggctggtccgcactgctgggctcaagagctccgcccgcctccgcctcacaaagcgcagggatcccaggtgtgagctaccgcgccccgcccagagtttccgactgttagcgtgaatcatattcacgtcaaaacttctttttatacaagaactaaaaggcaaacgaaatccctgctccatcactgcctgtcccgggtcgcggcgcgggacatttcctccaagcgccttcccggccccgcgcgcaggtggcctgcgccggaggatcccggacaacgcgcatttcctgcgcccccggaagcggcggtaacgcctggccctgcccccggcagaggcggaagcacagtcgctctgaggtcgcccgtggccgcaggtgcctcagcccagccgcgcgccttggcccttggccgcctactcctaccgccccggccttgggcggccctgggcctgctgcgggcgcggcgctgcccgaccagagcttcctgtggaacgtcttccagagctgccacctggcaccgccccggcacctcccgcctcccccgcagctgccccggacccgtgtcccgacccccgcggccaaccccgttccctgccggttgccccgcggcctcccccgtcacctgccgggtccccagcggcctcccccgtcccctgccccgacctccgccgtctcccccgcccctgcccggacccccgcgggcgcccccgaaccctaccccgaccgacgcggccgcccccatcccctgccccgacccccgcggccgcccccatccccttccgggtcccccgcggtctcccccgtccgctgcccggtctcctggggccgcccctgcctcctgcccggtccctgtcctgtgcgtcgggcgcttcccaaggtgcagagggcgccactgcagacccgaggtcgcggccaccggctcctgggccaggccccgtttctcgcctcgagccgtcgggggagggtctccagggtgcttgtttggggaaagcggaaacagactgtctgggccgctgttaaaatgtcagcagccaaggaagaagcagcgacctggcgtctgctcgggccaggtgacctttatggcggcgccttctgtccctggtcgcttttccactgaatgaatgaccgaaactgtagtaactcatggccagggaatggcttagttatctgagggaatcttgtcttgtctgtgaaaaagggaaactggtgcaaatgggaattcagacaggtcaggaggggaaggaagggaaggattgaggtgggaaaagagagagaaagatgattgtcctcttaggggaagaacacacttggacgtggctcctggggcacttccttgattccgctgtactcctcagcgggaccggagaggcggaggttccaggagggagccttccagagtcggtgcagggttgacaggagacgtttgttttgcttttcctgaactttcgatcgccagcttgtttggtcttcttgatgttatagggttgatagagaggagtggagtgatatcggacacccagcttcagcaagctctctccaagggtgagtgggccagtgggacctgggtctccggaccaagaagccgcgagcctgccctgctcacagtggataactttctttctgaagttgattttccaaggacaaaggaatcattaggacaaattattactgcttcatggtggagatgcttctggtttattttgtggctaccgctgttactgcttggagtgcctcaccgagccagctaacaacggcgtgcgtgagcgcagggaaaggcttcttgagaaatgaaaactaggttgtaggtttaggaggggaataggaaggttagctctgtccagccgaaagccttttggtaagttgggggtccttgaatttcctgggtgactgcatcttggtgacttctctgaatagaccttcgagggcactggggggtgattgttggagggcttggggagctcaggcagcacttgtgtgggaacgtggctgttacaggaactgcagaaactgggactgggttcctggggaaaggattgggggtgttggaggcgctggcaggggagttatggggaggcgttcttatcagtgtgcgaatattgggcgttcaggcagcgggaaatctgggtccttggcgtgttgtgagctccctggagttacgttcttgccagtttcagctcaattgatccccctcccctgagctatcattggatacattttacttcattgaacacctgactgctgctttttctgtaatccctcaggggcagtcatcttttctgattctgtgtatagtttgcctttccagatccgtgccatttaagctagaaaaggggtcagttttgagatgttgtgaaaatgttgaaaggctcctcgttattagtgggaagtatctgatgttgccagagactgaactggggcgcggggagcactacggctgctagacactgcctcactgcgctgtgggtggtggggggggaggtgctggattcagtcttactgcctaatgatttgtgaggatttgtgttttcagagtaacatgtttaccttatgttatcagttcctaatatgtgacgtatgggccacagatgctggtgtattatttcacatgcatttatatagattgttttcagggaattcagaaattctgttatctctacactagtgattgtgctttcttgatttttctcttttcattattcttaaatcctcctttttttatttgcatctcagtttatttatactcgggaagtgcaagacatggcgactagaaagagatgtcaagagaacccggaatccagtaggctacaatttggcaaatcttagcttaaaacttcctaaatgttgaccacagtggatgcaaatggctctgtgcatcgtctgttcaatatggtcaggtgaccacccaggttcacgtggtttgtcaccagggtgatacgagccacacggagtgccctcctcagaggccatgtctcagagacgtttattttgagtggttttccagcgagtgatgcaagatttatgatccattttaacagctgctttttatgcatttgctcaaatttttagattttaagtttagttttaggttttctgttaatttgctcaactaggagtggtggtcaaatactggacctcattagcatggtagcctgccctccttggcaggctccactggagtgccttggggcctgcctggattccagtcctggctctaccagttttgtgtcctcgccgttactgggagggagtattgaggaaatgcatgcgaggtgcctccgtgattcctggcacggagcaagtgctcagtaattgtcagctgtgagtattagtagtagctaatacactactactattcttggctaacaagccagctcaaagctttgatggttttccattacctgatgatggtgatgatggtttccacttcctgaacactcacacccctgggctaggcacttaacccaaatccaaggtcagcgttattgtttggaggtgggggagacacctcctgctctgactcgtgtgtttgggttcccgtattttcaccagagggtgttagtcctgccccagttcagctggtcctcaaagcgtatatagctctttaaccctcagcaagtgtcagtcagaacataatcttgatttcagctgctactaaatatctaccaggagcctgcttgagagagagaattgcctgacaggtgctgagtccaccattcctgagatactttgaaatcagtgtctggcttaacccaagctgtgtatggggaccctctcaccgtggtcccaatggagtcgcttttgttaggcgcccccctttaccttgggctctgagcttcctctgcctttcatctctgcaggatgaagccccactcgcccttcaggatgcaaagccctcctctataaagtgcatgcggggccagatgcagtggctcacgtctgacctcccaacactttgggaggccgaggcagggggatcgtttgagaccagcctggacaacattgtgagaccctgttccttgaattgccctgggagatttcctcagcttgtactggaggtgtgtggccccatgaagcccatagtcaccgttcaccctgagagacgctggctttggggctgacacacctgctgcggggcagccccaggagatggccaccctgtttctcctggagctggagctgcgcgtcttctcagaaactgtggtggctgtcctgttttgtttgcatcttataaacctttacctgattacattttcctcttcaatttagctgctagaaaacttaaagtcagattggtggctcaccagtaatgagagtttagagtagaggtaaactttatgacatagtcttagactcttcactttctcctcagccaacatgattcacatttactttattttgctgtactgtgagtgtctttgtgtttcctgaattccttctggaataaggcaggttgttagtaagcacaggtttctggtccatctcatagcctcaggcagtgggcggtgctgtccgtgctccctttctgggttacctgtggtagctctgaagttgcagggctgcgatttgaagcctgatttagtacaccgtgtttctgttgtgttctgtggtggtttgctcctcacatgtgagcattcaccctgtggccctgtgtttttccaccacacctctgcctggtggcatcctactggatgtctcagctgagccactctgttctgaagatgcccttgtcctccacccctttgctttgggctctgagcttcttctgcctttcatctctgtaggatgaagccccacccgcccttcaggatgccagccttggcaacattgtgagaccctgtttctacaaaaagtaaacgtgtagtggtgcacgcctgtagttccagctacttgggaggctgagatgggaagatcacttgagcctgggaggttgaggctgcattgagctgagatcaagccacggcactccagcctgggagacagagcgaaaccccatctcaaaaaaacaaagaaagtggatgcgcgctgctcctgccattggatcatcgcagcatttttcttttctctgatatgcgcctttttcctcatcgtgggggctcatgttttcgtacttttctctcgctactagattgtgagctgcgtgaaggaaggttcatagtcgtgttgtatgtacaggcacacaaaatttgtgcttggatagacacatatcaatccgcttccttctcctctctgagtttctttatttaaaaaaaaaattagagatggagtctcactgtcttgcccaggctggtctcaaactcctaggctcaagcgatcctcccgcctctactaatatgaattattagcctatactaatatgaattcctatactaatatgattgaaattagtttgacttgtataataattgttctcccagattgggcttctgttttgatagtagaactaaattattaggctatttcaagaaattaatatattactggtagaaaaactgaagctacaaaatggcctggtttctcacttcagttaaatttgtgcttctgagtgcttgtattgtaggtgaaaccgcactgagaaggtatttgtggcccgtatgctgattgattgatgagacttctttgcacaggagagctgctaaaaattattacggtgaacaggtatgaagaagactgttctctgcccttctttttgcaataaaatgttacaaactatcttgagattgatcccttttcgggtgtttgggttttttttaacattcacatatttcttggaattataagaaattaactttgtgcttctgaagtgggtttcccttaatataacactgatgtatttgtaaggggcatttttaaagttgtactttaaaaaataataattcttacattcgtttgaaggttttttgtttgtttgtttgtttgtttttgagatgaaggcttgccctgtcacccaggctggagtgcagtggcattgatcttggctcactgcaacctctgcatctggagttcaagcaattctcctgcctcagcctcctgagtagctgggactacaggcacctgccaccacgcccagctaattttttgtatttttaatagagatggggtttcaccgtgttagccaggatggtctcaatctcctgacctcatgatccacccacctcggcctcccaaagtgctgggattacaggcgtgagccgggggccaacatggtgaaactctatctctactaaaaatacaaaattagccgggaatggtggtgtgcgcctgtaatcccagctactcgggaggctgaggcatgagaatcacttgaacctgggaggcagaggttgcagtgagctgagatagcgccactacagtccagcctgggggacagtgagactccatctcaaaaaaaaaaaacaaaaaaagaatagaataactcttgtttaggtgttacaaaatccaggccagaccaatctaaactttaatctcatacccagttcctagatgagtcccttctccagctcaggttcggcctaagcctcagggttccttgcttggtgggcaccacctgctcccttccccgcctttgttcctctttttcctctgctggctcctccggggttgggtgtgttcagaggcagagacaggctaaaggtctttggcttttaggttctgttgatgggtgagttccagatatagctttctcttgtaggatatttcatttatttatctattaaaaatatttatttagaacacaccattcatgtgccagaccctgttccaggaactggggagagggtgataaatgagatcaacaaaaatacctgcccacattaagctcctgttctagggaagacaaaaaagaaagaaaatacacgtgtccttagtacattagaaggttccaagtactgtagagaaaaataaagtaggttggactcggtggctcatgcctgtaatcccagcactttgcgaggctgaggtgggaggattacttgagctcaggaatttgagaccagcctgggcaacatggcaaatcctgtctctaccaaaataaaaaaaaaaaaattagctggatatggtggcgtgcacctgtagtcccagccactggggaggctgaggagggagaattgcttcagcccaggaggtgaaggttgcagtaagctgagatcgtgccattgcactccagcctgagtgacagagccaaaccctgtctcaaaaacaaggaaagaaagaaaatgaaaaaaagaaagcagagatggggcaagcaggggagagggctggtgctggggtcacagcggaggggctggggatgcacgggaggggctggggatgtgagctttcctgagttcccacagttctctgcccctctcctgtctcatggcacaagggcctcctggggcttgcggtggttttgcgccaagctaatatcttgttcttcccaacagacggaggcccattgaggcttctgtgtcctccacggggaccagcattgggctaaacctgcagacaccattgcaaagggaattcaggcaaacccgctggtgaaaaatgattccagcgtggggacagaggctgacatttctcgcgtgggtgatttaatgttgggcctcaatttttcactccccccgtaagagtatgacatagccacaaccttgccagggcccgagggagggtggatggacttatccgtcccataggtgttgctcgtggctgggtgacttgcttctgccaacgagattttcacagacacggcacaagcagaagcctggaatgtgtgggcactgccaggcctgccgtctaaggctcttgattttccccatgagatgcacgtgccccagggaacggcggctctggctgtgggatgagaggcgtgtggagcagtcatggttcccatccttagcctggagtcaaggccagactagatcagcctaagcccagccacgccacgggtgcaggagtgaagagcaaatgctaactgtccatggaattgactttcaaaggggcgtgtcatgtgcctcatcccagcaacagggaaggcatttctctatcagtcagttggtaaatgattattgacaaacaatgtgctgggaaggtggagtgatttgagtagatttggcctctattctcatggagcttcctttctagaggggaaggcagatgatggatggataaatataaatgattctaataggttggtgcagcagtcattaaaagtaatggcgaaaaaaaaaacaaaagaaacggggaggagccgttgctgccgttcattaatagtaatggcaaaacccgcgatgacttgtgcgccaacctaacccagtaaccacgggtgtgcaaatgtggcaatgggcaagttccgagtgctaggagagcatctagcttcccggagtcaggagacgggggttggcaacctaaccaaggttaagtccaagtgaggggggtgggcagggagcgatatttcagtggagactccaaggatgaatggtatttagagagtaaaccccgatagggtgtttgtctggcacagagaagagcctgtgcaaaagctggtggggtgagaggacaccgtgtattcatccacctgaggggcgaccagcaggctggagctcagtgggttgagaggaggatgcagagcccgggaaaggcaccctaggcagagggcacagaagcgcaaaggcctggagtgaggcctgagcctgtgtggtttgaggaacggacagaggcctgtccgtcaggaagggaacggcaccggggagagaccttaggccacagcagagggcagggcagagggcagggccgtgctgggcactgtgggctgtggatggtgctggcatttaagaggggagaccatagaccagggcagagggcagggccgtgctgggcacttcgggctgtggatgggagctggcatttatgctcaggtgatgggaatgtgttaaaagattttaaggaggggagtaacagttgggattaatgtgtattctgggaatctcaacaaagtaaattcatagtttgaattttcataagacttctgcacaggcagagagaaataagatcatgtctacagctgtgtgatgattttattgaaaaacattactaagtttttaaacgtgatttcaaatggtgtgtttctgtttcaccttggacataagtagattgcaaggctaatggaaagtagaaaagttaattcatgaacataaaagagatatcaatttgaaaacaaaacgtttattcatttacttccgctgcagatttcttgactgctgaatttcatgagaagggattgttcagggagggacatggggctgaagacctggagaggaggtggtgctaccgctgttcaaatctgagggtggtggagatggagccttggggaggagcaggtgctgccttttaagtctatgagagtcgttgagctggaggtccagggaggagccagtgctcccactgatgtcttaggttgtggagctgaagacaatgaaggagccagtgtggctgttctgtgagactcgtggagctggagatccaggtgggagaggtgttttagctcggggaagagctgatgttctaccttgagggtcgtgcagctgcagacccggggaggagctgatgttctagattgagggtcgtgcagctgcagacccggggaggagctgatgttctagattgagggtcgtgcagctgcagacccggggaggagctgatgttctagattgagggtcgtgcagctgcagacccggggaggagctgatgttctagattgagggtcgtgcagctgcagacccggggaggagctgatgttctagattgagggtcgtgcagctgcagacccggggaggagctgatgttctagattgagggtcgtgcagctgcagacccggggaggagctgatgttctagattgagggtcgtgcagctgcagacccggggaggagctgatgttctagattgagggtcgtgcagctgcagacccggggaggagctgatgttctagattgagggtcgtgcagctgcagacccggggaggagctgatgttctagatagagggtcatgcagctgaagactcggggaggagctgatgttgtagtttgagggtcatgcagttgaggactttgggaggagctgatgttgttcgtgttgagggtctttcagctggggactcagggaggagctgataatcttgattaagggtcatggagctggagacccagacaggagctgatgttctagttagtggatcttccagctacagagtcagagaggagctgatgttctagattgagggtcatgcagctgaatactcggggaggagctgatgttgtagtttgagggtcatgcagttgaggacttcgggaggagctgatgttgttcacgttgagggtctttcagctggggactcagagaggagctgataatcttgattgagggtcatggagctggaaacctagacaggagttgatgttctagttagtggatcttccagctgcagacccagggaggagctgatgttctagtttgagggtcgtgcagctgaagacccggggaggagctgatgttctagattgagggtcgtggagctgcagacgcggagaggagctgatgttctagtttgagggtcgtgcagctggagacctggagaggagctgatgttctagtttgaggttcttgcagctgcagacctggagaggagctgatgttctagattgagggtcgtgcagctgcacacttggagaggagctgatgttctagattgagggtcttgcagctgcagacctggagaggagctgatgttctagtttgaggatcttgcagctgcagacccggagaggagctgatgttctactttgagggtcgtgcagctggagacctggagaggagctgatgttctagtttgagggtcatgcaggtgaagactcggggaggagctgatgttctagtttgaaggtcttgcagctgcagacctggagaggagctgatgttctagtttgaaggtcttgcagctgcagacctggagaggagctgatgttctagattgagggtcgtgcagctgaagactcggggaggagctgatgttctagattaagggtcatgcagctgaagactcagggaggagctgaggttctagtttgagggtcgtgcagctgaagacttgggaggagctgagattctagtttgagggtcgtgcagcagaagactcagggaggagctgatgttctagattgagggccctacagctgcagacctgaagaggtgctgatgttcgagattgagggtcgtgcagctgaatactcggagaggagctgatgttatagtttgagggccctacagctgaagacccggagagtatctgatcttcgagattgagggtcatgcagctgaagactccgggaggagctgagttgctaatttgagggtcttgcagctgctgacttggggaggagctgatgttctagtttgagggccctacagttggaaatctgtacaggagctgatgttctagtttgagggtcatgcaggtgaaaaatcggggaggagctgatattctagtttgagggccctgcagctagagatgcagacaggagctgatgttgtagtttgagggtcgtacagctgaagattcagggaggagctgctcgtgtatttttagggtcatgcagctgcagacccggagaggagctgatgttaaagattgagggtcatgcagctgaagactctgggaggagctgacgttctaatttgaggtccctacaggtggacaccgagagaggagcttatgttctagattgagggtcatgcagcagaagactcggggaagagctgaggttgtagtttgagggtcgtgcagctggagaaccagacaggagctgatgttgtagattgagcgtcgtgcagctgaagactcagggaggagctgatgttgttcgttttgagggtgtttcagctggagactcagggaggagctgacgttctagattgagggtcttgcagctgcagacctgtagaggaactgatgttctagattgagggtcacgcagctgaagacttggggagaagctgatgttctaacttgagggtcgtgcagctgaggactcggggaggagctgatgttgacagctgtgcagctggagatccggcggggagctgatgttccggtttgagggccggggagctgatgttccagtttgatggccgtgcacctggagacccagggaggaacatcaaactggaacatctgctccccgcagtgcctccagctgcatggctcccaaactggaacatcggttcccacccgggtctccagctgcacggccctcaaactgcaacatcggctatccccgagtctccagctgcacggccctcaaactggaacatcagcttctccccaagtctttcagctgaatggccctcaaactggaacttcagctccccaccgggtatccagctgcatggccctcaaactggaagttcagctccccaccgggtctccagctgcacggccctcagactggaacatcagctccccactgggtctccagctgcacggccctcagactggaacatcagctccccaccgggtctccagcttcacggccctcaaactggaacttcagctccccaacgggtctccagcttcacggccctcaaactggaacttcagctccccaccgggtatccagctgcatggccctcaaaccggaagttcggctcccccgcgggtctccagctgcacggccctcagactggaacatcagctccccgccgggtctccagctgcacggccctcaaactggaatagtttgaactcagcggggagctgatgttccagtttgagggctgtgcagctggagacccggcagggagctgatgttccggttgtagggctgtgcagccggagacccagggggaagctgatgttccagttgtagggccgtgctactggagacccaggggtggagctgatgttccagtttgagggccatgcagttgatgacccggcggggagctgatgttcaagtttgaggtctgtgcagctggagacccgcgggggagctgatgttccagtttgatggccatgcagctggaggctctgatgggagctgatgttgcaatttgagggccatgcagctggagacctggcggggaggtgatgttccagtttgagggccatgcagctggtgacctggcagggagctgatgttccagtttgaggaccgtgctcctggagacctagcggggagctgatgttccagtttaaggccatgcagctgtatgcccggggggaactgatgttgcagtttgagggccgtgcatcgggagacccggtggggagccagtgttgcaggttgagggccgtgcagctggagaccctgtggggagctgatgttcttgtttgagagccgtgcagctggagaccctgtggggagctgatgttcctgtttgagagctgtgcagctggagatctggtggggagctgatgttccagtatgagggccgtgcggctggagacctggtggggagctgatgttccagtttgagggccgtgcacctggagacccggcagggagctgatgttccagtttgagggctgtgcagctggataccgggggtggagctgatgttccagtttgagggccatgcatctggagacccagttggtagccagtgttgcaggttgagggctgtggagttggagacccgggttggggggagctgatgttccaggttgagggccatgctgctggagacccagcggggagctgatgttgcagtttgaggcggtgcagctggacatgcaggggggaagtgatgttgcaatttgagggctgtgcagctggagaccctgtggggagctgatgttcctgtttgagggtctcggagctgatgttccagtttaaggccatgcagctggagacccggtggggagctgatgttccagtttgagggccatgcatctggagacccggtggggagctgatgttgcaggttgagggccattcatctggagacccagtggggagctgatgttgcaggttgagggctgtgcacctggagccccggggtggagctgatattccagtttgagggccgtgcagctggcaatctggtggggagctgatgttccagtttgagggccatgcagctggagaccgggcagggagctcatgttccagtttgcaggcagtgcagctggagacccggcggggagctgatgttccagtttgaggtccgtgcagctggagatctggtggggagctgatgttccagtttgagggccctgcagctggagacccgtggggatctgatgttccagtttgagggtggtgctgctggcgacccaggcgggagctgatgttctagttttagggccctacagctggagacccggggaggagctgacattccctttcgagggctgtgcaggtggagacctggggaggaactgatgttgttctaatttgagtgtggtgcagctggagatccagggatgagatggccctgcggttcaaatatgagggtcccggagctggactctacgtgaggaaccaatgctgcctctgatgtcttaggttgtggagctggaaactcgcggaggagctggtattggtgtttctagttgagggtcgtggtatttccagggtttcacagaggccagattttatttcagttactcagaagagaaagaaaatgtcttctgaaagaggtgaactcagtcattaccaatagaaaaagtatccactgtatttatctcttatacaaacagaaaaatataacattttcccccttagaatatatatatatatatatatatatatatatatatatatatatatatatatataaaacttaaggttctattgtatgtatccgaacaataaaatctggaaaccagcatgaaactctattattcacatgttaaaatgttgaaactatgaccaaaatatgaaaactgctggagctatcagaaagacacaagacaaaaagcttcttgcatatgtataaactaaatgtgataatctcaaaaaactgttcaaaattataattactttccagtttaaaaactttaatcctaaattaaaaaaaaaaatctatacacaaaccactgatttgcccagaccaaagaaagaaagaaagaaagaaaagaaagaaagaaagaaagaaagaaagaaagaaagaaagaaagaaagaaagaaagaaagaaagaaagaaaaagaaatcagcggtaaggtaagcaggacccagaggagctgatattcacagttcttacatggacaactctttcaggaattatccataaagtactttattttacaacctgcttttcttataaaactaaaggtgcacttttttacataaaagttttatacagtgttaaaaccagaactgtgtgtaaaatactgcatgtaaatgtttctaaatagtcttgttccagtggttcatcggtgacttctgtggcttcgtcatcattatccatggatgattctgaaagaatctctccagttttactggaattggatcctactaattcttctgtttcacggcagtcagaagaaccactactttcagggccttcgttttcactaccttcagaatgtagtaaatctttctcagcttgagacacatcagattcctccatttcattattttcctcagaagtctcttcattcacagttgaggcatcatcagattctttttcttggttttttctttctgggaccatttctcttgatgtcataaaagactctaaaaataagcaaatgttgttgtacttaaattttatattcaaaatacctccacagttaagtttcgtgaattctgatgttctgtagttcaaatcacatcccctgaaattcagcagcaactgcatacaggtgggagaaaagcccagcgtcgacattacaaggagttccatgatgtacaattctttcacaaaaacaatgaatgcaagaatttgaggatctccttactcctcccttttacagatggtctctcaatcccttcttcttcctcttcatcttcatcttcttctgaacgcgctgccgggtaccatggctttttttgtctttatcatgagatgaaggtgatgcttctgtttcttctaccataactgaagaaatttcgctgcaagtcgcttgactggctatttctccgacttcgccttttttgtcaaacctgagtctttttacctcatgcccctcagcttccacagcatcttcatctggatgtttatttctcaaagggctcactgaggaaacttctgattcagatgtcgaagagtcactgagttttctcttcattttgctgcaaatttgcctctttgctgtctgtgctctcaggccacccatttgttgtcatgggggctgacagagaaacctttggtcgattacgtggcctgggtgtcccaggcccatttatattagacctctcagtatagcttggtgcatttccaggaaacatcacaccattcattcgatttaaactattggaattgtttttctctgaagaaggataaacacagctaacaaccatcacgttcttttctactcctctgagaaatttgtctgttcctgtatagtttctcctcggatctgttaacaattcacataatcgctgaatagtaaaagggatacggttaaatccagtgacagtttttcagtattcttccctttgtttcatcacagggaatatattcgacattagggttgggaggacctcttggcgcaggagctgaagttctgaaatcatccatcactttctccagtttgaaaataaaatagcctttaaattgggaccacggaatctgtttctccagtcttggctacatgacaaaaggaactgatccaggacaggacagactttcttttttgcctcttctcaaaatcttccagcgcctcctggagcctgtcgacgtccatggcttcccggagtccctcacagcctccgcctccctccgcgggtctcttggggaccggaacgcctccccccaccccccgacgtcctcccactccctcgcacaccctccagcacgcaggccaagtggggtgggggggaacgaagggagccggggaagcgtgtgagagagtgagaccgacagagtgagcacctccccaagccgctaccaccagccctccaacatggcgcctggcacatcaccctaaaaagtcatttcttggagaagcgatggatgacagagattaatctgagagttactattaatggagaaacttagaacttaccatttttcctgtgaggtttcggtgctgatacttctattctgtgagttctggcaattgtgtccgttcacccagcctggtgatgcagcaggtgtcacagaaggaccctgtcccagctggtcctgctccactgctaggatggtgtggcctctgatctgtgaccgtgtcttgaggggagaccaggcccttgatcacaagcgtatccatggtgaggttccgtggatggaagctcatggatgttccttcctgatgttcatctgccaccatgctattgaatgcatcttgtttataactgtcttctaaatattgaatagaaataaagcgtttttacagtatgggtaaggtataaagaatattgacacattggacacagaggacctccaccaagtttagggagtagaatctgaagagacatagctttggatgctccctggaggccctgcctgagtcccagtcccttcccttctcctacggagggaatcacttcctgctttagtctttattatttgcacactttccttcatagtatgtttctttcaccgtgtgtgtacatccctaaaagatatgccatttagtttttgaactttctgttttctttttgaggcagggtcttgctctgttgcctcggctgtagttttgaactttgacgtgagggaattctcctgcgtggctgctcctgcactgcatggctctgagcacctgctctgtgtctatttttgtcctccattctctccctgagacccacccacactgacatggctcattttcattgctgcatggtctcccgtcgtctgaggggagcatgggaaatgtcttcatcttcccgtggatgagtgtttggccaggttggggcccttaggactgtgttttgttgggaacgttcttgggcatttcttttgtacacaagcgcaagtttcttctggtcagtagctttcaaattttaaaatttcatcccaggtaaaaatgtaattttcctcataacccacaacacacacactttcatatacaagcatagcagaaatatacttcacaagcgttagcagtgcctggtgttcctgcttctctccattctccccaacgctggcatggattgggttgtgggatttttgcccgtctggtggttgtcacgtgatatctccccctgttaggctgagcccctcttcatgttttcattagccattcctccacatttcctcttctgtggagggccggttcagctcttttgcccagtttctgttaagttgtttgaatttttgcacttttcctttattattcctattactatgtttttgagacaatatcactctgccacccaggctggagtgcagtggcgcgatctcagctcactgcaacctccatcttctgggttcaaatgattctcctgcctcagcctcccaagtggctgggattacaggcacgcaccaccacgcccaactaatttttatatgtttactacagatggggtttcaccatgttgtccaggctggtctgaaactcctgacctcaggtgattctcccacctcagcctcccaaagtgctgggattatgtgggtggcaagccacccaggcaccgaggcaagagacagaggacacgagctgttccagtataataaaatataaaacaagaatagttataccagatatagatcttagatatgattatatatgaatatcattaatcattagtttgtagcaattactttttattccaatattatgataatccttgctctataatcgtagcctaggaaaaaccaggccatacagagataggagctgaggggacatagtgaggtgtgaccagaagacaagagtgcgagccttctgttatgcccggaccgggccaccagagggctccttggtctagcggtgatgccagcgtctgggaagatgcctgttaccaggcggatagcaaaaggtgtcaaggaacaacacccgatacttagcagaccgggaaagggcggggaggggggggggtctccctttccccgggggagtttagagaagactctgctcctccacctcttgtggagggcctgacatcagtcaggctcgcctgcagttatccggaggcctaaccgtctccctgtgatgctgtgcttcagtggtcacgctcctagtccgccttcatgtttcatcctgtacacctggctctgccttctagatagcagtagtaaattagtaaaaatactaatagtccctgatatgcggaaataatggcataagctgtctttctctctgtctcctctccctctctgcctcggctgccaggcagggaagggccccctgtccagtggacacgtgacccacgtgaccttacctatcattgcaggtgactcacattctttaccctgccccttctgccttgtatccaataaataacagcgcagccagacattcggggcactaccgttctccgcgcattggtggtagtggccccccgggcccagctgccctttctcttatctctttgtcttgtgtctttatttctacactctctcgtcgccgcacacagggagagacccaccgaccctgtggggctggtccctgcagggttataggcatgagccaccatgcccggcctgcttttttctttttcaaaaggactctttctagattatacctattcattccggtgactatatgtggggcaaagatgggtttgaatccaccaggataaacgtgccggatctcctctctgatggaagaagagacagggatagaagggtgcagagaatcagagccaagaggaggccgagtcaggcgggggttgcaggctgctgtgaggacttggctgcttctctgagtctggtgggattagcaggggatttaaacagaggaaccgtgggatctcccttatgcatttctgccatggttggctcagctgaacacacctcttgagcaagacttggtcttggacacccagaggcccttggttgagggtttacctcctggcgtggccactgacacatccacgtttgtctcccacacggctgggcggccccgagacctgctgtgcgtgcccttctcattggtggcatttctcaagtttgtcccctctcaagtctgccccatccggaaaaccaaacacctctctctcctacatggaaacccccgtcagcacctcctcctgactcacagggcatcccgtcaacatcacagtcccaaccttcccacatggagaagctcatgggacccccgatggaccaggacagtgccagcactaagacgtgccctgaaactcacaggaagagcggaccaagaagccgggaacagcacggggcactgggagctgcaaacgcccacgatactgtgagagacggagaaaggtatgacaggaggagcagaccaagaagacgggaacagcacggcgcactgggagctgcaaatgcccacgataccgtgagagatggagaaaggtatggccatggcggtcacaaaatgttcctcaacatttattaaaggcctaaatggagaacataacgctatcaaacccttagctaaaaacacaggggaaaattcgtatggcctggggttaggcgaaaagttcttagacatgacaccaaaagcatgattcataagattgacaaattaaatttagtcataaatttaaaattataattctataaagcaatataaaaatccaaagagaatgaaacatgaactatggtctagaaataaacatttgtgaatcacacgtctcacaacctactggcacgcaggatatatgaagaaccatcaaaacttaaccataagaaagtaaaaaccccagtattaaagagagggccaatattggaacggaggcctcatcaaagaaggtataaggagggcatattgcccgagaaagaggctcaacatcatagagatgctggagaaatgccagtcagcagtacctctgcaaatccattaaaatggctaaaaacagacaaaacccatgggccaacccaggttctagtgatgatgcagaggaactgggaccctcataagctgcagtgggaatgggaggggtcccgccatgctggaaagtggtcctggagtttcttacgaagttaagcacatccttaccatgtcatccagcaaccccactgctgaaatgtcccccaagggaaaacttaaacgtgcacacacaaacctgcacacaagtgtttaggcctcattcctcattgccaataactggaagaaaacaaaatgtccgtcggcaggagcaggagaaggcgtgaactaacgcggatgcttccacacagggggcaccaaccagcagtggaaagatgcacccaaatgccccaggtctcccaggctacatgcccgttgaaggaagctagtttcggtgggcacaggccaaaggatgccaacacatgacatcttggagaagacagtgtaccgtgtcggggagcagggcagtggtttcgaggggctacgggtggaggggcgaatggaggagctctctggggcgatggcgtgagcacctgcacctcactgtgggctgctgcggctgaggggctggtacggcaaacactggcttcagtacatgcagactgaaggaggaaggctcccacaactcagagacagagggtgtcgcctccatgaaacaaaaacatattttaaaaaaaaacctcttaaaattaagaaaaaaaccacaaaaagtatttcataagcgcattgactttgagttgacacaatctacctgggagcatggaactgaaaccacaggcttggcaatcccggagggagagggtggagggtttagacctcaattgaagggctcagtacctggctataggaaataacatttaaaaagcagcagggtggaaataatttctgctgatgaggttgcatctctccagatagccggcagagtaaattaaagcaatatagtcttgctctgttgcccaggctggagtgaagtggcgccatctccgctcactgtaagctccgcgggagaatctcttgaaccctggaggcagaggttgcggtgagccgagatcccgccattccactccagcctgggcaacaagagcgaaactccgtctcaaaccaaacaaaattaggtaactaacccaggactaaaacagcgtaactttaaaaaaataagtctaggaggtatgatgttcattccctgcaagccaataaaggtcacgtctggggcatacatctaaaaaaataatcctaaagagaaagttatggtcacaaatatgttctgtatggtgttattaagagcaaaaatgggaaacaacccaaatatcagtaaaatgggactgaacccttgcaaatttactaaaataaaattgttaaacatgatgcacaagacgaagattttaataaagtgaaaagacaggaaacatacttactaatgattattggtttatttttcatgccacttcattccacaaaaagatttcagatatcttagaaaaagacacactagaaatattaaaatactatctgaaccagaagcagaatcagggtaagctagcagaaaggcgtatgagccaaagggatctacccagctttcaaagctgaccacggccgtgcgcagtggctctgtctgtaatctccgcacttggggaggccgaggaggtaggatcgcttgaggccacaagttcgagaccagcctgggcaacagagcaagatcccgcctctaccaaaaatttaaaaatcagccggaagccagacactagggacatggctgaggatcgctcccgcccctcggaggccagaaaccgagggtcactcccgctctctagaggccggaggccccgggccgctcccgcccacctccgcggacgagcgccgccccttcgaccccattccctgaggtctggacgttcaggccctctcggtctgggagatcccggagaaccacccacggggctttaaaaaatgttggtgcccaacatctccccgaaatagggcccgccctatctcggtcggggagcgcgggacctccgtggccacccagcgccaccgtccgcgggtccgctttgcgcaggcgcggcgtccccgcccattagacccctgcccgggcgtgtcgtggtgcgcaggcgcgatgtcccccactagcgccccgccttgacccggccgtggtgcgcaggcgcagtctgcgcagggactggcgggactgcgcggcggcgactacagacgtgtcgggggtccggggcctgtcgcggttgccaagcgctcggcgcttggcgctggcgctggccaaggcggtgagtccctgccgcggaccggggcagggcaggcggggggcgaggcggcggtaggagcgggacggtccccagcgggtccgagcggagcgggcgccgggtgcccgcgccccctgcccggggatcgggaaggggctgggagagccctgggccggtgcgagggggagccgcggagtgtactcgggggcctggggagctcggtccttagcaggtaggccgcgtcccggtgaaggtcgcgaccccgcgggcttgctgggcgtcccctccgccgctttggtccgggcctggggtccggcgacctcgcgggctgaggtagcccctcgcctctgcctggcgggtggactcggggaggagtcgtgtctgcccaaggtcaccggggtggagtcctggctgggccgggcctctgccgccctctgtgagggttgtcctgcggggccgcccgcagcccgtgggtggggccggcggggcgggtgaaaccgcctgggtgggtgcgaggagtggccgggctcggccgggtgggtgtccggtgggaagcgcggcgcgcccgagcttgggcttgcagttcccctttccagagagcgcaaatctgtgcatgtccacttcgggatcttggaagttaaggacctgtactttgggtcccgtttggtggcccttgtgccacaaaaatgtgccggtgtttaaaagcagctgtgccagtttttaaaaatcagacggagagctcagggcactgaccgagcgaggactccaggacctgtgcttgcctgtgcgctgagtacctcgagggccgggctcggcttagtccaggatgatggtcagggttatacttccctgagcccttgctctctgagtgtctgaatgtgccctctacgattgcatcttcagaatcggccttctaggatttcatttaatcaagcgaaattggataggtttagttgtttggttcttttaaatgaacttagccacccacctcttaattacaaagtaattttaaattgcagagtaaaaatctcaatagaggaaccaaggcattcagcaatattgatttgaattatgcctgtgattgtgcaattttctcctttttgaaatagttattgaaaatctctttgaattaaatgtgaggattagtcatacagccatcctgtcaacatcggaaagcgtgtaaaccgttctagcgtgttgctgtggttggtgctgactgagcagagacccccgccgcatcttgggctcttaggagctgctgggagggcgtccacaagcaggaggtgaagcccatggtcagtgggactttttaggggcaatggtagcttgtggttggagagaagctagatagagccagtgcctttgtccccaacccagatggtgcccagtgttccttctgcagactaaggccccaggcacctcagaccagatggcaagatagcaaaatggaaccaaaatttagtcttgggttttgtaaaagtctttttatcttgatgaaggtagcttttcctacagaaagtcgtgcgtttttgggttcttcgttggctgcttttgtgattgtgtaggctgtacatgcagattcgtttcttgctcatgatttataggtgcattttattcgatgaggaccccttactttgctagatttcggatatgaatgtctctgcacttgttacttttccccctccacctcctgattcagtcatctgaaattctgtattgttaagcaaggtctaagtattccttttagttatatgttccccatgttttttcttagaggaaatgtttgatagtttctcctaaaaaattaataattggcacaaaagactagttttgtgtcaaaagtagttttgagttttatctaaagactgacattggcttgaagttgggctttccagattcaaaaatctgccccagatgagatttagatgcagagggttagtgtccttttccccagggggatggcgtgatgatttgttcaagattgtgttatagtagctgccccttttaaggcagctgtgtgtgtgtgtggtggggagtgggcagtgtgtattccacatcaacatcctagaaagaacgaataaacatttagtgatctcactgtttctacttacatttggtataatgtactgtttttattggtgctattacctatgttaatagggcactttacaaaattttcaagaacgtttttattaaaattatttcaaagacttctttcttaaaatatgattttaccatgtaaaaaattatactaaggtagaagaatattcgttctttctcattttctgaaaaaagaaaaaactaaattagcttatgtcaataaaaacagactagaaattggagaaatgaagaataattttttatcccacataataagtaatttgtgaattgcaagtatttctaaatacttgaagacatccctcacatcccctcttctgattgctgagtgcataatttcctaaagcttttttttttcttttgtttttttggagacattgtctcgctctgtcgcccaggccggagtacagtggcacagtctcggctcactgcaacctctgcctcctgggttcaagcgattctcctgcctcagcttcccaagtagctgggattacaggtgcccgccaccacgaccagctaatttttagtagagagggggttttgccatgttggccagactggtctcgaactcctgacttcaggtgatctgcccaccttggcctcccaaaatgctgggattacaggcatgagccaccacgcccagcccctaaaactattcttgatgatatttctgagactattcagtggtcttctaaaatgccgccagcagaatggaaaacgtatcccctaaatggctggccaaccttagcatatgggacagtgtgacctctctcacacagagccactaaaaactaaacactaaaaccagttttcttgagtaaaggtttctaagatggaaaatttaagcagtgagatatgtcaagttgtagacgttggccaggaaaaagccagcatcaaccaggcaggggagagtgtgcatccgacatcctcctgtgtgatgaagggatgacacctcttccctctgggctgtcagcctttactgttccaggatacagatctcctgattcaggtgtccagtgccttttgaactgaccgcaagccctcctggacgattggaactgtaatgtggaaagggctctgatggagccggttaaaatgcttcattatttgcaaaataccacatacagtaatacgatctggatgtctttcccctcctccactaagtagcataagtgaagacttcccagaggaagtgcgtctttttcatctcgtatctgagtcagtgagtatcctttttggaaacaagcttcatcctggttttctagagtgccaagtcagggtggaaaggaggacctgggggctcagtccttccttgccccttgggctgcccttcagggttaaatagagggtcccagctgagctctctggatgcacaggagcacctgggtacataagaaggtgaacagttttcaaggggaagtttgaattactatcccccacagcatttgttccttcaggacactaaccctctggatctgtgtcttctgtgtctccagtggccaacagtgttgcaaacaggaacccgaggtgttcacttcactgttgaaggaacgagagggcatctgctaaagtttcagattccgtaagttcatgctttttgttccattataaatgatttttttggcttgggggtaaggatctataccagtttgttttcatatgagtcatagacataagggaaaaatttctcataggtatccaatgcatgctgaaattattttcagtgtaataatacttaattgcaagtaccaatataaacatagatgttaacatttttacttgtatctgttatgtatctataaattagatttaaatttaggtcaagtaaagcaataaattaaaatgaacagtatctgctgtgatagatgataaaatcctactgaaaagaggaccgtggggcccttccggtgtgggttccttggtattgagtgtgcctgttctctctctgttggaaaactgaaacgtgctgagaagttcttttctcataagctcacaatagcgactgaatgctccttggtaccttctcaggcataagcataggcacggccctgaagtagagttgtggtcctcagtctgatcccatggaatagaccctctaccattcatagaatctgattatcagtcccttctccaggtgcgaatgtgcctacttctccctgcactgttcagggctcagccccaggacaggatggaggccctgtgtgcccagcagttgctccttttatctttgtcaagctctttcactggcacaagagtcttcatgtttggcatagtggaacctgtgcttgacaggtgaatttttcttttccagatttctgctcagtatccagtagtggatcatgaatttgatgcagtggtggtaggcgctggaggggcaggctttgcgagctgcatttggcctttccgaggcagagtttgatacagcatgtgttaccaagctgtttcctaccaggtcacacactgttgcagcgcaggtaagagaaaggtgccccactgtgctcccactccgtgcaggtcccgcgcagcctcgcactttctacctgggcagcctcctgcctcctccctgtgctccagccacttggcctcttgctgtgccttactcagctcacccattcaggggtctctccctggagcctcttccctggggactttgaagggcgggagccttgttgtcactcttaattcagactccagtcacacttgggttttctctgaccatctaccctccccacccacccctgccaccccaacaccttaagaaaaggagatcatctaaagaggaggattcagaatttaggttggggaagaaaagggcaagggtttcatttgtccctggtgctgctgtcttctgggactctctgaggggtaagacggtggtgggcacacacagccaaaggaagtaggggtacaggggagtgcgactctgagtatggagtttattacttggcaggaagcacttctaatctttaacacatgcccgtaaatgccgttgggaagatttgttaataaaattatgcggagagattcatggagtaccttttctgtgccagatacgttaggtaataagcatattacaggtagcctttcactcactgctccagtcagcccttcctggagttccctctgtctccaccacacagatgaggagactgaggctaagggatggaatcactgggtgagtctgggaggggttgtgatctggaatctgtcaggcctggctgctcctctgctgaggtcagccctcactgggagtcaccatgtgagtagctggctttctctgaatcccccagcgggtggatttgggcctggaagacaaagctggggctcctgtttgtggcttgtaaggagtggttggtgtttccaggttggaatcaatgctgctctggggaacatggaggaggacaactggaggtggcatttctatgacaccgtgaagggctccgactggctgggggaccaggatgccatccactacgtgacggagcaggcccccactgccatggtcgaggtgatgggcgggaggctctgggtgctctggtggtctgtttccagtacaagagtcctggaaaaaatgtaagcagttgaggcagatgtggcagccgaaagaatggtgattagcaaagctcacaagagaagtctttgtccatcatgaactatgtattacatgtaataagaaaaacttctctttgatgaagtgttgacattttcataaaataggttaatttgggtttgcagatttgtattaaagttgtttagtgtagattagctgtgaatatcttgactcctttagggtaataaggcttttgtttgtttttatctttcacaggtagaaaattatggcatgccgtttagcagaactgaagatgggaagatttatcagcgtgcatttggcggacacagcctcaagtttggaaagggcaggcaggcccatcggtgctgctgtgtggctgatcggaccggccactcaatattgcacaccttatatgggagggtaaggctgccccccgtccacctgagacaggacacatagtgctggggcttgtggtgacagcggggaatgggttagcgtgcccagtgagtcagccagagattgcgtaaaaagcaacagagaacagccgtgtggggcacatgcagcgactgtggatgtgacaggagcaggcgtgtgccttgagaagctgcccctaaggcaatgtgtgagttgttgcctctatgttgggaagttgaattgataatcttatataccaggttttcacttgggatatgtgacactcagcatgtaagaacagagcaagcaggccaggcacagtggcccacgtctgtaatcccagcactttaggaggccaaggcaggaggatcacttgagaccagaagtttgagaccagtctggagaacatagtgagaccctgtctctacagaaagtttaaaaagtagctgagcatggtggtacatgcttgtaatcccagttactcaggaggctgaggcaggaggatcacttgagacagtgagccatgttcataccactgcactccagcctgagcaacaggagacctgtctcaaaaaaagacaaagaacaagtattttaaggctcttttaccacctctgagttcctgaatggattggtttggtttgtttgttttgttttgctttgtttttgagacggagtctcactctcacccaggctggagtgcagtggcgcgatctctgctcactgcaacctctgcctcccgggttcaagcgattctcctgcctcagcctccagagtagctgggactacaggtgcacgccgccacgccttgctgatgttttgtattttagtagagacagggtttcccatgttgcccaggctgctcccgaactcctgagctcaggcagtccacctgcctcggcctcccaaagtgctgggattacaggtgtgagccaccacacccggccatggattgttttcatattaactgttatcactggacaaagacttgaggtgacaatagttactgggtaatcagggtcaactttggcatgaccaaacaatatcctgaacagtattgattcagagtaatccatgttctgagctttgttgttttctgatgcatggggacggatcagtaatgtgcaggttgttagaacaccagtgacttctctgtggctgagtgcatcgacaagtgtgtggtgggaggagacggcggctccttccggagcaggagctgtcatgtggggagctggcccaggctcacgagagcgacttgcgctggctgagggaacggcaggtccaggcgggcagcgctgtccggcgcctacctttctgcggtgccggaatctgctcgtctgcaaccgtccgctttggtagctgccagccacatggggctgttgctaatgtggcaggtgtagctgaagagctgaacgttttgacttattttaattaattaagtggttatgtgttgccagtagctcccatctgggctgtgaccccatggtctgcggatctcactctggcaccagactccgagtggagctgcatgcggccaccggacagtgtggagtgcctcttcgggttgtgtagaagtaggaaatgtgtcaccaacataggagctgttgctgctgcgttctctagcacacctgccttgttggtactgctgggcgtggaatgcctctcgggctctgacagtgtcattgacactgttgctgatctccttggatttacctggtccatttggatcaagttctttcacctattcacatgagcagatatcaccttaaaaccttaaaggttggcttaacacttcttgccctttttttttctttcttttagtctctgcgatatgataccagctgttttgtggagtattttgccttggatctcctgatggagaatggggagtgccgtggtgtcttcgcactgtgcatacaggacgggtccatccatcgcataagagcaaagaatactattgttgccacagggtaggaatctaatttctactttatttcctttgtaaaaatgaataaatttcatttagagtctctttattttaaggaaaatagaggcattgtagaatagcagttcagacacaggccttgatataaccacgtgagggtgatggcctttcccagccatggttcctcacctgtaaagggtgaggacagcagcacctgcctcggggtgagaaagcatggccctcattagtcggtagtggctgccgtcaggttcacagcgtacctctcccgattttagatgaggaaactgtggcccgaagagtcacatggggttttctggcaaaatccctcttgttttagtgggttctatgtttatactgattcctgggatagataagtctgtcttctccacataatgaaaataaaaaactttaattttatacagtggcagttactttagccactttaaaagttaagaagtgtcagtacagccaagaaaaaaaatcagcaaaactacagggtgggaaaaaatattttccaaaccatatatctaatgatatcttagtatctaaaatagcaaaaaaaaataaaaaataaaaaaaagccctactaaaaccaacctactaaaccctactaaaaaacaaccctactaaaaatgggcaaaggacttgaatagatatttttccagagaagacatacaaatggccagttgatgtatgaaaaaatgctcaacatcaccaagcaccagagaaatgcaaattaaaaccccaatgagtatcatctcatctcgctccagttagaatggctgttaccaagaggacaaaagatagtgagtgttgatgaggatgtggagaaaagggaaccctgtgtgctgttggtgggaatgtaaattagtacaactattgtggaaaactctggaggttcctcaaaagtcacaggactaccatgtgctccagcaacctcatttctgggtgtatatccaaagggcatgaaatcagaagctcaaagagacacctggacccccatgttcattgcagcgttattcacaatacccgagatatggaaacaacctaaaaatttttggtgtttaatgacaatgtggtgtgtgtacacaactgaatattattcagctatgaaaacgaaggaaatcctgtcatgtgtgacaacgtggatgaacccaaagtcattatgttaagtgaaacgacccaggcacagaaagacagatactgcatgtcactcatatgtggatctaaaactgtcacaactcacagaaacagaataggacagtggttgccaggggctgggggaatgcagactgtggcgatgctgattaaaggtgtaacttcccgtcacaaggtgaagttctgaaggtctgataaacagcatggtggctagagttaatgttatagagcatggtggccagagttaacattatacagcatggtggctacagttaaaatcatacagtacggtggctatcattaatataacttgaaatttgcgaagagagtagaccttaggtgtctgtatctccaaaaaaaaggataattgtatgaggtgatagatgtgtattaagttgattgtgtcatcagttcacaaaataaatcatcacgctgtacaccttaaatatatacagtattgttttttgtttaattcatcaatcatacctcagtaaatctgggggaaaaaaacaaaatccataaaaattttaaaattttcattataaaagtagtatatgcttactggggaaaccttttgaacagcacaaatctaaaatacaaatagggccagacgcatagtggctcatgcctgtaatcccagcactttgggaggccgaagtgggtggatcacctgaggtcaggagttcaagaccagcgtggccaacgtggcgaaacccagtctctactaaaaatacaaaaatcaattggatgtggtggtgcacacctgtattcccaggtacttgggaggctgaggcagaagaatcacttgaacttgggagccagaggttgccgtgagccgagattgtgccaccgtactccagcctgggcgacaagagttagaccctatctcaaaataaataaataaataaataaaatataaatggaagtctcttctctgatcccaggcttctatcctacctgcgcagggtagcagcaccactggcgtggcccccagtgatgtgtgtggggtgtgcgtgagtagggggttgtgtgcacacagcactgagaagatggtgcccgggggctgccctgtccgttctgtgatctcattagacaggaggtccggacgtgggccactgtgtgcagtcactgctctctgttgtttccataggctacgggcgcacctacttgagctgcacgtctgcccacaccagcaccagcgacggcacggccatgatcaccagggcaggccttccttgccaggacctcgagtttgttcagttccaccccacaggtagggcaggacgccttgcccggaaggcgttcggctcgtgtgtcttgtaagcgtgtggtgcctactcattgctcttccatagttttatgtaataacatggttttgaagatcagcttccatagctctcaggtcctaacttcaatgtcatttccttaaggagacttttcccacactccccttcccctaaggcagtttgggccaccatcttatgcatttctcaagagccctaaaccctgccttggtgatacttatgccagcagtaaagcagggattgaggccgggcatggtggctcacacctgtaatcccagcactttgggaggccaaggcaggtggatcacctgaggtcaggagttcaagaccagcctgcacaacatggtgaaacctcatctctactaaacataaaaaaatcagctgggcatggtggcatgcacctgtgatcccagctacttgggaggctgaggcgggaggaatgcttgaacctgggaggcagaggttgcagtgagccgagatcgcaccactgcgctccagcctgggcaacagagtaagacttcgtctcaaaaaaaaaaaaaaaaaaagtaaagcaggaattgttcagtgtccctctttgcagtgaggttgtcagcaactcgggcaggcaggtcttctcattaactggggtgctccacgcccagcacatggtagggtctccatcggggtttactgagtgagcattctgagagctgggtgaatgccgtggaaccaagaagcagcacaggcagatttcagctttgtaggacaacacagagcttccgtgacaatgggatgtaaagttaagacacagccatgagagaaccccatgtgacgttgggcgctgggctcagcccacgtgaccactgagggagcttgtcgtggggaagatgagctcgtcttggggacgtctgacggttgaggttacgaatgtgcaatttggagacattaactcagaaatgacagttgaagtcttgagtttggaggaggttcttcaaaatgagtcagagacagacacacacacgtctgcctcttgtttgaggtgactcgtcctggacttttctgggttgcttttctgacctgtggacgatggagacccctgaagtggtgccaaagaaccagacctgtgtcttctctttctctgtcagtgtcagctttctgatccctggaagggatgaaaataagaaatggatttgttgtaggttttttttttaatttgtttagagatggggtcttgctctgttgcccaggctggagtgcagtggagcaatcttgactcactgcagcctttgtctcccaggctcaaacgatccttgcacctcagcctcccaaatagctgggactacaggcatgtgttaccatgcccagctaatttttgagggtttttttgtttttggtagagacagggtgtcaccattttaagcccaggctggtctcaaacgccagggcttaggcgatcctcctgcctcggcccctcagggtgctggcattatagccatgagccactgcacccggcctgttgtattttttattactgtttttaatcagcaaaatgtcagtgagcccctgaattccctctgtaatttgcttagagctccacttctcatgctttgtcttcaatatgtgagaagtaaccacagaaaaaagagcatggaaacttagaaaatcaaaaggcaggtgagatgcaagaatcacattcttgtcttgaaagcaagattgccctttttgtatactaataaaaattgtagcttttgaaatacatttagtttagggtttttgatctcctttgttaaaattcgagagcttggcacgccctgtttctcatcgcactgaggagtcacagagccgctgtttggggcacagaccgccggactgcccaggtttgggtttgagctctgtcctcagctgcatgactggatgttaccaagcgttaatttgcttgtcactgagaaagggggtcatactacccagagttgttgtaagacttaaatgagtttaatatgtggaaagcagctagaactgcccatagcaagtgcagtgtaaagatgaactaaaataatcattattactgttcttgccactgtttgggtaacttagatatgaattctccaagctagtattcttaactagtcaccacagtatcatagtgcaaaagaatgttcaaaaattaaaacaaaatttgaggcatccaacgtacaccgggctgtaatcagagtattggccagaggtctgtgggccggcctttctcctctctggggacgccactctgccccagcctctgctgcagctgtcagccttgtcagtgctttttgttatccagactttctactgtatcttaactgttctttctgttcagttttgcatataatgccttctgcatatcttttttgtctctcccccaaaaaatatcttgtaaaaaaaagtaatgcatttgaaatagagacctagcaattgttaggttataaatgtgtggttttttgcaggcacatatggtgctggttgtctcattacggaaggatgtcgtggagagggaggcattctcattaacagtcaaggcgaaaggtttatggagcgatacgcccccatcgcgaaggacctggcgtctagagatgtggtgtctcggtggatgactctggagatccgcgaaggaaggtgcgtgtggtttaccaccagcactgtctgagcgggcacacgggccggggttgcttctgtgagtttcagcaccgctcgccctcaccttcgtgtgcaggcacatgtgcacagccacctctctcagctgccggcaggcgtctgttagtctgcgatattttcctaaagacctacattttgaaaattttagccagtttctttctcaaatctgtggaacagagtttctcttagtgtgtgtgagtatgtgacggagtatgggagagagagacacgcacccaacctgaagtcggcgtgtgagccttgggtgtggtgtctgatacccacagatgtttttcggcagctttcaaagtgtgtgggtcatttgcctttcagaagaacagtttgcagctctttcattgcctgaccctgttctttaatgtgataacacttgctaaatatctgctggtatctggtgtggcctttagaggttttacatttttatattaaaaaaaaaagaagtcggatggtttcttgtaatatggtggccctccgtatccatcggttccacatgtgtggtttcaaccaactatgtactgaaaataaaattgcatccttacaaacacgcagacttttttttttccttgtcattgttcgctaagcaacacagtgtagcagctatttacctagcatttacattgtattaggtactatgagtaatcctggagttgctgtacaacttaaatgtaaaacttgaaatgaggatgatttaaaatatggaggaggatgtgcataggttatatgcaaatactctgccattttatattagggacttgagcatccacggattttggtgtccgtgggggtcctggacccaacctgccacggatacgcagggacgactatttggcatagaggcctaatgcttttaccaaggacagccgctgcaggctgtgatccctgagacgagtgtgagttcagtaagggcagagtttttgttctggttctcagctgtgtcccagcacctgggattgtccctggcatacagtagatgcttagaaaagatttgatgagagggtggccgtacatgaggggaaattttcctcagtatcaaaacatgttgaaactcacacgcttccaagatgacgtattctcaggtctgctgccgttgccattctctgccttatgtgatggtgttctgtcttaccagaggctgtggccctgagaaagatcacgtctacctgcagctgcaccacctacctccagagcagctggccatgcccttgcccggcatttcagagacagccatgatcttcgctggtgtggacgtcacgaaggagccgatccctgtcctccccaccgtgcattataacatggacggcattcccaccagctacgaggggcaggtgatggtgctggcttctctcccacagctggaaagaaggctgggacaatggggcccatctcgcagttgtctctttagatcttagaggaagagacagatgtttccttccagaaagtactgtattgtttgctaaattgcacttgaaatttctatcactggaggatggaaggaggcttaataatttattcctccttagtaaactgtcatagatacatcatttgcagcttttcccattttataattactttcctatatgatcttgtgttatttctaatgagcttatacatcaagggatctttataattcctatttctaatgatcttgtacatcgaaggatctttataattcatacctgtgagtggtttgcggttcacacagagcttgtcagtcacttagcctccttgttgggcgaggtgggtggaagctgttactttccccgcatagatgaagaggtgaacagggggtagaagagtctggaacatcagtctcccctgctgatgttcctccacctgccgtgctcctgggtctgagctggagcacaggtggtgagggcctcgggaacatgggacacgggggacagtcgcagatgctgacattggaggccctctgacctgcttgtaacagcaggtgctcaggggcagaggggaaactggggtatacattcggaagtttccttctgaagaagagtagctatggtccttacttccttcttagatatggtctttacttccctctctttgtttcttggagatggagactcgctctgtcgcttaggctggagtgcaatggcgcgatctcggctcactgcaacctccgcctcccaggttcaagcgattcttctgcctcagcctcccgagtagctgggattacaggcacctgccatcatgcctggctaatttttatatttttagttgagacggggtttcaccatgttagccagacaggtctcgaacccctgaactcaggtgatccacccgcctcagcctcccaaagtgctgggattacaagcgtgagccactgcatgcccgacctacttccctctctttctctgacctgcagcacagacaccctgttgagggaggtgggcttgtggaggaatgggcatcttgacatttcacctgaaatcttcctttccacaggtcctgaggcacgggaatggccaggatcagattgtgcccagcctgtacgcctgtggggaggccgcctgtgcctctgcacatggtgtcaaccgcctcggggcaaactcgctgttggacctggttgtctggtcaggcatgtgccctgagcatcgcagagtcgtgcaggcctggtaagtgttttcttcaggacccagactatttgagaaggcgcaggaggttagtcttttttctttttttttgagacagggtcagcccaggctggagtgcagtggcacagtcatagcagcctcaacctcccgagctcaagcagtcctcaacacctcaaccttcagagtcccaagtagctgggactacagatgtgcaccaccacacctggctaatttaaaaaaattttttttggtagagacagggtctcacaatattgcccaggctggtcttgaactcctagactcaaacagtcttctgcctcagctttccaaagtattgggattacaggcatgagccactgcacccagccaggttacaaagccttgatttcttactggaaatttgcgtagtgagcatatagaggtagtctgggttttttcccctagaagtgattaaactgagaaatccagagattatatggtggtaatgttgagactagatagaggctggttggggatcttaacagttaaggtgacatttttggggttacattttttttttttaaattattttgcagtcattattttctgtttagaaaaagcactattaggaagctgttatttttaggggaagttcattacgtattacttgcctgataaaaatcacttatttgcaatgaaatatttaaaatagttggcatgaatgaatatgtaacttcttggtacttagaaaaataatttaggccattctaaaagtacaactaacctctattagaggagaagggctgacttagagtgaacaggattcccaccctctacggacagattcgatttcacttgctggttttcttttcaggatagcgtcaaataatgtgcaggaaaaggaataccgtgtgtgggagtgtgagtcttatgtgcacgaagaacaggacagttagcatcgttcccacctccagagatcctcacggtggtcatgcagcctcgtgtgctcagaacagtgtgaggtggatgaggcactggtggatgtttgcgtggcaaggatggtgggaccccaggcccacgttcttcccgttagctttctctggtgttaactgtttagcatcatttctgctgtttttatagaacaggcgctttttgctttttgtatggactcaagtgaaataaaaactagcaccgccgtaccttataaacatgacccttttctatctgtagttagaaaggtacaggcagtattaaaagggtagctacttcagacactgtgtctctgtggatctgacgacagctcaggaggccagcacatgcagagccggcgtctcatccccagccgttgctgatcatcggcgaaggcggagttcaggtgcctcgctcctgacgccacaggttgtgcttgtctcactccatagccctgcactttgtcgcagtgaggtctgataccacttctctcagagcagtgtagaaattttgagcttctctttctttgaaaatgcagaaaagaacattttgtgagaataccctatacttgacatctgagaaaccgctcacacatgcagcatctcacgcagaatgctgtggagtcggactcaaaaggctgcacgcctgtggtcctgttgataggacattctggacaaggcacatctagggaagaaaagggattggtggttgccagaggctgtttcctgattgtgctgaggcttacagacacagctctgtgtgtgtcaaagtttgaaaaacctacattaaaaatgatgagtttattttactgtatctttacgctttaatttttaaaaatgaaaaggaaagaaaaaatgcttgtagcatccctacttctcccccaacccccgacccccccaaaaatatatatatgtgtatttttagacatagtctccctctgtcacccaggcttgagtgcagtggtacgatcaggtgcacgccaccacatctggctaatttttaaaaatgtattctagggacagggtctccctgtgttgcccagggtggtcttgaactcctgacctcaagtgatcctcctgtctcagcctcccaaagtggttacatgcatctatccatgtgttaaaatcggtagaactgaggccgggtgcagtggctcacacctataatcccaccactttgggaggccaaggcaggccgattgcttgagctcaggagttcgagaccagcttgggcaaggtggtgaaaccccgtctctaccagaaatacaaaaattagctgggcatggtggctcacacttgggtagtcccagctacttgggaggctgaggtgggaggattgttggagcctagaaggcggaggttgctgtgagccgagatcacaccactgcactccagcctgggcaacagagggaggagacactgtctcaaaaaaaaaaaagaaaaaagaaactgtagaactgtccaccgaaagaaaaaagtcaattttaatggatgatcaatttttaaagcgttataaacaaaaggaaaagagacaccagcaagcctagaagcatttgagcagaccgtcaagagacccacagcctggtcccgaggagaggcggtaggcgggacagggcctgtttgactcctgcatttcatacctcctatctcctgcatgtgttacctattgaagaaaaaatacatataattttataaaaaaaaaaaacctttaaaacttttttcaagacatcttggaaacacaagagttgcaaatcttggccgtgcgcagcagctcacacatgtgatcccagcactttgggaggctgaggcaggtggctcacctgaggtcaggagttcgagaccagcctggccaacatggtgaaaccccatctctactgaaaatacaaaaattagccaggtatggttgcaaactcctgtagtcccatctactccagagtctgaggcaggaggattgcttgaaccaggaggtggaggttgcagtgagccgagatggtgccactgcactccagcctgggctacagagcaaaattccatctcaaaaaaaaaaaaaaaaaattgcaaatcttgaagtataggtgagagcacacaacagtccaaatcagcaggtgacttgcaagcacacagcagccaccttcctccccctaatgtgaaggacagtggggcggccggccccttgggaccaccatctggaaggtgtcattttttcccgttagtggagtgacatttatatacacttaatgtatataaatctgtatacatttaattttttttttttgtaagacagggtctcgctctgttgcccaggctggagtgcagtggcgcgatctcggctcactgcaacctccacctttcgggttaaagcagttctcatgccagataatttttgtgtttttagtagaaatgaggttttgccacgttggccaggctgctcttgaactcctgacctcaagtgcttcacctacctcagcctcctaaagtgctgggattacaggcgtgagccactgcacctggcctacattttaattttttaattttagagatgatttctagtttattcactctaagatcacttaatggatatctactgtgtgccaacagttttgccttttatgtctgttctttaaaattggccccaactcaacagatggcctcagatgtagggtgggttggcagtgtgttagctcaggagacttacaccgtttccaggctccttgagcggctatgctacatttttgtgtgtagtactaaatccatttgtttttttaaaacggttttcaaaagttaaattctagctctttttgttgttgttttaggagataaagtccctccaattaaaccaaatgctggggaagaatctgtcacgaatcttgacaaattgagatttgctgatggaagaagcataagaacatcggaactgcgactcagcatgcagaaggtaagagcctggactcgctctggagtgagcaggctggctgcatacctggccctgcactggttttgtttttttaaaaacagatctagggggatgcaggtgcagctttgtgtggatgtactgggaggtggtggagtctgggcttttcatgtacctgtcacccaagtcgtgtgtgttgtactcagcaggtaattgctcatccccacccctcccgctttttggagcccacagtctgttagtccactccgtgtgtccatgtgtactcaccgttcagctcccacttccaagggagaatgtgtgacacttgaccttctgactcacttaggatagtgacctcccattccatccgtctggctgcagaagacatgattgcattctttttttatggccaagtagtatttcatggtatatatgtaccacattttctttatccggtcgtccgttgatgggcacttaggttgattccatgactttgctattgtgactagtgctgcaataaacatacgaggctgcaccagtatgtggaggtaaacagcagtaggacatactcctcactgtatcaagaatatgaaagagaccagaagtgcacttcttctccacatagaaggtcagcaggccagggcagaattagtgactgcttagcatccaggacagccttctgtggttcactcgtgtgtgcttgggcatgacctccgtgccctgaccgtcgctggctgtcatggatgagtcacagtgtggaggagagggagccgcaggactgccggagaagctccgtccccagcagggcagctttctcttagaggtttcctggagttcaacacaacactggtgcttacatctcaggcccagatattgatcatgtcatcatgcctggcttccagcagctcggaaacgtctttaagctagacctgttgctgcccctaaatatactcagcagagagggagagtgggcggcaggtggacagtgatctgtgcggcctgtgctgctgggagtcggtccagtaggaccgtctgtgatgatggaaatgttgagtgtttgccgtccagtatggcagccattagccatggggccgtggagaacctgatatatagtcagtctaagaaactcaattcctctaataacaaggattcttgtccatgaatgagatctcttgtctgctatttgcaagaatttctgcgtattttctagaaagaagtccactgctttagtcctattctgaaaggcatttggtgttagacacaagagaacaggttccctgctgacaattttcagaggcccgtgcccttcggtcttcaggtgaggctgggcttgagggaggttttgtggaacggtgagaagaacagcgtgactaaggcacagaaggctgagtgatgccctgcagtgcttttgtagggttggaggccagctgggaaagaaggaacccttgcgttagagaatgggaacatgccttaggatatagaaatggcaaatctgagatagtttgaagtgagaatactagaagtgttcccaccaaacaaggtgtgtcttggtgcctgctgtatcccaggctccgtgaggtgccggagtcagcactgaacaaacagagcttcctatgcttgcggaaatgcatttcgttgggggaagggatttttctgctgactctggctattaatagtaacaatcaaaaaaagaaatgaggtaaattgatagaaacaggcccccaaatgtggccataaactggccccaaaactggccataaacaaaatctctgcagcatgtgacgtgctcgtgatggccaggacgaccacgcaggaaggttatgggtttaccgtaatgagggcaaggaacacctggcccacccagagtggaaaacctcttaagaccttcttaaaccacaaacaatagcatgagcgctctgtgccttaaggacatgctcctgctgcagataactagccagacccatccctttatttcctgtaaggaatactttcagtaagtcttatcactggcttgctgtcaataaatacgtgggtaaatctctgtttgaggcttttggctctgaaggctgtgagacccctgatttcccactccacactctatatttctgtgtgtgtgtctttacttcctctagtgccactgggttagggtttccatgacccagctggtcttggcagtaaatattgaaaaggaatagatacagttgccattatttacagatataatttccaaaaaatttccagagaataaacggaaaaactaacagaaacaaaacaagaatgtagtaaggtatgtgtataagagatttgtatgtaaaaatcagtagctttgcaatgtgccagcagtaatctgctcagacatcagtaaatatctcattcgcatttcaaacaaaaaatttaaaatgccttgaaataatgtaaccagaaatacgaaaagatgatatgaaaacgtcgctgctaaaggacatgaaagaatgtaatactagattctgagatgcaatttttttcatttgttcttcctgaaaaaccattaggttgatgtgcattacagtgttacgattatgtatgagtctaaggaaaatcagatgaaatgtccaaattgaaccacgaaggtgcattggtagaggaagagacaattagggtcagtggagcaaagcacagttagagggagaagcaaggaggaggagggatcacggaggtggtgcctgtgtgtcccacaggaagcaaaagctgatgcccagttcccagcatacctaagtaaacttcaggtccactcctagcacgtttctcgtgatagtaaaactatgaaggaactcagtgtacaaggagcttctacaaaataggcagaagacagtagccagatgggccaagggccccagccacccacgcccctccctctccttgaagaccttcggttccaaccccaccatcagcagggctctgctcagttcctccttgtgtgtatcaccacagggctgctggctcgtgtcacgttcaccaccagaccccacatcaggagtcccgccaggggtgtggggaggcagtgctgcctggttggccgtggagccgtatggaacgtggtgcctcacaggcagtctgcttggcgtcctggaccctggctgtatcccgctggaaaggatgtgtgtgggtctaagatatgtatataatagaaacatttattcagaagctttagtcaagacttcatttttaagttcagagtaataaactcatagtctaaatttcctaatttttctgtttaatttacataaataaaatgaaatgcaaaacaacaggtctaaaagttaagcagttcttggtatggctgcttctatgaattaaaagtttacaaataatattttgtgccacagtcaacgcaaaatcatgctgccgtgttccgtgtgggaagcttgttgcaagaaggttgtgggaaaatcagcaagctctatggagacctgaagcatctgaagacgtttgaccggggtgagcagacagtgggctctgtgcacactgttgggccctgccttctgcagggtgggctggtgtctgtcccgtcagtgctgacttagttccatgcttgctgtctggatgggtgctggcccccagctgtaaagccacaaccagtgactccatggactagcaggcccaggctgacagctcggagggcccgtgtgactgggtcccacctgcccctgatggaactttttgtgtccccaggaatggtctggaacacggacctggtggagaccctggagctgcagaacctgatgctatgtgcgctgcagaccgtcaatggagcagaggcggggaaggagtcacggggcgcgcacgccggggaagactacaaggtgcgccttctcgccacgcccacctgcacctgccttttcctcccgcctggtgggactcagccccacccctgcattttctctgcattttatgtcgtttccccaaaagtatatccaaaaaatgcctttttccctctggtaactttgatccctgggttctcgccattttctggatcactgtgacctgttccttgctttgggtcggcatccactgatgccagcagtggcatctccaagccaatgtgctttgctgttagaaggccaaggttagaagtgcagccagcgtggcatgaccaggaaataaatgccagtttattaaataacgagtaagccaccgtttcaagcctgccctatggaggaaatgccagtttattaaataacgagtaagccaccgtttcaagcctgccctgtggaggaaatgccagtttattaaataacgagtaagccaccgtttcaagcctgccctgtggaggaaatgccagtttattaaataacgagtaagccaccgtttcaagcctgccctgtggaggaaatgccagtttattaaataacaagtaagtcaccgtttcagacctgccttgtggaggaaatgccagtttactaaataacgagtaagccactgtttccaacctgtcctgtggtttggaaaaggtattatagagcctgtcctgtggtttgattacggagactgccctgtggtcacttgttcttcagatgaactgatttttgtgcagagcacacgtgttggattctgcctggtaagagtttttcacatatgatagcaaaaaacgacggaaagggaagcttggggtgcaaatgcaagttcaggataaaccacatcggcaaaaggacaaaggctccacaaggcaggcgcacaggctggttcagggccatgtgtgggcggctggtggcagcctttccagtcagctgaacacagtgaatgggaaaatcatttttattcaccatgaaattttactgatttaccctccactagaatatgctgatggctgtgatcactgctcagaatttgctcgtctcctcatacatattaagagtctttcctgcaaagtatatgaatccgtgtttgccagaatacagaataataataaatttattatttttaattttttgagatggagtctcattgtcccccaggctggagtgcagcggcgcgatctcagctcactgcaacctctgcctcccaggttcaagtgattctcctgcctcagcctcccaagcagctggggttacaggcgcatgccaccgtgcccggctaattttgtattttcagtaaagacggggtttcaccatgttggccaggctagtctcgaactcccgacctcaagtgaaccacccaccttggccttccaaagtgctaggattacaggcatgagccactgtgcctggccaggagcataaatttagttggtgacaacgagttttaattagaatagaagccaggtgcagtggctcccacctgtaatcccagcatttgggaggctgaggcaggcagatcacttgagccccggagttctagaccagcctgggcaacatggcgaaacctgtctctacaaaaattaaaaaattagccaggcgtggtggtacacacctgaggtaccagctgctcaggaggctgaggcaggatgattgattgagcccgggaagtcaaggctctggcgagctgtgatcacaccattgcgctccagcccaggtgacatagcgagaccctgtctcaaaagagaaaaaaagtgtttttaataaaaacaggctgaaagaaaagatggaggtagtctcccagcgcttggagcaaaaagacaaagtatttgataaactcttaggtacataaaggatgtctaagggaacatgcggacatggattactctggactcactgctggctgcacatcgctggccagccatgtggcctctgtgggttctgaacgtgttgatggtgccaacctcctgggctgaagtggaaatggaatgggttctagggcatctgtctcttagatcattttaatgtttgctgtgttttttctgtattgctctgttagagtaatgagaaatgtgatggtgtttctggcctcaggtgcagattgatgagtatgatcactccaagcccatccaggggcaacagaagaagccctttgaggtgcactggaggaagcacaccctgtcctatgtggacgtcggcactgggaaggtcagtgtggagctcgttctcaccacagcccagcacccacacggccccgcccaggtctgcgggctggccttgctgatggtgaacgcggaggagcaggccagatttaaatcaactcccgacagatttgaggcaccgctgaaaaaggcactctgacagcagtcgggcttcgggctggaaacagaatccagtgcctgcaggtggttcagaggagccttaaggaagggttgctctgtggtgtgggccagatggaagtcactgggcaggagcaagtgtccaaggcctggtggcaggggaggagatgatgattgtggacctagcgagaaagtcagcatctgtgtggtggggacagagccactaccagaaaccagtcccgagccaagggagcccagaagagacccctcccctctcttcccatgggctgggccaactggaagcatctgcaggggagcagaggggatgtggtgcagcccttagcatcccctgggcactgagcaagcagagaagggcagaaatggaggcagggttggggtaagcagcgtcctgggaacagccagccgagggtgtggtaggggggttgcagcttgttccacacaagcacagcgtcttgggaacagccagccgagggtgtggtagggggttgcagcttgttccacacaagcacagttcacctgtgtggcatttccactgggcattgagattcagaaatcatgaagatagaaagcttttacccttaagcttttcataacttgtaagggagagtcgtataatcacttagctgtgtctgtggaagttacctttggactctcactatcatctagtgtgtctgtgattcaggcagtgggtcattttcagaatttatcatgaaggccatttcctgatagtatagagaggtcacacttcactcgcttagcacaagtctatttttaatgtttccgggttcaggttttttgttttgtttttgttgttctgagatagagtctcatctcttttgcccaggctgaaatgtggtggctcgatctcatctcactgcagcctcaacctcccctcggctcaggtgatcctcccacctcagcctcccgggcacatgccaccatgcctggctaatttttgtatgttttgtagagacggggttttgccacgttgcccaggctagtcttgagctcctgagctcaagtgatccacctgtcttggcctccccaacaggcatgaaccaacacgcccagccagtttcagtgatttttgaagaaatacatactcattttagaaagtacaaagagattgaaataagagctcactaaccagagatgacccattatggtttaaatttctttgtatatgtgcctaccttttcctgtgtgtgcatatttaatacacggcttgagtattccttctctgaaatccttgggaccagaagtgttttggatttcaggcttgttcagactttggaatatttgcattacacttactgtctgagcatccttaatcggaagatctgactccatagcacatttcttttgaatgtcatgctggtgctcagaaagtttcagatttgggagaatttcagatgtttggattagggatgttctacctatataaatatttactttgaagtagaaaaactggaagtagatagtttaaacatgaagtgtcttggtatagacaagggttctcccacttttcatgatgggagcatttttgtaaagcaaagcactgagaatctggtacagtgtcattttcgttgctctgttccactctaccgatctgccgtcatttacagtcccctgttgcgcatgtagatcatttttgaatttgttattggaaaatactgcagcaaataccttaaagttcacatgccgtaaatctacttttatagttaaaatttttcaaaaggaacacaagagatggctttttgtacatttttgtgcttaacttaccactgacttcttttcaaggtcactgtggaatatagacccataattgacaaaactttgaacgaggctgactgtgccactgtccccccagccattcactcctactgatgagacaagatgtggtgatgacagaatcagcttttgtaattatgtataatagctcatgcatgtgtcaatgtcataactgtctttatacgcttctgcactctggggaagaaggagtacattgaagggggattggcacccagtggccggggagcgtggcacttacctttgtcccttgcttcattcttgtgacaagataaaactgggcacagctgttaaataaaatataaatgaacaaactttcttttatttccaaatccatttaaaatattttcctgttatgacttgtcatatttgttgacctaaaaatcaaatgtaattatctttgtattctgttacatcaaaatccagatattttgttgcagtttcttttttttttttttttttttgagacagggttggtgcagtctcagctcactgcagcctcaaactcctgggcagctcaggtgatcttcccgactcagccttctaagtagctggggctacaggtgtgcaccaccacgcccagctcatttattttgtaattgtagggacagggtctcactttgttgcctaggctggtctcaaactgctgggcttaagtgatcgttcctccttggcctcccgaagtgctggaattataggtgtgaaccaccatgtctggccttgtagtttatttctaagttcaaattaatgttggtgcttttcctccttttttcttagcagatggtttgctaggtgagtgtgtcctcgattctttaaatcaggggtccccaatccccaggccacagattgttccagtccatggcctgttaggaaccaggccacacagtaggaggtgagcagccagccagtgagcattactgtgtgagctccgccccctgccagagcattactgtgtgagctccaccccctgccagagcattactgtgtgagctccgccccctgccagagcattactgtgtgagctccgccccctgtcagagcattactgtgtgagctccgccccctgccagagattactgtgtgagctccgccccctggcagagcattactgtgtgagctccgccccctggcagagcattactgtgtgagctccgccccctgccagagattactgtgtgagctccgccccctgtcagagcattactgtgtgagctccgccccctgccagagtattactgtgtgagctctgccccgtcagagcattgctgtgtgagctccgccccctgccagagtattactgtgtgagctccaccccctgtcagcattactgtgtgagctccacccccgtcggcattactgtgtgagctccgccccctgccagagcattactgtgtgagctctgccccctgtcagagcattgctgtgtgagctccgccccctgccagagtattactgtgtgagctccaccccctgtcagcattactgtgtgagctccacccccgtcagcattactgtgtgagctccgccccctgccagagcattactgtgtgagctccgccccctgccagagcattactgtgagctctgccccctgtcatcattactgtgtgagctccgccccctgtcatcattactgtgtgagctccgccccctgccagagcattactgtgtgagctccgccccctgccagagcattactgtgtgagctccgcccgctgtcatcattactgtgtgagctccgccccctgtcattactgtgtgagctccgccccctgtcatatcattactgtgtgagctccgccccctgtcatatcattattgtgagctccgcccctgtcatatcattgctgtgtgagctccgcctcctgtcagatcagtggtggcattagattctcataggagtggaatcctgttgtgaactgcgcatgagaaggatctaggttatgccccgcttatgagaatctaatactgatgatctgagatggaaccgtttcatctccaaaccatccccacacttgtcagtggaaaaagtgtcttccgtgaaaccagtccctggtgccaaaaaggttagggactgccggtttaaataaccaaatgctaaaagaactggcatagaagtaaatgggctgctgctttatttttaggctgttctttttagagagcaatgacagttatttccaagtttgtcattagaaaataatattaggttggagcaaaagtaattgcagtatttgccattgctttcaatggtaaaaggcacaattacttttgcagcaacttaatattataaatttgttcttaaagtgtatttttgataagaaagccgttttgtttttccttctgttaattttttgtttttttcttggtcgagacagagtcttgccatgctgcccaggctggagtgcagtggtgtgatctcggctcactgcagcctccacctcctgggctccagcagtcctcccacctcagcctccctaagagctgagactacaggtgtgagccaccatgcctggctaatttttagagacagggtttcaccctcttgcccaggctggtcccaaactcctgggctcaagcagtcctcctgcctcagcctcccagagtattgggattataggtgtgagccactgccagaaaaacgtttcctaagacaaggcaggtcttacattatatttaaattttttttaatgatgtcttttttggcagtgcacagccagaggacaacacatcacacacaagaaacagttgtgctcatgtgatgggggcctcagcactaggaaggagtggactgttggcgcacgcagcagcttgaataaatctgaaagtcactacgctgcgtaagagaagccaaataaagcgcatgctgtgtacagagggtgtcgagaatgcctcctacgtgacggaaagcagatccgtggttccctgcagactggcaggagcagattccaaaggcacaggaagaagcttgcaggtagaatgtgttcattaccttctgcgcattataccacaaaaaagctgggaataaaaatgctaaccaaaaaaaaaggtgaaagtagataaaatttctcaactgtgtgatgggtaaacgtgcaggtttgctgtcatgctttgtttatgaagctgtggggtacaaggactctcatacgtcactgtggaatgcagaacgttgcagcctcatggaagaggatttggcagcatctaacaaaacgacatggcatttgcccttagactcagcaattctagaatctgcctcaaaaaaaactctggcaaagaaatgaaaggactttatccacagagttcttttcacagcctgaatgtgtttgccacaaagttcttcactgtggcatttgtaaaactggaaacaatcaaaatgtccatcagtaagggattaggaacattaattcgtgcagtggggaactccgtaccagaaggaggaatgaggaacgcctattgataaggggcagagtacatataatataatgcaaatatatatttgctttttcttaaaacagtacaaagataaaaatctaaagtggttgctgtggaggacaggggtcagtggtggaagtgagaccgaaatagactctgaagtaatatctggactttgaaattgtaagtgttttacatattaccaaactaagtttttaagatagtccctaaaattgaaagaatggtatctgaaatgaatgaatctaaattccttggattgcattctacaggcgccaaccctgagacaaaaatttggaaggtggccctgagcagcagctgaagggaagtgggaggtgagacaggaaagaggcggcagcatggggcgtccgggagccgggtctcatgtggacagctgggcccgtgttcactgtgggagctggtgcgttccttcaccagcccacgctgcacaggttcaggatggtcaattccgggcacccctggcctgctccaggacatgctgctgccaccagagaaagcccctaggcagcgtcccgggtgctggtggtgtcagaatcgagtttgagtctgaggagtgacctggggctggctgggctaggcagcatcacggggttctgcagcccaactgcacatcaggctggtgacagtcacgcagcctattacttcatgtgtcatcagaggatcgctagaacacagcacttcaagtgtgcagatttagtgagccatagtctaaagacaaatagagccactgaatcctaaatttcaatcaatcatctccgttactcgtcttataggtattaatcctttgaaattatgtggggtgggagttaaagcaaataactaattatgttaatgctaaaactaagatttttctggcaagggaaaatcctcccaagtcccagcactttgggaggccgaggtgggcagatgacctgaggtcaggagtttgagaccagcctggccaacatggtgaaacgccatctctactaaaattgaaaaattagctgggcatggtggcaggtgcctgtaatcccagctattggggaggctgaagcaggagaatcgcttgaaacaggaggcagagattgcagtgagccgagattgtgccactgcactccagcctgggcaacaggaacaaaactctatctcaaaaaataaaacaagatttttctgagaaaaaggtgtaaaaccgtatactaaatttgaaatagaaatataagcgtgaactcatttgttgttcttttaccgtagacacattttctacctctgccccagtagcagtagacacatcaagcacctagaaagtggtctctaatacatgaaaaccatgaattcatagtggtggtttcaaagccaaaaccaaacaaacacatgtaattggtcactcttggaggtacctagggcactaactcctaacactgggaatggacacttgaaggaagatcagtaattatcctgtcttttctctacaaattgcaattcagggaaaccttgttgattagggaaagttctttacataagaattcctgcaagtaagtgagtaaagaatgacagtttaagaattgtcccagcctggccaacatagtgaaaccccatctctaaaaatacaaaaaattagccaggcatgatgatgggtgcctgtaatcccagctactcaggaggctgaggcaggagagttgcttgaacctgggagacggaggttgcagtgagccgagagtgcgccactgcactccagcctgggcaacaagagtgagactctgtctcaaaaaaaaaaaaaaagaattgtcaaattgctacccctaatgccatggttctctaacctgtgtaacaggatcagctggagggacgctaccccagaccttccaattcagtcctggggggaccctagtccagaccttccgattcggtcctgggggggccctagtccagaccttccaattcagtcctggggggaccccaccccagaccttccgattcagtcctggggagaccctaccccagatcttctgattcagtcctggggggaccctcgtccagaccttccgattcagtcctggggggaccccaccccagaccttccgattcagtcctggggtaccccaccccagaccttccgttttcagtcctggagggaccctaccccagatcttccgattcagtcctggttcggtctgagaatttgcatttctaacatgtccagggaacacagtttgaaaacctccacggctaacatgtaatgggatgacatggtccaataaatgaaggaaaaataacaggtggcaacctcaggcagcttcatcccaaccagtaagaaagtaaatccttttgtaaactaagaggaagtattaatatgggcgtttgagcaaacatttaagtgttaggacaaagaattaaaaactagcacaggcacccctgaagcatgataggatggcaacagaagggctgatttagtttccaagaaataactgacaggcagtgttgtgcgtgtgtctactacttaggaacccaaaacaaaccttcagaccgttttcatgagtactgagaccaagaaaaccactgggcagtgggtggtctggaaatgtaaatgttgatggtactccagtaatgagtcatggaacaatgtttcatattgaaaatgtttttgtaaatgtgggtttcagggtttcaaagtgaacccatatgtgttaggagaaaggacacaccaaagaagtaaaataattgggtcaatataaaaagtagaatattgcccagagagaagatgtggataattcctaatacggatcaaaggcaccaaaaaggtgagctgtgagtaagatattcagacctgcaccatcccaagcagtagccacagtggcaagtagcctcctcactggacagtgcagctacggaatgatgccatcaccggaaagttccatcagccagcaccgatgcagacctttgcaactgcccctcacgctggacagcacctgtttgatagattgtccactacgcagtgaaaagcctgggtgaaaagcggtatttggtagaagagcaaaaaggggaaaaaaattaaaagtagtaggtcattgtccgccaaactgaattctggcagaagaatgttggaagcaagatgggagccacaggagaaagtatccttgtcccaagacaggagggggtgccaggcatggttggctctgtgcctggaattctatggccggaatctggaaaaaggaaaagtgactggaaaaggaaagattctgtgtgcttatgtcaagatgcagccgtccgtgatcctgagaaaataagtgaacaaagtggctttggagggacgctgttggatacacaaacagatacaatgtgcacttgctatgcttgttcacacaaaggacaggatggtcatctgttcattgaacaactacctgtcgagggcctatatgtgccaaagacatcagatgaacaagagggtgcactgtggaaagcctcaggaacacaagcgcccagaaacatttagaaaaattctaaggaaaacagaaaaggcattttcagattagctcatagaaatgagaccaaaggaaagactggcccagtatttggatacattatgtgataaaccttaacacagggaggaaagtgttatctttcaattaatttctcaacttctggagaccttagaacagacctggctaggaggaaattgaatccgaggcaggtgaggacatagtggtgcctcgatgcttccagtgattgcgtcagcagaaccaggggtgggagatgatctctctttttgttggcagatggtggtgtctgctgtagctttgtcccctggtgacgggactcaggcagtaacccccatcattggcaatacccccacctctgagaatgtggagaggacttgtgaagacaatgttgtcccaagcagcacagcccaggtgctgacaggattcagagttagagctttcttagaggtcagggttgcggaagaggcagggactgcagctgcatagtttgtatatgtatcaggctagtatcttttgttctagactcatccatttgtacattcatatgagtatgcatgcatggtgttttttctttttctttttctttttttttttttttttgagatggagtcttgctgtgtcacccaggctggagtgcagtggcataatcttgcttgactgcaagctccgcattccgggttcaagagattctcctgcctcagccttccgagtagctgggattacaggtgcctgccaccacacttggctaatttttgtatttttagtagagatgggggtttcaccatgttggccaggctggtgtcgaactcctgacctcagtgatccacctgccttggcctcccaaagtgctgggattacaggcattagccactgcgcccagccgtatgtctccatctttttatttcttgcaatgtgttgttaaagaagtcaggtggtatgtgtacacaagtaacgtatacttgttgaatatttcttatttatcataccctgtctcgttccaaaaggattttacatgacttataattttaatataatccgggggagatgggcagattcagctctgggaggccagcagaatggcttttaggtcctccttggattcagaaaatacttcttgaaagatatttgaggtaaatcttacaggattagaggttagccagatgaaaagaaatcaagagaggagagaggagcccccacaaaggactgacccagggcaataacggggaaagaacttggaggtacagaggcagaccttggtgtttcccagggtgtgggacgttgggggtagtaaggctggagtgggtagaggaaagggctagggtgacaccacggggtattaggtggaactgagggaaacagaaataggagcagagaaaagggaatgagaacgggaaagagggaggtgggaaatagaagagggagtttccaaacagcaacaacaacagaaacaagtgttttgggttgtggagcgtttgccctgcagagagctgggtctgcccttgtcccttttggggattatgaatcagtgcgtggagccgcgcggccacatccaccattcacttgcacttgagtgacagccaagctacagtcatgaatacgtttctttctttttacagaagaacagtaaattgactttattccttataaaggtgatactggagaatgtgacatagatttgctggcacatgggtttcctatgagcaaaccccagaattggacacacgtatctggtgctgcattggaatcatcccaaaaaaccaaggcttgcattgcatatctatctgctgtctgctgaaggagccctgtctgtgtgcccaaggaagtgacatccttgccaagggctgtccctgtcgcaggagatgaaggagccctgtctatgtgctcaaggacagtggcttccttgccaagggctgtccctgttgcaggagatgaaggagccctgtctatgtgctcaaggacagtggcttccttgccaagggctgtccctgttgcaggagatgaaggagccctgtctatgtgctcaagggcagtggcttccttgccaagggctgtccctgttgcaggagatgaaggagccctgtctatgtgctcaaggacagtggcttccttgccaagggctgtatctgttgcaggagatgaaggagccctgtgtgcctgaggacagtggcttccttgccaagggctgtccctgtagcaggggaaagcctttcaggaccctttcttagagaaataggtctcaaagtgaatgaatatacctcctcacatactcaccaagcagcctgcagaggatacagctttccatgtggctcagggaacagttgatatcaacagtctctcaattcctttattattattattattatactttaagttctgggatacatgtgcagaacgtgcagcgttgttacataggtatatatgtgccatggtggtttgctgcacccatcaacctgtcatctacattgggtatttctcctaatgctatccctccccttgcccccaacctcccaacaggcaccggtgtgtgatgttcccctccctgtgtccatatgttctcattgttcaacttccacttatgagtgagaacatgcagtgtttggttttctgttcctgtgttagtttgctgagaatgatggtttccagtgtcatccatgatcctgcaaaggacatgaactcatccttttttatggctgcatagtattccatggtgtctatgtgccacattttctttaaccagtctgtcattgatgggcatttgggttggttccaagtctttgctattgtgaatagtgccgcaataaacatacatgtgctcggggctgggcgcggtggctcaaacctgtaatcccagcactttgggaggctgaggcgggtggatcacgaggtcaggagatcaagaccattctggccaacatggtgaaaccccttctctagtaaaatgcaaaaaattagctgggcgtggtggtgtgtgcctgtagttccagctactcaggaggctgaggcaagagaatcgcttgaacccgggaggtggaggttgcagtgagccgagaccgtgccactgcactccagcctggcaacagagcaagactccgtctcaaaaataataaataaacatacgtgtgcatgtgtctttacagtagaatgatttataatcctttgggtatatacccagtaatgggatggctgggtcaaatggtatttctagttctagatccttgaggaatcgccacactgtcttccacaatggttgaactaatttgcactcccaccaacagtgtaaaactattcctatttctctacatcctctccagcatctgttgtttcctgactttttaatgatcaccattctaactggtgtgagatgatatctcattgtggttttgatttgcatttctctaatgatcagtgacgatgagtttttttcatgtttgttggctgcataaatgtcttgagaagtgtctgttcatatcctttgcacactttctgatggggttgtttgttcttgtaaatttacttaagttccttgtaaattctggatattagccctttgtcggatggatagattgcaaaaattttcttccattctgtaggttgcctgttcactctgcctggtcatatgcagaaaaccgaaactagaccccttgctgacacttatacaaaaattaactcaagatgcattaaagatttaaacgtgagacctaaaaccagaaaaatcctagaagaaaacctaggcaacaccattgaggacgtaagcatgggcaaagacttcatgactaaaacaccaaaagaaatggcaacaaaagccaaaattgacaaaaggtatctaatgaaactagagagcttctgcacagcatgactgtatttcagtgcacgtttaccaccgagctcttaacgctccaccactgtcctgtgtcattaggatcccagctctgcagccattcctctagttgggcctgggtcggctctgggatgccgcgggggggccggtcggcggcggaggggccagtggggacccggggcaggggcggagacccctcccactgcacatcccactgcctgggtatctggcccccaaccggcctgcccgctgctcccacctcccatggtgggtcgggggctgagggctggggactggggcagggtaccccaaatatctctcggtggcgatcgctcagtccgtgcagtccatccagctcctgcattgtccgtcctaccaataacctctcacttgcaattctcagccccttcctgcattgtctccctgtgagacctactagaacccccgcctttcacactgctgacctgctgggggaaaatgcacagaggcagagacgaggccacgcgggagtcctgatctctaaccccagccggtctcaggccttgccgaggcaacgctgcttccccagacactctccctttcccattcttttttttttttttttttgagttggagtctcgctttgccacccagtctggagtgcagcggcgcgatctcagctcactgcaccctccacctcctgggttcaagcgattctcctgcctcagcctcccaagtagctgggattacaggcacacaccaccatgcctggctaatttttgtatttttagtagagatggggttacaccatgttggccaggctggtctcaaatgcccgacttcaggtgatccacccgcctcgagctcccaaagtgctgggattacaggcgtgagccatcgcgcctgcctttactttcccattcttaacgcctcccgtttcagacctgtccccttttccccgcatttctgactgtcacggcacatcacaaccagcagacagggcttcccctatttcacaggagaaatagaagccatcagatgggacctccttcaaagtcctgccaccaaacctcagcatgtacctggacccacatgtatcctcttttcctttgggattgaattagagaggtgccgctcgaaacccgctcctgggtgggagtcttggctctatcagttatgcctctattctgtatgtttaacctcgccctcgtaggggcataaaacagcatttaaacaggatcaagctttccattttaaaactccatacactcccttaatttcatctcctcctccacctactgccccatgtctctccctcttcctggctaaacgtctcaaaaaagtggatacactttctgtcaactcctaaacactcctcacgctcatttggcctctgctcctcccttcctcctcccacttcattggaactacttctgccaaagaggatccctgagtcagcctgactggtaaccccaatggactctactcaatatgcaacatccttcacttcttagcagagtttgaaacagcctgactctcctcttctggcaacattcttttccttggtttggggacgctgtactgttctggttttgcccctccctccgagcattccttgtgtttgtcctggcccattttctcctctcattctacatcctctccccggggattttagcttctctcacggctcaggttaccatctccatagtgatgactatcaaattctgtacctcatttccagaggctcctgacagacttgcttggtcaatatactactggacatattcatgagactgtctcacacaggcatctcgaacccagtgtgtcccacaattctcttcctatccatgcctgttcctcttccactgcctcatatgtcggtgactgtccaccttctctctctctccccctctccgtttggctcataggaaaagtgtcaccaagggctgtaagtgcagatttctaattatcccctaaatttgaacatttttcctctcgaaagtgtatggccattaccctattacagatcaacatcttcaatcactggaatgatggcaataatctaattgggttcattttatcctctatctaacaatgacaactcattgcctacacagcaggtagaaggagtttgttttcagaattgccctctgacctatttaagacgctcagatattccctgaggctccttggcctggccacaaaggccctacacattctggctgcttcctcctttccagcatcctctctcacgtctcctctcctcagttccaccctcaggaggcaccagaattcctcacttctttgactacaaggcaccgtcttactcccaagaccagtgaatccgaaggtggaccaccagctgagggactagattccagactgaatagaacaactttccctgtctctccacataaagtgtgtttgtttttcctcttacaggtttccttaatgacaacaaaaaagggagtaatcctacccactgtaagagtcatgactcttgattgcagctgacagaaactcatgacagcctgctttagatgaagggggagagaaggactggaagaatcttggagttgggaatgtcacacgtaattgaaggaagaacaagaaaactatagtaaagaaccctggggtggtgatgtagtcatgggccaagtgtcctggaaccctggggtggtgatgtagttgtgggccaagtgtcctggaaccctggggtggtgatgtagtcatgggccaagtgtcctggaaccctggggtggtgatgtagttgtgggccaagtgtcctgggttttgggtggagaaagagtcccctagataagttattaggtgggtgcaaaggtaattgcagtttttcccattattttaattgcgaaaacagcaattacctttgcaccaacctgatggagtcccccttgccatgcttctctctgtgaaaaaccccaagccgaagtcagcataacatccacaggactctatgtttgcaaaagccagcttagctatattacatgtataagcacattttttcaataagtcagccttagcttactgtaactttttaactttataaacttagtattttaactttttaaacttttttgttgaaaactaagacacaaaaacacatgttagcctagatccacacagggtcagggtcatcagtatcactgtcttccacctccacattttgtctctctggaaggtcttcaggggcaataacacacatggagctgtcatcgcctgtggtaacaatgccttctacagtacttcccaaagggcctgctagttcacttaattcttttatagagagaaggagtacactctaaaacactgatcaatagtatattatagtaaatacataaaccaggaacacatttattatcattatcacgtattgtgtattgtacagaatggtgtgtgctgtgctatccaggaacacatttattatcattatcaagtattgtgtactgtacagaatggtgtgcgctgtgcttttatgcaagtggcagcacagtagctttacacgagcatcactagacacatgagtagcattgcactcggcaacaggaattttttcaggcccattattataatcttatgggaccgcatcctatatgcagtttgtcattgaccaaaatgtccttatgcgatgcatgactatatttgcaaaggactagtatctagaatacatttaaaagtcttaaaatagtaacaaaacaaagaatgcaattagaacatgagcaaaagatacaaagcaacatttcactggagaagatatacagattgcaaataagcacatgaaaagatgtttgataccattagggaaacgcttctttaaaccaggagatatcaccacgtgttagaatcaacaaaataaggccaggcatggtggctcacacctgtaatcccaacactttgggaggctggggcaggcagatcacatgagatcaggaattcaagaccaacctggccaacatggcaaaaccctgtctctgctgaaaacacaaaaattagccaggtgtggtggcacacgcctgtagtcctagcaccttgggaggctgaggcaagataattgcttaaacccaggagacggaggttgcagtaagctgagatcatgccactgcgctccagcctgggcgacagagcaagattatgtctcaaaaaaaaaaaaaaaaaaaagaatcaccaaaataaaaaatagtaacaatactattgtcaaggatgcaaaggaactgtaccactcaatcactgctgtgagaatttaaagtggtgcagccactctgggaaacagcttggctgtttttttttatgactgaatgtgcaactactatatgatgcagtaatttcatttttgcacatttatcccggagaaatgaaaacatatattcacacaaaacctgtatatgaatgctaataaaagtcaattggccaggtgtggtggctcatgcctgtaatcccagcactttgggaggctgaggcagtggatcacctgaggtcaggagtttgagaccagcctggccaacgtggtgaaaactcgtctctactaaaaatacagcaattagctgggtgtaatagtagccacctgtaatcccagctactggggaggctgaagcagaagaacctcttgaacccgggaggcagaggttgcagtgagctgagatcgtaccactgcactccagcctgggcgatagagtgagactctgtctcaaaaaataaaataaaataaataaaaagattagataatctgcaaagttcctgtgagcgctgtcattttgtcactctggtttttcagattcttcccctggaggctggagtttccaggatgtcaaaattacctctgcttgggtgagctatttcaagcagctgggatacctgtgtcactcctgctgtctgccagtgactgcccaggtgtctgctggttcctccccaggagtagggaggaaccaggtgggctggctgggatgggtggatatttaaagaccaggccttggacgctgcagcacttctatctctgcttgatgcctgctgccacgtggctggtcctcctcctcctgctgtggctgagccttggggtgaagacaggtgaggagctaggctggcatctgtgctacaggtcaaagagaccccaatctctgctctctcattcattcaatcaattaatctgttttgtctctggcatgacccacctcctgtgacccagcattcattaattcattaatcaaataattcatgtattcagacacttattaagtaccgactatatggttgatgtggcttctttgtgtatccagttttatatctggataagatgtctttggatgatcagcttgggagggtctagtatccagaggatgctccctcggatagaggcagcgtgggcactgtgggtggctggggtggacgggacaggagggaaggtaggtgtgataaacccagatccagattaacaggcagactcactgggcaatttccaggcaccagtctactgggtttattcaaacatccctggaaatacaacagggtgaatacagttgcatttactagaacttctctctctctctcctctctctctctttttaatttttttttttccagacagagtctgctctgtcccccgccaggctggagtgcagtggtacgatctcggctcactgcaacctccaccttctgggttcaagccattctcctgcctcagcctcccgagtagctgggattataggcatgcaccaccatgcctggctaatttttggcattttaaatagagacagggtttcgccatgttagccaggctagtcttgaacttctgacttcaggtgatctgcccacctccgcctcccaaagtgttgggattacaggtgtgagccaccgtgcctggccctagaacttctcttgggagaaaactagatgtcattggtaggaacacagtcagctgttgcttaatgatggagacacattctgagaaatgcatcatcagatgatttctttgttgtatgaatatcatagagttcacacaacaatgaaatcgagagtttacataaacctagatggtttatatatatatttatttacatgtttgttttccacatggaaagccacatgtcccagcacatgtcccattactgaacatcagtcatttcccctgcttgatcctcaaggccaatatcgagcaccatatatcgggtttctgcatatgccctattataatcttatggggccaccgtcatatatatggtccatcatcggtctaaacatcgtgatgtggcacaaggctgtacttcttggctgggtgcggtggctcacgcctgtaatcccagcactttgagaggccgagacgggtggatcacttgaggtcaggagttcaagaccagcctgggtaacatggtgaaataccatcgctattaaaatacaaaaattagccaggtgtggtggtgggtgcctgtaatcccagctacttgggaggctgaggcaggagaatcacttgaacctgggagacagaggttgcagtgacccgagattgcgccactgcgctctagcctgggtgacagagggagactccatctcaggaaaaaaaaaaaaaaaaaacccaaagctatttattgtggaaaaattcaaacacatgcaaaagtaaagagaataggatgatgaacccaaggtaccagttggccaccttcaatattatcaacattatgctcaagctcttatcccccatatttaaaaaatataaccacaataccttatcagagccaaaacaaatatggtcgcacacctgtaatcccaacactttgagagactgaggcgggcagatcgcctgaggccagaagttcaagaccagcctggccaacatggtgaaacccctgtgtctactaaaaatacaaaaattagctaggcatggtggcgggtacctgtaatcccagctactcgggaggctgaggcaggagaatcacttgaaccagggaggtggaggttgcagtgagccgagattgcgccactgcactccagcctgggcaacagagcaagactctgtctttaaaaaaaaaattaattaattaattaatttaaaaaactacttactatcgtttaatacctatcagtgttcatatttcccccacttgtcaaaaatatcttgttattcagcagcaaagcagaagagaaaaagaaaaaataagatcagatgtggtggctgatgcctgtagtcccagcactttgggaggccaaggtgggaggatcactggagctcaggagtttgagaccagcctgggtacaatagcgagactcagtctctacaaaaaaaaaatttgtttaaaaattagcaaggtgtgttgatgttcacctatagtcccagctattcagaaggctgaagtgagaaaattgcttgagccccagaagttgcggctgcagcgagctgtgaccataccactgcattccagtctgctgcaccgagtgagaccatgtctcaaaaaaaaaaaaaaaaaaaaaaaaaaaagaaagaaagaaaaatgcctttttacagctggtttattcaagtcaagatccaaaaaagatacgcacacatgtttaactagcatatttcttaaatgtctttaaatctatacctagatcagtgccattttttcatgtcatttagctgttgaacgaaccaggtactgtgtcctgcggcatatcctaccttctgggtttgactgattgaatctttgtggatgtccctctgcctctgtctttcctgaactctggtagttgagatcaggactggagatttcttaggcaggaagaatccataggtgggtacttcctatcgcacctcgaaggagacacaaagtgtccagctgtcccacttttactggtgttaaacttcatccaccagatagtgcacccattataaaattctgtccactaatgatttgtgctgagatccacttctcattaggggctgccaagtagtgcttttctatcattctttctgcacttgttagccgaaggttctctgtcgtgaagatatttcccttgtcaactatttggcttggatggaaaggctggatcaatgtttgattctttatttttcatcttcataataatgagctagctcctcggcaccccgggggaagttgtcttcaaatgctgccttgaagcatagaatatttaattctaatggatatgggagggaagggccttccaagccgagggaagagcttgagcaaaggctcagaggcaggagaatgcagggtgtttagagaacagcagagctccgtagcacgtgcaacaagaggctttttgagtgaggaccctgagcacgatatggtgggaaagcaggggagaggtcaggattgctggtttgactcccagccatgggcaaaaggttctccccttgtctatacaatgaggacatctctctagatcagtggctttccaacgtttctggccccagttcactttaataaatacattttatactctgacccagtaagtgcatctgtgtgtataaaaaccaacagaaatttcaaaaagaactcagttgacttttacatacaatgtatgtgggtctattctattctatttcattcagtgtcatcctgttgaaataaatgttggttatgaccactgaattgaactcagtctcacagattgtcggcaaccttagtctgggtggctcctggggctctatttccactccagccctttctggttgatccctggtcttggtgacaacctgacgcagcaccaggctctggagaagagggacaacatgagaagagaagctgatcacttgcaggaggctcctgagctgaacatgaggcaaaagccaggccaaactcagaggctgtggccccagccaggccaccctcaccttcagagtcttgaccccccagaccacactaccggacacctgctggccctgtttccacaacagactggctcagccacacccaggcccacagggctcagaggcctgctccctgttgatcgtgtcaactttgaaaggccttcaagtttatccctaaacaaagccctccagtttagccctaaagagccaggtgttaacctaacaggaagcaatttggaaggtcaaagtcaagtagacggagaagagtgttgagagtcctggggtgacaacacctgggtcccctgctcacctgagccacagactcgccaggtaactgggccagcgtccctcctgcccacgccttgcttgccgcactcttaaagaagatgcatccccttctcttggagggaatgacaatgaccagatcacaactgagctgagcaatttggggaaatttgggcagggggtagagttggcagaactggtttgtaaacagggctctggaagaccttcctctaactgtggggagtgggggaggggtttctctccctcttaggcactctcttctctgctgttttctctatttctctcttcgctgtcactcccattaccgtcctcatcttatctcccccttttctctccttctctctctctctgtttaataacagctttattgagagataatttacaggatgtgagatttacccttttgtacaattcaccatgtgtacatttcagtgttgttcagtgtattcacagggttgcagaaccatcactgctgtcttattttatttttttggcactttttggtagagacagggttttgccacgttggccaggctagtctcaaactcctgacctcaaatgatctgcccgcctcggcctcccaaagtgctgggattacaggtgtgagccactgcgcctggccacctctgtctaatttcagaacatgtttgttatgccccaaataaactctgacccatcagcagtcactgcctggtccacacatctcaccagcccctggcaaccactaatatactttctgtcttgatggatttgtctattctaaacatttcatataaatggaatcatacaatacacggccttttgtgagtggcttctttcacttagcatgttttcaagtttcattgttgttgtggcatgcatctgtacttcattcctttttatggctgagtaatatcccattatatggatataccagatttagttttagccattcatcagttgaagggcatttgaattgtttctactatttggctattatgaataacactgctatgaatattcattgataggtttttgtgtgaacatgtgtttttaattctcctaactacaggctcagaagtagggtttctgggtcatatggcaactctatgtttacattctgagaaactgtcaaattgtttttcttttttttcttttttttttttattcttttctgctgccacctcatctccccaaattgattttcaaagtggctgcaccattttgcaattccaccagcagtgtatgagggttccaatttctccacaccctcagcaacacttcaacacttgctttttttttttttttttttgagatggggtctcgctctgtcgccaggctggagtgcagtggcgtgatctcagctcactgcgacctctgcctcctgggttcaagagattctcgtgcctcagcctcctgagtagctgggactacaggtgcatgccaccacacccagctaatttttgtatttttagtagagacgggtttcactatgctggccaggatggtctcaaactcctgaactcgtcatccacccatctcagtgttcccaagtgccgtgattacaggtgtgagccaccccacccagccaacacttgctgttttattttttatcttagccgtcctactggatgtggggtggtatctcattgtggtttggatttgcatttccttatgattaatgatgttgagtatctttcatgctcactggccacttgtgtatcttctttggagaaatgtctatttaaatcctttgtccagttttaaatttgattgacttatttttatttatttatttattttggaggcagagtcttgctctgttgcccaggctggagtgcagttgtgcaatcttggctcactgcaacctccacctcctgggttcaagcaattctcctgcctcagcctcctgagtagctgggactataggtgcatgctaccaagcccagctaatttttgtgtttttagtagagacgggtttcaccatgttggccaggctggtgttgaactcctggcctcaagtgatctgcctgccttggtctcccaaagtgctgggattacaggcatgagccaccgcacccagccagtttcagctcttacatttaggtctatggtccattttgagttaatatttgtatatggtttgaggtaggagtccaaatgcattcttttgcatgtgcttatccagttgtctaagcaccatttgttaaatctatcttttcttttcctttttttttttttttttttttttttgagacagggtcttgctctgtcacccaggctgaagtgcgctggtgtgatcatggctcacttcagcttcctgcgtctgggctcaagtgatctcctgtctcagcctcctgggtagctgggactacaggcgtgcaccaccatacctggctaattttaatctttttttttttttttaatgttcctttttctccaggcagctgctcccaaccccagaacctttgctgtcttgggacggatcaccgctgcaagaggggaagttgctactgtgatgaattctgccatgtggcaccagactgccacccagaccacagtgtcctctgcaaccctggtaactcacatacaggcccgattccacctacagcaaagctggatgcgatggctggcagaggcaaaccctttgcctgcacttcaggccaaagccgggatgtggcctagatggttcctaaggtccctgacaatcctgagatcttgcatcttgtctatttcaggtcaaaggtgcctacatgctccttctagctttgtttccctgatgttccttgccacctgctactcctctctgagctacttttccaggttccacagggagaggttcagctgtccgtggtagacatgagggtagagaatgaggtggttgggttccacttacctttctatcatcttgcagtatggatgtctcttgactggtaccgtgtagacttttgagggcacacaggagtctgcagagagatactggggacattgagcagcagcagtggggttgggaggcagaaatgaggacaggaacatttaccttgtgtttctctcagcttctcagatgaccaagatggtgctgcagatggtgctgaggatggagaacccaccaagccccgctaggagccacctagactggatgcagagcatggtgagctccctgcaggttctctgagaaggggtggatggcagcctgctccttgcctttgtgccctccaggccccaaagtcagggaaccaaaagaagaaaggggccgtagctagggcagagctccactgcaatgattgttttaggggtaggagccaggattgccgtctgtggacactgaaatttgaatctcatatacttttgtgacaaaacattcttcctcttttgttcttctcctaccatctaaaaatgtagaaaacattcttagcctatgagttgcacaaaaacaggcagtggccagatttggcccatagaccatagtttgctgacttctgccctaaatcatcctccatttctttccttctgtgtccttgttactgacaaagccactttccctaaaatggggtctttccctgtttggtgccatgaagccaatatgcaaaaccgaaagtgagcctcaagcagtgcaggctttatttggtggccatggaattgagaagtgagagcttggctcacaaatcaacttttctgctcgtgagacccaggaagtcacagatacagggcatctttagtgaaggggctgagcattaaaagcaaggggaggagtggccaggtgcaatggctcactcccataaacccagaactttgggaggccaaaatgagaggattgctgagaccaggagttcgagaccatcctggtcaacatagtgatacacccccatctctacaaaaataaaaatgaaaaaagcaaggggaggaatcatgtgttttctgggtctgggtggagaaattttcaaaaccagagtgccaccttcctatttgtttttttatgttattttttcccatcattgtcatgttggttgttgactgttacggtgttagtgggactgtcatttaacatggaaattagattataatgaagttagaggtcaaatgagctgccatcttggattccatcagtcttagctggtttgatcaccagggagaagtttggacctcaggcatcctgcttcctaaagataaacagtgttaaggcagggtagatattcacggaggtcatgtgggtattgcactggatgacatcttggcttcagccctgatctgttcagagccctcagcacggtactggaggagaggccttgggccgcatcgtggcatattgtggctttggggagaaagaaaagcagatagtgcaatggaaagagcgtggacttgagagtcagacttgacttcaactcctagctctaccacttaccacctaggtgacctcaagccactttctcagcctttctgagactctgtatcctcatgtgtatcctagagtttgtctgatagggctatagtgagaattaattgaattaagtatagtgagaattaagccaggtctggagaggcctggctactggtgagtgaggtaactgagatcaggtatggagaggactggctcctggtgagtgagttaattgagatgaggtatggagggacctgtctcctggtgactgagttaattgagatgaggtgtggagggacctggctcctggtgagtgagttaattgagatccattagggagggacctggctcctggcgagtgagttaattgacacccggtatggagggacctggctcctggcgagtgatttaattgagacccggtgtggagggacttggctcctggtgagtgagtgaattgagatgaggtatggagggacctgtctcctggtgagtgagttaattgagatgaggtgtggagggacctgtctcctggtgagtgagttaattgagatgaggtgtggagggacccggctcctggtgagtgagttaattgagactcggtgtggagggacttggctcctggtgagtgagtgaattgagatgaggtatggagggacctggctcctggtgagtgagtgaattgagatgaggtgtggagggacctgtctcctggtgagtgagttaattgagatgaggtatggagggacctgtctcctggtgagtgagttaattgagatcaggtatggagggacttggctcctggtgagtgagttaattgagactctgtgtggagggacctggctcctggtgagtgagttaattgagatgaggtatggagggacctggctcctggtgagtgagttaattgagatcaggtatggagggacctggctcctggtgagtgagttaattgagatgaggtgtggagggacctggctcctggtgagtgagttaattgagatgaggtatggagggacctggctcctggtgagtgagttaattgagatcaggtatggagggacctggctcctggtgagtgagttaattgagatgaggtatggagggacctggctcctggtgagtgagtgaattgagatcaggtatggagggacttggctcctggtgagtgagttaattgagactctgtgtggagggacctggctcctggtgagtgagttaattgagatgaggtatggagggacctggctgctggtgagtgaggtatggagggacctggctcctggtgagtgagttaattgaggtcaggtatggagggacctggctcctggtgagtgagttaattgagatcagttatggagggacctggctcctggtgagtgagttaattgagatgaggtatggagggacctggctcctggtgagtctcctggaggcagctgctatctgggaacacaggcacaggtgggaacagaccttcacttcctgctcacttaggttcagtgagttctccaaaccagcctcccaggaatgccattcaacatggctgtgaggagaataaagaagagagcctgactcctctcctgaggccccttccccaccctgagccagcaggatccacggagcagaggtcatctgtccccagcttggcccactgaggccagcatggctgggcccaggatgcttgtctctcagctcccatcctgtgtacttccacattggtttaaccagaggaaaaccgaaatctacaattgtcataaacacatttaaatgtgcgtagaatcagccatacaaattgtgaaacatacatttggctcatggtattattcactgttttgtggtggttacagtgactatagcaaacatttcttgaaagtagaaaataagaacccagcaccccttgagctaagtaatgtgccctctgtcctcaatattccttcctgggctccacattactgcccttaagtctggaaatattctggtctgagccccgtagtccaggcctcatgttcaggctttctgtccccagtgatgagaggagagacggcagacctgtctccggtgagctcagatgggcctcccggagtctcctggggtgcacaggatttcaaagatccaggaggcgctgccaggggctgtgaggtctgatgaacctctcaccttccctcccacacctgcccttttcctgtttctgtggatgcttttgctgtccttggcttcctggactccagacctcagggtcatcttttgcttctctctgcaaggtgccaagtctctctaggtttttgtttgtttgttttgttattgagacggagtctcactctattgcccaggctggagtgcagtggtgcgatctcagctcactgcaacttccgactccctggttcaagcaaattctcctgcctcagcctctggagtagctgggattacaggcgcccgccaccacgcctggctatttttttttttttctagtagagatagggtttcaccatgttggccaggctggtctcgatctcctgacctcatgatccacccgccttggcctcccaaagtgctgggattacaggagtgagccactgtgcccggccgtctctctagttttactttgcaatgtcgttcatatccatcccctttctagtgccactgctgaagtcctaagtcactgcctcctaactggtcctcctgccctaactcctccctgaccagtcctccagccctaagtctcctccctgacctgtcctcctgccctaactcctccctgaccggtcctcctgccctaactcctccctgaccggtcctcctgccctaactcctccctgaccgatcctcctgccctaactcctccctgacctgtcctactgccctaactcctccctgaccggtcctcctgccctaactcctccctgaccagtcctcctgccctaagtctcctccctgaccggtcctcctgccctaagtctcctccctgacctgtcctcctgccctaactcctccctgaccagtcctcctgccctaactcctccctgaccggtcctccagccctaactcctccctgaccagtcctcctgccctaagtctcctccctgaccggtcctcctgccctaactcctccctgaccggtcctcctgccctaactcctccctgaccggtcctccagccctaactcctccctgaccggtcctcctgccctaactcctccctgaccggtcctccagccctaactcctccctgaccagtcctcctcccctaactcctccctgacccgtcctcctgccctaactcctccctgacctgtcctccagccctaactcctccctgaccagtcctccagccctaactcctccctgaccggtcctactgccctaactcctccctgaccggtcctcctgccctaactcctccctgaccagtcctcctgccctaagtctcctccctgaccggtcctcctgccctaagtctcctccctgacctgtcctcctgccctaactcctccctgaccagtcctcctgccctaactcctccctgaccggtcctcctgccctaactcctccctgacgaatccccctgccctaagtctcctccctgaccggtcctcctgccctaactcctccctgaccggtcctcctgccctaactcctccctgaccagtcctcctgccctaagtctcctccctgaccggtcctcctgccctaactcctccctgaccggtcctcctgccctaactcctccctgaccaatccccctgccctaactcctccctgaccaatccccctgccctaactcctccctgaccggtcctcctcccctaactcctccctgacctgtcctcctgccctaactcctccctgaccggtcctccagccctaactcctccctgacccgtcctccagccctaactcctccctgacctgtcctcctgccctaagtctcctccctgaccagtcctcctgccctaagtctcctccctgaccggtcctcctgccctaagtctcctccctgaccggtcctcctgccctaagtctcctccctgaccagtcctcctgccctaactcctccctgaccggtcctccagccctaactcctccctgaccggtcctcctgccctaagtctcctccctgacccgtcctccagccctaactcctccctgaccggtcctcctgccctaagtctcctccctgaccggtcctcctgccctaagtctcctccctgaccggtcctcctgccctaagtctcctccctgaccagtactcctgccctaagtctcctccctgaccggtcctcctgccctaagtctcctccctgactggtcctcctgccctaagtctcctccctgactggtcctcctgccctaactcctccctgactggcctccatccaagcagagcttgagtattgctggttccctgctcaaacccaccactggttgctggttccctgctcaaacccaccactggcactggcttcccatcacatacagaataaaggctaaatgtctgtgcttggcacagaaagtcatcaacaggccccagagcacgtttctggtgttatcttctgctaatgccctgccctcactcctatgctgcagctgaatggaacgagccattatcccctcaggaacgctggcttctcagtaaacgattatagcccagaagctctgtcatcacagaacctagctattggctaatgggtcagctttggcttcatttctctgaataatttatttcaaaacataatcccaaggaacaaggttaggaaaaggggagggtgacagggacagagggagagcctatgcaaagacgtgttatccagttggcccctgctgtggctggctggttgctcaatcctgtaagatcttctaagaagctttatgagatgtagtgagaaccacctgtcctggggatgagtctgtctgtcggcttccattcctcatgggttatgagttgctccacaggattctggatgtatacagatgctcttcatcttaggaaggggttacgtcccaataaacacgtggtaagtcaaaaatactgtaagtcagaaacacatttaataccctgataagcccatcataaagtcaaacaattttaaatccaatcattgtaagccaggaccatctgtatacccaagacatacacaaggatgttcatagcagctttattcaaaatagtgaaaaacaaaacaatccaaatgcacagcaataggaaaacagacaaataaattgtggtatatttatacagtggaatactatgcaacaacaaaaaaggatgaagcataatactacacacagcgtgagtgagtctcacagacacagtgttaacagagagaatccagacacaaaagagcctatctatgcatgattccatttatatgaagttcaaagacatgcagagctaatctatggtgatagagataagaatggtggttacactgaaatgggaggatcgctcaaacccgggaggcggaggctgcagtgaaccatgatggagctgcactccagctttggagacagagcgagaccctgtctctaaaaaaaaaaaaaaaatgattgttccattctgtggtggcaagtgggggcttgactggaagggaacacaagggcacctgttgaggtgctgagcacgttctgtatcttgacctgagtgtcggatacatcctggggatacatacgtacataaaaattcatcagggtatacgctacttaagctgggcgtagtttacagtatgtaggttacaacataaaaaagaagtgaatgaaccaaagaatactgggctccctggcgtttcctcttctgcaacccaaggaaataagcctcggtgtggagagggcctgtcctcagggcctggcagatgtaggcgattcttaccacgtctccttcggtaagcccacctggcaagttctcatccacataatctgtgcatgctcaacatttgaaaccagtggggacccattcggaccccaagagttggtattagagatcattttaaagtgaaaactggccaggcacgatggcttacacctgtaatcccagcactttgggaggctgaggtgggcggatcacatgaggtcaggagttcgagaccaacttggccaacatggtgaaaccctgttgactcaggatgactcagattagagcaggtgactgggggtgactcaggatggagcaggtgatagaggctaggagggggttgtttactgaaactaggggcaaggagatgaagaaaacgaggaagttaaactttaaaatgaagagctgaacatactgatacattgattctttggagaggatctcagaactcattgtacttaacaatttacaggctaaaacctttgaagaagaatttattatatcctacaaacctgggaggcagaggttgcagtgagccaagattgggccatcgcactccagcctgggcaataagaatgaaactctgtctcaaaaaaaacaaaagttggccagggctgggcgtggtggctcacacctgtaatcccagcactttgggaggctaaagcaggtggatcacctgaggtcagaagtacgagaccatcgtggctaatatggtgaaaccccatctctactcaaaatacgaaaaaagaaaaaaaaaattagccaagcacggtggtgcacgcctgttatcccagctgcttaggaagctgaggcaggagaattgcctgatcccagaggcagaggttgcagtgaactgggattgtgccactgcactccagcctaggcgacagagcaagattctgtctcaaaaataaatacataaataaagttttagagcaggaatgaaaggaagtaaagtacacttggaagagctgtgttggcaactggagagatccgagtgcctcatctgacccttgacttgggattaatacattggcatgagatgtgagcagtgactcaaagttgctcagaaaaaaatcttcccccgctatttagtactgcagctggcacctgccctccccacgcactgcagctggcacctgccctccccacaccagtatttggtactgcagctggcacctgccctcccctctgctatttagtactgcagctggcacctgccctccacacagcagtatttagtactgcagctggcacctgccctccccacaccagtatttagtactgcagctggcacctgccctccccacaccagtatttagtactgcagctggcacctgccctccccacgtcagtgttcaggattctttctctctgtttttcttttttttccatagttttcacctttctataattcacttatttgttatgtttattgttttgtgaaaggaaaataaatcttgggcccccaaaatcactaagctaaaggggaaagtcaagccgggaatggcttagggccgacctgccccccattctattcaaaatcaccccctgctcactgagatagatgcatatctgattgccttctttggaaaggcccatcagaaactcaaaagaatgcgacctttgtctctcacccacctgtgacctggaagctttctcctggctgcgagttgtcccacatttgcttggcgttgcccggccttttccagactgaaccaatgttcatcttacatgtgttgattgatgtctcatgtctccctaaaacgtatgaccaccttggcacatgtcgtcaggacatcctgaggctgtgtcacgggtgtgcatcttcaaccttggaacaataaactttctaaattaactgagacctgtctcagatttggggggttcacattttggtaaccatggagggattctgagttgaggtacccctgacctttgacagatctattggtgcttggtagcaccatgagctaaccttatggctcaaaccaacaggacaatttgctgaggtctgggagcaccccctccatagagtccctgatctctcaaaacttggtcgtgatctaaagtttatttgatgtacaactccccctctccttcttttggagttttatttgcttccaagaaggaaggcaagatttcctgggtccgtgatgatggaaggctgacaactcttttatggagtttgagcttgctcccagcagggaagacaagttcgagtttttttcctgcttcaaggatggtagagagcagtcttcagcctgagacccatccctaggtaagtagctgaactgaggttttgtcttggctgaaggttaacaaccagctggtctgaatttcttcttcccattagagcagtctgtggtcatatcatttgacttttgttgttgttgttttttctggtctttctctcatcagatttgaccaactctacctgacttggtcaaatccaagtgagaattccaaattatgggtaacaaagcctctctaatttggctaaaattccttgcagctgcaaaagaggaaaaaactaaacgaaaacaacaaatcacgtgcttggtttctgtgtttgctttctgtcttaaaaaacaaacaaacaaaaacaacaaatgctctttcacttacttttcttcctccctatacctcctcctgcctttgccatctgcgggaccaaaaaaatctagagaaggcttccaatgactcgagcccctttaaaggatccggaacaaaggggccactcaccccttccagggtgctctgttttctttgtggagtttcaagagtgatgggcggattcttcttaggtctaaagctctgctgtcttcctgtacggcatgacctgacctctttggctttgggggaaccagagatgaccctgcactgtgagaggatttgaccttggcgtgtgtaatggcagacgagaactacaaagaaggggtggctgagcacagtttacagggaatggtcttggctgtttttttgtttttttttttttctcttctaggaagctgtgatttaaggatcctaattctagttcagagatgcatcctaaagggtcttctctattgctttttctcccaaaatgaatctcagtttgggttgtctatgtatttgcatgaggaactgaactgttgttgtcataggtaaatgagagattgagttttctcagctccaaagagaaagggcgtttgctcctcccagccgagtactccatagggttcatggcgcctctacttgccagagtttatgtaaagtggaagtaatatggtctttctgcacatttacattaaaaaaaaaggagccctgaggttgacctgcaaactgtagagttcctgagtcctcttttttctctagtttcttctctgcctgctttaaatttgctgttatttttctattaagataaaaaacactgtttggatcagatagtttttctgtttgtaaactggtgaatttgtatttatttcatggctaaatttctttttttcttttctttctcttttttttttttctttttttttttttgaggcagagtttcactcttgttgcccaggctggagtgcaatggcgtgatcttgggtcaccacagtctcctcttccctggttcaagtgattctcttgcctcagcctcccgagtagctgggattacaggcatgcaccaccatgcctggctaattttttgtatttttagtagagatggggtttctccatgttcgtcaggctggtctccaactcctgacctcaggtgatctgcccgcctcggcctcccaaggtgctgggattacaggcgtgagtcaccgcgcccagctttcatggctaaatttctgaagtaaaagctataggatctttgtgtgtgtgtatatatttaaaaggcctttataatttctataattttatgtttaattggcaattaaatctgttttaatttccctccagcacaccagactttttctctccatacgttatgatgtaaattttgctattcgattttcacctcagtttccttaaaatgcaaattcaaggctatttagctgacaaccgcttagagtagtaaaacaggttatcaagaattcgaaggtgtggctgggcacggtggctcacgtctgtaatcctagcatttgggaggctgagccgcaaagatctcttgaggtcaggagttcaaaaccatcttggccaacatgttgaaaccccgtctctactaaaaatacaaaaaaaattagccagatgtggtggcaggtgcctataatcccagctactcaggaagctgaggcaggagaatcacttgaagccaggaggcagagtttgcagtgagtcgagatcaagccattgcactccagcctgggcaacagagtgagactctgtctcaaaaaaaaaaaaaaaaaaagtaaaaaagaatttgaaggtgtaagaaaaaagctctttatgaatctataagatgaacttctttcagcatacctaatacatctgtgtatttatgtgttgttgtgtacacagtgttttgctactgaaaatatataaaagagctctaattaattggcttaagaaaataaaagcacttggctgggtgcagtggctcatgcctgtactcccagcactttgggaggctgaggtaggtagatcacctgaggtcaggagtttgagactagcctggccaacatggtgaaaccccatctctactaaaaatacaaaaattagcccgacgtggtggtgcgcgcctataatcccagctactccagaggctgaggcaggagaattgttggatcccgggaggaagaggtttcattgagctgagatctcattactgtacactccagcctgggtgacagagcaagactccatctcaaaaaaaaaaaaagaagctagtgattccatatcttcaaatcaaatttcagtggagtgtttaccgggcaaggaaggcaggggggtcagcttgctgacagcctcaacctgccagccctcagcctgcacatttgtgatcacctggtcacacacctgggcaggaggctgcccctcctccctggtttgaggaagcaggaaaaggtacccgcgagagacagccagcagttctgtggagcagcggtggccggctaggatgggctgtctctggggtctggctctgccccttttcttcttctgctgggaggttggggtctctgggagctctgcaggtaaggaggcctagaagggcctggtgggcctctcccctagtagggctctgggagtgaatttcagtatgagccacccttcatgggcaagggcaggctctctcgggttgattataatgaaccacagtgctacttgtgaagtgctattattgttgataaagagtgtgcaaatgacagtgtgagtgtaagcgtgcatggcgctgcagtacacactaatcaaccatgacgatgtgtgtgagtgtaagcgtgcctggcgctgcagtacacgctaatcaaccatgacgctgccatcgtaagggatggctgagagtttgtctttatgaacgtgggacagtaagtggggcacggagcgggggtgcagggaggtgccagctggtgatcattgtgcagaaagctgaagaatgtggcttaacaagattctgactcctcccagtttattacctagcatggatttccttcaaaatacagatttcgtgtgaaaagtccaactgccacaaactgcttgggaagggtggatgctgacaggcagggcttttgtgaaagacgggaatgaaccctgacctgtcgctaataggagttgtgccaaactcatcacatacattaaaaaatagaaaaggatttattttttttttagttctatgctccctctaaacctcgagtggagaggccgggcgtggtggctcacacctgtaatcccagcattttgggaggctgaggtgggtggatcacctgaggtcaggagttcgagaccagcctgaccaacatggagaaaccccgtctctactaaaaatacaaaattagccgggggtggtagcaggtgcctgtaatcccagctactcgggaggctgaggcaggagaattgcttgaacctgggaggtggagtttgcagtgagctgagatcgcacccttgcgctctggcctgggcaacaaaagtgaaactatgtttcaaaaaaaaaaaagctgcagtggagagtctggagttcccatccccaccactcacagcctcccccatcatcagcgtcccccaccagagtggcacatttgataggactgaggaacctactttgatgcatcattatcatacattgtatttttaatcctcacaacggccctgcaagatcggccctgtttttaccaccccccacctccactgctttaagggtgaggccactgtgcttctgggcatccagtaacaactcctcggagccagaatctgactcctcacaggcctgagcactgcaccccgtggcctcctgcctgtgctcaccgtggcctggtctgcgctgcacgtgtcccgttagctccaccttacaggtgcggaaatgcaggcttggagctgagagacttggccagggtcacagggcagagagcagattctccaactcagggtcccaagtccacacgctttcctctccaccagatttgaagattgtaccaggagagccgcagtgttccagagctactgaggggctgggctgggatttgctgtattcgagaagacccccttggacccgagaggctgtgggcttggggagcatgaggaggtttcacagcagaaaggacaccccggggctcctggataagccagaaaatgtgccaggggaagtcgggctccaagggcaccactctgggcttccagctgtgtgggctggaccaagaaggctcaaagaaatgatctcaggcttgaagtggggagaagaaactgtattatgaaggcagacgaacagttcctgcaaaagtgagatttgtgtgtgcagctgggccgcactggaccagggatgagagtgggtgcccgggactcgcctatactgcctgggggtgcagcccgcactcctcactatagtcagatcaactatgcgtgctttccagtggcctgggagaggactccatagggagggatgcttaccttgtgggctttggaatataagccctttcaccttctccgctggtcctcatcacgttggcaaggcaggtattgtgaccctgttttctcaggtgaggacatggaggctgggaggggtctagagactggcctggctagtaggaggctgagtcaggatttgaaccagcagatcatctgaccccggagccagtcgtgggcggcacagcgggagctgcaaccgaggctcttgactcctgcgtcgtcattccctgaggtccacaggacaaccagttggggacctggggccccatcctgatgccctggggagaggtgctaggccccttttgggtctatgggctacttttgggccagtggagctgggtaaagaccatctcaaaccctgtgccaggggaggtcagactccaagagcgccacctttgggcttccagctgtgtaggctggaccaagaaggctcagagaattagggggttcgtatttgatccttttccttccaagactgggattaccagataaaacacagggcatccagttacatttgaatttcaggtaacaattttttttaagtgtaagtatgtagccaatattgcatgagaaatactcatgctaaaaagttattcgtcgtttatctgaaatgcaagttcaaatttaaccgagtaccctgtatttttatttgctaaatctagaaaccctctccaagaggctccttggcccactcacagggagagcccgatctccctctagacaggggaggccccctttctcaggccagaaaagatcttgtagtaaactactcaagaggctgaggcaggaggatcgcttgagcccaggaattcaagacctgcctgggcaacagagcaagaccctgtctctagggaagatatcctaccgtagcctccctcggggactcccattcctcccacctcagggccagtcaagggaacaggcctctgctctgggcagaagtgctggcagccgctctctgaaaagctaggtgttgcctcagggtctcccggtgtcctgtggaaaatgcctggccacggtttccatggttcccaggctccaaccctgcagttctcagccctcattcaggaggggcctcggcagggtggggggtgccgtctttcccttgctggagccccaaggactctgccggctccctcgctttggcagcagcactgcccaccctgtctctggaggttcccccgcctcaatccacccagctaccccgaaaggcacaatcataggcctttctcgtcttttaagggtttttacttccatggggaactatgtgttggatgagaaaagtatccggggaaggggacagaggttcagaaagctctgcgagtcctggacgctggtctgccttcttggctcaccctggaaggtggacgctggccccacacatcccctcttaaagacgcaggccgatagccagcagatcctggggcttgctggccccaagtgagttgtcagggtttcagaggacaccagtcatggcaaccccagctccatggctgccacacaggcctgggcttcccaggactgcctccttcttgttcgcttatgtagatgaaaaatgaggtaacggcactcccctgccccaccctcctcccagaagtgcccagggtgtaaacgcaatagcttgtgtgaagtccactggaacccaggctcaccaagtcagtcttaaccaacacaggccccagcacccgcagagcagacactgcgatgacaacggacgacacagaagtgcccgctatgactctagcaccgggccacgccgctctggaaactcaaacgctgagcgctgagacctcttctagggcctcaaccccagccggccccattccagaagcagagaccaggggagccaagagaatttcccctgcaagagagaccaggagtttcacaaaaacatctcccaacttcatggtgctgatcgccacctccgtggagacatcagccgccagtggcagccccgagggagctggaatgaccacagttcagaccatcacaggcagtgatcccagggaagccatctttgacaccctttgcaccgatgacagctctgaagaggcaaagacactcacaatggacatattgacattggctcacacctccacagaagctaagggcctgtcctcagagagcagcgcctcttccgacagcccccatccagtcatcaccccgtcacgggcctcagagagcagcgcctcttccgacggcccccatccagtcatcaccccgtcacgggcctcagagagcagcgcctcttccgacggcccccatccagtcatcaccccgtcacgggcctcagagagcagcgcctcttccgacggcccccatccagtcatcaccccgtcacgggcctcagagagcagcgcctcttccgacggcccccatccagtcatcaccccgtcacgggcctcagagagcagcgcctcttccgacggcccccatccagtcatcaccccgtcacgggcctcagagagcagcgcctcttccgacggcccccatccagtcatcaccccgtcacgggcctcagagagcagcgcctcttccgacggcccccatccagtcatcaccccgtcacgggcctcagagagcagcgcctcttccgacggcccccatccagtcatcaccccgtcacgggcctcagagagcagcgcctcttccgacggcctccatccagtcatcaccccgtcacgggcctcagagagcagcgcctcttccgacggcccccatccagtcatcaccccgtcacgggcctcagagagcagcgcctcttccgacggcccccatccagtcatcaccccctcatggtccccgggatctgacgtcactctcctcgctgaagccctggtgactgtcacaaacatcgaggttattaattgcagcatcacagaaatagaaacaacgacttccagcatccctggggcctcagacacagatctcatccccacggaaggggtgaaggcctcgtccacctccgatccaccagctctgcctgactccactgaagcaaaaccacacatcactgaggtcacagcctctgccgagaccctgtccacagccggcaccacagagtcagctgcacctgatgccacggttgggaccccactccccactaacagcgccacagaaagagaagtgacagcacccggggccacgaccctcagtggagctctggtcacagttagcaggaatccccttgaagaaacctcagccctctctgttgagacaccaagttacgtcaaagtctcaggagcagctccggtctccatagaggctgggtcagcagtgggcaaaacaacttcctttgctgggagctctgcttcctcctacagcccctcggaagccgccctcaagaacttcaccccttcagagacaccgaccatggacatcgcaaccaaggggcccttccccaccagcagggaccctcttccttctgtccctccgactacaaccaacagcagccgagggacgaacagcaccttagccaagatcacaacctcagcgaagaccacgatgaagcccccaacagccacgcccacgactgcccggacgaggccgaccacagacgtgagtgcaggtaagtggctcctgctggtgatcttcggggatttgggatgcggagtttccaggacgtctccgcacttgaggagtggagaggagggaaggatctggagcctactcagagcctgctcctgatgttgcctcttcgtgatcttctagtggttcttggcgaaatcaggaaaaggcagatggagggttgtgtatggaaaggggtggggatggaagtccggagaaatggtttgcggtctcggctctgcctgtaacaacccgagtgaccttgggcaagtccctgtccctctctgggcctcagtttctccacctgtatttggagagggttggaatgggcactgaagtcctgtccagctctgaccttctgtgaagtgcactgttgagcagctctggaagcttctattccagccatagccacacagaggagcagcaggcaggcatcaggcccaagctgctgctctctgacaggctgggaccccatgaaagtggggcctgctggatgcatttcctgggatttatgccatagatagtgacttaaaataaattaatacaggcctggagcggtggcttatgcctgtaatcccagcactttgggaggcagaggccggcggatcacctgaggtcaggagttcgagaccaggctgaccaacatggtgaaaccccatctctactaaaaatatgaaaattagctgggcgcagtggtgggcgcctgtaatcccagctacttgggagactgaggcaggagaatcacttgaacccgggaggtggaggttacagtgagctgagacggagtgaaactccgtctcaaaaaaaaaaggtaagataaaataagcaaatacagcgaaggcttgggagtttaaagctacatctctgaggcaacagggacttctcaggggagaagttcattgtcagaggctgcttggtcagtccagcttctggtcagcctgtagcctccacctccacttcctgtcactctgcccttgggcctcatctctgtgtatccgcagcttgttaccacctttctgggggaggtgggaatacaaatattaatcacaaccactcaatacataaagatattattgaatatctttcatgttataggcaggggtgatataaacatgtttcacacccagtaagcactggccccagcagaacgttctctccggtgccaggcagtgtgccaccagctttgcatatgttatctgatgccaggcagtgtgccaccggctttgtatatgttatctgatgccaggcagtgtgccaccggctttgcatatgttatctgatgccaggcagtgtaccaccagctttgcatatgttatctgatgccaggcagtgtaccaccggctttgcatatgttatctgatgccaggcagtgtgccaccagctttgcatatgttatgatgccaggcagtgtgccaccagctttgcatatgttatctcctctatttaaccttcaaaacagccttaggaggtgggtaacacgaccccatctgacagggttaaagatggtagctaaactgctctggaaagtgaaggggtggcctgcccctccacacctgtgggtatttctagtcgggtgggatgagagactgagaaaagaaataaggcacagagacaaagtatagagaaacaacagtgggcccaggggaccgtcgctcagcataccaaggacctgcaccggcaccagtctctgagttttctcagtttttattgattattattttcattattttagcaaaaaggaatgtagtaggagagcagggtgataataaggagaaggtcagcaagaaacatgtgagcaaaagaatctgtgtcataattaagttcaagggaagatactatgcctggatgtgcacgtaggccagatttatgtttctctccacccaaacatctcagcagagtaaagaataataaagcagcattgctgcaaacatgtctcacctcccgccacagggtggtttttctcctgtctcagaattgaacaaatgtacaatcgggttttatactgagacattcagttcccaggggcaggcaggagacagtggccttcctctatctcaactgcaagaggagatcctcttttactaatccacctcagcacagaccctttacgggtgtcagcctgggggacggtcaggtctttgtcatcccacaaggccatatttcagactatacatggggagaaagcttggacaataacctgctttcaagggcagaggtccctgcggctttccacagtgcattgtgcccctggtttattgagactagagaatggcgatgacttctaccaagtatactgcttgtaaacattttgttaacaaggcacgtcctgcacagccctagatcccttaaaccttgattttatacaacacatgtttttatgagctcaaggttggggcaaagttacaaattaacaacatctcagcaaagcttgtttaaagtacaggtctttttcaaaatggagtctcatgtctttcctttctacagagacacagtgacagtctgatcgctccttcttttccctggaaagaaaaatactttattatttgttgattagataagacattcatatgatttgaaatggaaaggtacgaaaaggttcaccataaaatgcctttctcccctggctgtgcccccacccagttctctccacacatgtaacccgtgagattgtctcttgtgtgtaattttctgcacatgaaatgtacatacggaagcaaatatatgtgactatttcatcctcctctttttttttttttttttttttgagacagtttcgctcttgttgcccaggttggagtgtagtgctgcgatctcagatcaccacaacctccgcctcccaggttcaggcgattctcctgcctcagcctcctgagtagctgggattacaggcacgcaccaccatgcccggctcattttgtgtttttagtaaagacgggatttctccatgttggtcaggctggtctcaaactcccgatctcaggtgatccacctgcctctgcctcccaaagtgctgggatgacaggtgtgagccactgcgcccagccctgattttcatcttactgttctccatttgcaggtgaaaatggaggtttcctcctcctgcggctgagtgtggcttccccggaagacctcactgaccccagagtggcagaaaggctgatgcagcaggtgagtgggcactttccgggccaggggagtagaggaaggggcgaggttcgcaggggctgcagggaagacccgcaggacacagaagagcagctaccgcgcttggaagggagtctcgtttcttacggagaattgggagctgaatctgaggatctctgcctggctttgcttctgcctgccttctccgagttcttcatttccttctctgcaatgtaaacatgtgactcctagagcccccagtttcttctggtccttggaagcttggccttctggcctctgaggcaaaggtcagtgatactgatgggagggtaggtcggactcttggttgcaagtggcagaaacccaagtcagggcagtttatgcaaaaaaaaaaaaaaaaaaaaaaaggcaaggtctgagaaacctacaagtgtctcttcagcttcagtacggctggatccagcagctccagcgccatcacagggactttctctttctttccctgtcttagctttactcccttcattcttcagagtctttcttcatgtgtatgaaaaggcagccttgttagccatagattcacaagggacttccatctccccacattttcttttcttttttctttttctttctttctttttgttttttgagacgaagtctcgctctgtcgcccaggctggagtgcagtggtgcgatctcagctcactgcaagctccgcctcctgggttcacgccattctcctgcctcagcctcccaagtagctgggactacaggcgcccgccaccacgcccaactaatttttatgtttttttttttagtagagacggggtttcaccgtgttagccagaatagtctcaatctcctgacctcgtgatccacccgtcttggcctcccaaagtgctgggattacagacatgagccaccgcacccggccccctctccccaaattttcatgtcatctggggaagtgcaggtctccatggcctgcaagggtcaccatgactgacaacccagtcaggatcccatagaggaaggatgagccccaagaaaatagggaggctaggcagaaaaaaccgcagagatgtatactctagatgaggaccatgattgggatgtatttgtacaagttgggaaaattctcctaaaacccactggatagaacttccaatggtaaagttccggggtcagggttttgaggatggggatggtgtggcttgttggaggttagactgggtcagctcagtgcagatgtcacgggcctggcctcactgaggggtgggttgttctcctaatgtgtggtacaaagtagcagatggggcatgatgggaagtgtctaagctctgctcacagatgtaaccgtgaaaacaggcccagtgcacagtctaatgtggattgcctctttgacagtgcccttgctaatacctgaagcttgcattcagcacctctcacagtcaatgggacagtgcccttgctaatacctgaagcttgcattcagcacctctcacagtcaatgggtgccacactgctgaaaagtggctcaggcttcctgtcatcccttgcaagggtaaacctggcagagatgctggctgggggtcttatgccaggtgtagagttcatagccaggctggacaggtggaatgattgcccttagcagagggaagcaagatatgtccgtggagagtgggatcctttgttgcaggcgaaagaaaacctctgtctgtcgtaagtaaaagggggatttgttggcagcgtcccagagtgcatagaatcaaagcaatgccaggacagcaggcttggaaaataggcaggagggcccccaggagctctgaggtccagacagtgggatcaggctggctgggacactgtccctcttgctggtcagtcactattggatgctgccacagccaaggggcatcacgtggcctgcacacacattcacataggttctcgctgcctttttgtctcactggactttttgctccagagccaaagtcctgagtaggaacatttgataggctgagcttagcccttgtactcccatgagcccacagccaggtgccaggggacgggaagaagggatgtctgtgtccttggagttctcttagcagcagtgaggccaatcgtgactcccactgtgaggagttccctaaacatggcacgggggctcgacacccgatggccaaataagtgacaaatgcccccggcatgtgataatcaaagtagcgagtgtgaatccttgtgggagagggaagccaattgcttttgttttgttttgttttgttttgttttgttttgttttgttttctgagactgagtctcactctgtcatccaagctggagtgcagtggtgcgatcttggctcaccacaacctccgcctcccaggttcaagccattctcctgcctcaaccttctgagtagctgggattacaggcccgcaccaccatacctggctaatttttgtatttttagtagagatggagtttcaggtttcagcatcttggccaggctagtcttgaactcttgacctcatgatccacccacctcagcctcccaaagtgctgggattacaggcgttgagtcattgcgtccggctgggaagccagttttctttttctttttctttttctttctctttttcttttcttttcttttatttttcttgagacagattctcgctctgtcgtccaggctggagtgcaatggcacgatctcggctcactgcaacctccacctcccggattcaagcaattctcctgcctcaacctccctagtagctgggattacaggtgcacactaccactcctggctaatttttgtatttttagtagagatggggtttctccatgttggtcaggctggtctcgaactcctgacctcaggtgacccacctgcctctgcttcccaaagcactgggattattggcgtgagccaccgcacccggccgggaagccagttttgaatctcaggtctaagcccccaaaccagaaatgatttcaggaatcggaaagaaaccgcgagatcaggagcaggtcaagcagctgaggcgcaggcaccaggccacatggggttgggcatcagttctcgtccggggacagcccaacagtttgggctcggggattagacaatgagcttaggaaccagctagatctgggtgtgaattctagttcccaactgtgtgatcttggataagttattctatgcgactttcatcccttataaaatgaggatcctaacacctgctttataaggttgctgtgaggtttagatgacataatgtgtgtgaggcaccagcctgtgtccagcatgtaggaggcccaggaagggttgccgtcctccgcatgcactctgccccagtgtcccttcctgtcctctgcctctggcgagctcatgggccagatgggctgaaaggacagctggctcttttgctctccagctccaccgggaactccacgcccacgcgcctcacttccaggtctccttactgcgtgtcaggagaggctaacggacatcagctgcagccaggcatgtcccgtatgccaaaagagggtgctgcccctagcctgggcccccaccgacagactgcagctgcgttactgtgctgagaggtacccagaaggttcccatgaagggcagcatgtccaagcccctgaccccagatgtggcaacaggaccctcgctcacatccaccggagtgtatgtgtggggaggggcttcacctgttcccagaggtgtccttggactcaccttggcacatgttctgtgtttcagtaaagagagacctgatcacccatctgtgtgcttccatcctgcattaaaattcactcagtgtggcccagaggctgtctattgatctgcatgctttcgccatttttatagtacagggattgtgtatagtctcactgctacctcctccttctactcccccaggtcttggtttggactttgatgatagcatttactgagacgggcctggagcctgtcgaacagcccgctgcagcagggcagggaccacctttgttcatctcagtatcccctgaactagcagagtgtctggcctgcagtgggatcgcagagaatgtggaattgacctaaatttaaatttcaagttctggacacaagcctcaattattcctcttatatgttataacttacatgctattatttttttaaaaaattaatatggtttactttttattataaaagtaaaacttggccaggctcagtggctcacgcctgtaatcccagcactttgggaggccgaggccggtggatcacgaggtcaggagtttgagactagcctggccaacatggtgaaaccccgtctctactaaaaacacgaaaattagctgggtgtggtggcaggtgcctgtaatcccagctacccaggaggctgagacgggagaatcacttgaacccgggaggcagaggttgcagtgacccaagatcctaccactgcaccccagcctgggcaaaagggcaagactctgtctcataaataaataaatttaaaataaaagtaaaacttgtttatgatttcaaaattttgaaatattccaaagaccaagcaaagtaagaagtgggaagaggagaaagaaaaacttttctataatcccacctcttagatacaacgatttattttttaaaattgagacagggtctcactctcacccaaactgcagtgcagtggtgcgaccatggctcactgcagcctccacctcccagctccagtgatcctcccacctcagcctcctgaggagctgggaccacagctggctaatttttgtactttgttttgtaaaaaaggggctttaccatgttgagcaggttggtctcgatcttctgagctcaagcagtcctcctgcctcagactcgcaaagtgctgggattacagacatgagccactgtgcccagccttatatacagctattattattaatgtatactgtgtattcatttcaattcttaatctctccacttggatgttgatgaaatacatacctcacattcaacatttctttctttttttttttctttttgagatggaaaggagcctggctctgtcacccaggctggagtgcagtggcgtgatctcagctcactgcaagctccacctcttgggttcacgtgattctcctgcctcagcctcctgagtatctgggactacaggtgccaccaccatgctcggctaattttttgaatttttagtagagacggagtttcaccgtgtcagccagcctggtctcaaactcctgacctcaagtgatccacccacctcggcctcccaaagtgctgggattccagttaatgagcactgctcctggcctccacatttctaaaatcgaagttctgatcttttcctctggacctgccccacctgcatcttccccatctcagttaacgtcagttgcatccttcaggtgctcaggccgaaatcctcggcaccgtctttattcccctctcacattttgcaccaggaaattctgctggctctaaggccatcaaactgtgcccagaatgtggcccctcctcagcatctccagtgctaccaccgagatggtccacgatgccatcatctctcacctgcactactacaggtctccctgtttccagctcagcccccaccccagtctagtcccagtgtgtcagccagggctgtctttttacaacataaggcagaccacaccacttctttgctccaatcctcccatttcactcagaagaaaagctccgacaacagctgcaaagccgtgcacgacctgcgcccctcccctgcctccttaatttgctgactgcaccgcagccacacggacgtctttcttgtcccttgaatgcgctgggcctgctcttgccttgggacctttctgtgcattgcttagtctgctcagaagccttctcctctacatatccacttgtctaaaccctctacctccaccttcatgccccttctcagcgaggtctaccatgaccatgctgcctacaaattcagtctccccttctgtactttgacgtactttatagtgctgatcacaattgaacgtcatacatattttgttttctttattatctgagtcctccaactagaatgaaagattttgcccattatggtttccctagtgccaagaacagtacctggcacataccaggggctcagtaaacatttgttagatgaatgaaggaaacaaggagacaatgttgatgctgctgtgagcaaggggagtctgaacgtttgacagatcccttccatttctggagtggggcagaatgagtttcataaagtagctcggacaaaaataattcgctcatcttggcatatatgttgggcagctgccgcagaagagagactgagctatgtgccgtggaggattcaaatctgtctcttctcccagggattgaagttagacacgtacagcaataataagttgaaagaacttatttacaccgcatatagcaacaacaggatgcccttaatatatagagaactcttacagcgcaagaaaataaaaaggcaaacataccagtagaaaaatgggtaaatggcaacaggtaattcacaaaagaagaaatacaaatgtcctctcctcccgccaccaccccccatgaaaaagaacgtgtgacttcagtagcaaaaacaggtccattaatacagtgagatattgcttattgtatgtctgtactgatctatactgggtgctgggcaaacgggcattcttaaacactcctagtagggaagaaattggtacaacctttccggaggacaatttaactgatttatttaaagcccgaaaaatgtacatacctttaactcagcagtttcgttactgatttatcttaaggaagtaatttagaatctgtgcctaactgtttacaataactcatagatgaaaaaggcaaaacaaaacacaagtaacctcaaatctccccatgtaacagtttgcttaaacactatagcgttattttacgcaagctacagaagcattgttgaaacatatatttattaggacagaaaaaaattcatgaaatgttattttatcttcttttttcttaaaatggaacttaaaaaaaatttttttaactccaacctaccttttacaccatctgcagagctttcctctcccaaatcaaagctactcctgttcctacctccaggatggaatccccaccttcgtatgcaagggtcttcatgatatggcctcagccaactatcttagctccaggtcacggccccatcttccatatcctatgctgcttgcacaggaagcagctcgctaaccccaggcacacctgctttcatctggagcgtctgcccatcatgattcctccccctggtcccttcacctggaaaactcctattcattcctcaaagcccagttcagatggcacctctccatgacttcatcagattccctacagaggtgctgattttctggtctcttgtgtttctgttgtaacacttaacatgctgtattataatgtgcttattttatttacaagtttgttacattgtacgtgctcgaggacaagcagccggtagtattcacctctgtcatcacagaagctggcgtggagccctccacatgagggcactgatgtgtttgctgagtgactgggacaatggtgggccacgtgagccccgaaactttcagtgggctctgaaagttaagaaaagggcattcagtactgaaatcacacaaaacgtaaatttaatgatataattgttccgaagctgctctataatttggcatgaatggagagcagtttacaaaaatgacaacaccactgttatataaacccaattcttaaataggttttcttctcttgctttgtatttcctcaagtgggtgatacttaatacagtggctcatgtaatcttaattactacatatgaggacacggacatgtacatatgatgctgattactgttatttttggaagtaaaaaaattgtaaaatttgactagcttaaaaaatctgtaaaatatgggatacacaaattagagactgggtgcggtggctcatgcctgtaatcccagcactttgagaggccgaggcaggcggatcacttgaggccaggagtttgagaccaacccaggcaacatggtgaaatcctgtctctactaaaaatacacaaattagctgggcatagtggcaggtgcctgtaatcccaactactcaaaagggtgaggcaggagaatcacttgaacctgggaggcggaggttgcagtgagctgagattgcgtcactgcactccagcctggtgacagagcgagaccgtgtctcaaaacgtcaacaagaacaacacaaattagaagcatttgggaactaaaatgtatcattatgattgcatgtgggtgggttggggggggacaataaagaggaagagagactgtgtgtgtgtgtgtgtgtgtgtgtgcacgcctgtattactggagatgaccaaagttagcaggagtaatgttaccaagctaacaggagccagaagtccctggagaaaactctccagctatttaagattctaaagtgtgtgtatatgaggtaaaaatgccacgttttataaagacaaatttaagcatggacctaaacaagatggcctgtctaaagtcacctgtgacttggtgtgagctctgagacggcgaaactccacagcaatgatgaagacaacgtgaggtggaacttctctgaccagagacctcatctgaagcttctgccacagccagtcctgccttcatcccttgagagggggattggccaccaaagtatgcaaagcatttgaatggaaacgaattccgtgggtgcgccccacactttaatagtggccatcatatcactttctggtgccagtaaatgcgtaaaggggtgcatcatgccagtgacctatcactcatcatcccagtcattaagccacttacttcaggcctgtggggagtttctggaaggctcctttgaagcagggaagaatgggcaagggagtctgtgtctttggccaagctttgccccagatagctccttttgccactctcgagcccactgaaggtgtcccagctgctgccaccagcaggggtcgggggtctgcacccttctctcttccaagcaaactcacacctggcaccctggggaagggtcagtcagttattttattccaggggccaaagcgacagaatccagaccacttgtagccagggaatgagctgacgaaaatggatggttgtgtccttgtccttctgactgtcccactcgtgaaggggcagctccctgtccagctagagaagggtgtccccaggtgccctctcctttcttgggacgcctcctcctcccgtgctgtcagggcctcagcggctttgactgggctcaccaagaaaacacagaacagccacttaaatgagaacctcggataaacggtgaacacttaaaaatatacaagaatgttccaaatagttcatgggatatctttaaactaaaacaattatttgtggttaatctgaaatttaagctgggctgcttgtattttcatttgctaaattggacagccctactttcattattattattattattattattgagacccagtctcactctgtcacccaggctggagtgcagtggtgccatctcggctcactgcaagctccgcctcctggtttcaagggattctcctgtctcagcctcccaagtagctgggattacaggtgtgcgccaccacgcccagctaatttgttatatttttggtagaaacagggtttcaccatgttggtcaggctggtcttgaactcctgacctcaggtgacttgcctgcctcggcctcccaaagtgctgggattacaggtgtgagccaccacacctggcccagacagccctacttttaatgcatcctctcccacgagggtccctggctcctctcttccgtccaatctgcgggtctccttcaggggtagcaagctcccagccttctcccaggtattgggcctctcctctgcctcgggaggagctgtccatcaaacacaggctctgtcctcccgctccctccattgcttagtgtgtgaaggtggacaggggaggagggaccttgggtttggggcggttctgctccccactcgctgctttgcttttgctctttctggtttcctttctccgcagttgatgacacagggcacccacagcgctcacgtgccttccatggtgggggtgaatcctttgccaatagtgcctggtgggtttcaggtaagttgtaacttttggaccttctgctgtctctgactttgagtcacatgacaaggtcctcatggaattgggattctggcagccaggtgagggcggtctcaccagctccttcatgcctgcaggcctcccccttcctcacaactgatggatggttggctccctagccgccccgttagtgccatgtgtgcttaattcttttaaaaatttaaatatattaattttaaaatcatcttttaaataataaaatttgctttttagagcagttttgggtttacagcaaaattttcctgagtggaaaatacagaaagttcccatatgccccctgccacacacacatatacctacgcccagcctcccccaccaccaacgccctgcaccaggtggcacgtgtgacagtcgatgcgtccacgtcaacatatcctcatcaaagtccagagttgacagcacatttttggcgttggatattctccattctctattcaacaacgtatcggctggcccggcgcagtggctcatgcctgtaatctcagcactttgggaggtggaggcgggtggatctctttgagatcaggagttcgagaccagcctggccaacacggcgaaaacccatctctactaaaaatacaaaaattagccgggtgtggtggcgcatgcctgtagtcttagctacatggaaggctgaggcaggagaatcgcttgaacccgggaggtggaggttgcagtgagcagagatcgcaccactgcactccattctgggcgacagagtgagactcaatctcaaaaaataacataaatgtttctgccattgtagcatcatacagaaaaataagtagtttcagtgccctaaaaatcctctgtgcttcacttattcatccccaacccctggcaaccactgatcttttcactgtctccatagttttaccttttccagaatgtcatataattgcaaccgtaaggtaaatagccttttcagattgtcttctttcacatagtatatgcatttaagttttctgtatgtattttcatggctgtgtaattcatttcattttagcactgaataatattccatcgtctgaatgcaccataggttatttacccgttcacctgctgaaggacatcttggttgcttccaagttttggcaattatgaataaagctgctataaattatgaataaagctgctataaacctcca

SEQ ID NO: 356 - DNA, 160039 bp, Homo sapiens
gaaggcaagtcccctgcgcgcggggcacggcgggagtaagagtctgcgggaccggcagctgtacttcatctcccagcgggccgagcgctgaaggcagcggcgcggcgcctttgtggtagcagtggccccgcgcggaggaagttccggtgtccgcggcgctgggtcggtggcggaggctgaggagaaggaggagcgggccgtggaggcttcgccgcctaggtaagggcccgggactggaggggaggcgtgccagagcctgccagggaatagccagcagacaggcccgctctagacatcgcaggcccgcgcagcctgaaagctgtggcttcagtgtcgcggggcggctgcggcctcgctcgggaagaagaccaagcaacggtgagatgagggaggcgccgcccgtggcaggaacgccccggaaccgtcgcgggcctggggcggggcccggcgcggcagtagattaccggtcccgccgcggagcggccagctgtgaggctggggccggcgcgtggttgcggctctgtgctcctactcttcggagctgtaagcgggctgttcttgcggttttcctgtttcagatccaattctgtggcatcactaggaagggagctcttgtgcttagcacgtagcctcgtcctcagacttggacagacacaagggaggctccgctggaccggagggcacaagagctccgagcccggtcgtcggggcggtagaacctggaagcgggagagtggtctggtgggttctgcgcccgttaggcaatgaaggagaaggatgttttatcgtattcacgctttagattccattagcggtgtaaatagatgtttttctctttattttagaattgacgttaggcgaatgggttcaactttgggaatgccttttttttttttttttttttgaaggaagggccctgtttcgtagggtacataaaccgtgagcgtaattgtattttttgcatattccaggtttgcttgtgaaggtcagagtagccggatttaagtgaaggagttcagtagacatgcagacatggtcacctggttcattttctgaaccctggattgtgccctcggcttgctagtttccaccttcctattgagaaatgccaccagcgtgaatgatttaaatatgtcaccattactgaatttgtgaggtctctaacgagaggtgtcaagagctggtgcgtgatggtaggactggcagtgaagaaagtaactaaataatatgttaccattttggtgaaacacaaaagttgaatttgaaccttgtctcagaaactagcatctaactagatacctaacctgcaggacaggtcccaggtctctctggatagttgtagcacctttccttatagaattctattaccaggccgagcctggtggctcacacctgtaatcccagcactttgggaggctgaggtggggagttcgagaccagcctgactaacatggagaaaccgcgtctctactaaaagtacaaaattagccgggcatggtggcacatgcctgtaatcccagctacttgggaggctgaggcaggagaatcgcttgaacctgggaggcggaggttgcggtgagctgagattgctccattgcactccagcctgggccacaagagtgaaactctgtctcaaaaaaaaaaaaaaaaaaaaaaaaaaaaaacccgcaaaactcaacaaaaaccaacatagtagaggcagcgtttcgccttatgcccagctaattttttgtatttttttagtagaggcggagtttcgctatgttggccaggctggtcttgaactactgacctcaggtgatccacctgccttggcctcccaaagtgctgggattacaggcgtgagccaccgtgcccggccctgttatagtatttctaaaacaaattgtgagcctgggcaacatcgcaaaaccctgtctctacaaaaaatacaaaaaaaaaaaattagccaggcgtggtggcatgctcctgttagccctaactactcaggaggctgagatggaaaaatcgcttgagccggggaggtagaggttgtagtaaggggagatagtgccactgcactccaacctgggccacagaacaagactgtctcaaaaaaaaaaaaatcaattaaataaattgtggtaaatatatatttttatgtatgtttatgtatattttaacaaaatttgctctttaaaccattgttaagtatacaattcagccaggcacggtggctcacgcctgtaatcccagcactttgggacgccgaggtgggcggatcacgaggtcaggagatcgagaccatcctggctaacacggtgaaaccccatctctactaaaaatacaaaaaatgagccgtgcgtggtggtgggcgcctgtagtcccaggtactcaggaggctgaggcaggagaatggtgtgaacccgagaggcggagcttgcagtgagccgagattgcgccactgcactccagcctgggcaacagagcgagactccgagactccatctcaaaaaaaaaaaaaaaaagtatacaattcaatggtattaattacattcacaatgtagtacaagcaataccactatttctgaaactttagtatctcaaacagaaactctgtaaccagggagggcatggtggctcacgcctgtaatcccagcactttgggaggtcaacgtgggcagatcacttgagttcaggagttcaagaacagcctggccaacatggtgaaaccccgtatctactaaaaatacaaaaattagccatgcatggtggcatgcatctgtaacaccagctactaaggaggcagaggttgcagtgagctgaggtcatgccattgcacttcagcctgggctgcacagccagactccatctcaaaaaaaaagaaaaaaagaaactgtaaccattaaacaagttaacttcccatttcctcctcttaatctctaatctactttgtgtctgtctgtgagtgtgcttgttctaggtactgcaaatactaaatggaatcatacagtattgtccttttttgtgtctggtttatttcacttagtgtaatggtttcaaggttgatccatgttgtactgtgtatcagaatttcattcctttttaaggcttaatccgttgtgtgtgtacactacattttgtttattaattcatttgtagcagacacttgggttgcttctgccttttgactattgtaaataatgatgctgtgatcattggtgtacaaatatctctttgagtccctgctttgaattcttttgggtatatacccagaagggaaattgctatatggtaattattattattattaattattttatttatttttttttgagacagggtcttgctctgttgcccaggctggagttcagtggcacagtcatggctcactgcagcctcgaactcgagctcaagcagtcatcccgcctcagcttcctgagtagctgggactacaggcatgggctgccacaaccagctaatttttttgtttaatttttattttttgtgatgaagtcttgccttgttgtctagggtggtctcgaactcctgagttcaagtgatcctcctgtcttggcctcccgaagtgctggcattacaggcatgagccaccacatctggcccataatttttttattttaatttttttgtggagacagggtctccctatgttgcctatgctggtctcaaactcctggcctcaagccattttccctccttggcctctcaaggtactggtattacaggcatgagccactgcacccagttgatacttggttattatatgtttagctttttgaggacccaccatactgttttcctcaatggctgcatcgttttacattcccaccagtaatacacaagggttccaattttcccacatcctccccaacacttattttctgtttttccttttttgataaatttgtgtgtgtatatgtggttttttatttgtgtgttttgatgatagccaccctaatgggtgtgaagtggtatctcgttgtgttttcttggtttttgcttgtttgtacctttttacccatttttaagtgtgctacttagtagtagtaagtacattcttctttttgtgcaaccataataaaaatccagcttcagaacttttttcatcttcccaaactgagtttctgtacccattgaatagtaactccctattctctcctcccctgacaatcaccattctgctttctgtctctatgaatttgactactctaggtatctcatgtaagtggaatcatataatatttgatcttttgtgtatggcttattttacttagcataatatcttcaggattcatccatcttgtagtatgtatcagaattttattcctttttaaggctgagtaatattccattatacatatataccacattttgtttatccatttatctattgatggacatttgggttgtttccacctttttgctcttgtgaatataatggtgctatgaatatcagtgtacaaatatcttttttttttttttttttgtgagacagtatcgctcttgtcacccaggctggagtgcagtggcgcgaccttggctcactgcaacctctgcctcctgggttcaaggcattctcctgcctcagcctcccgagtagctgggattacagatgtgcgccaccatgcctagctaatttttttatttttagtagagaaggagtttcgccatgttgggcaggctggtcttgaacttctgacctcaggtgatcaacctgcctcggcctcccaaagtggtggaattacaggtgtcagccaccgcgcccagccacaaatatcaagtctttactttcatttcttttgggaatatatatactcagaaatggaatcgacaattgacagagcaaatggtaattctatgtgtaatttttttttaaatttttttttttgagacggattcttgctctgtcgcccaggctggagtgcagtggcgtgatctcggctcactccaagctccgcctcctgggttcttgccattctcctgcctcagcctcccgagtagctgggactacagcatccgccaccacgcccggctaattttttgtatttttagtagagacggggtttcaccgtgttagccaggatagtctccatctcctgacctcatgatctgcccgccttggcctcccaaagtgctgggattacaggcgtgagccaccgcgcccggccaattttttttttttttttttttagacagggtcttgctctgttgtccaggctggagtgcagtggtgcagtcacagttctctgcagccctgaccttctcagttcaagctatcctctcacctcaccctcttaagtagctgagactacaggtgcatgccaccatgcctaactaatttttttatttttttgtagctgtgggatttcgctaggttgcccaggctttatgtatcattttttgaggaactgccttactgttttccacactggttgcaccattttacattctgttagcagtgtacaaaggttttgttatagactgaattgtgtccccctgaaaattcacgtgttgaagccctaagccccagtgtgactgtatttggaaataggacctttacagagaaattaaaaagttagaagatatcataaggggctgggcgcgggtggctcatgcctgtaatcccagcactttgggaggctgaggcaggcggatcacaaggtcaggagatcgagaccatcctggccaacacggtgaaaccccgtctctactaaaaatacaaaacattaaccgggcgtggcggcatgcacctgtagtcccagctgctggggaggctggggcaggagaatggcgtgaacccgggaggcacagcttgcagtgagccaaaatcgcgccactgcactccagcctgggcgacagagcgagactccatctcaaaaaaaaaaaaaaaaaaaaaaaaagaagatataaggatgagaccttaatccagcaggactgctgtcttcgtaagaaaaggactggataccaggagtgcgtgtacagagagaaaaagctgcatgaggacagaggtagaagggggctgcctgcaagccaaggagagagacctcacctaaaacaaaccttgctgacaccttgatcttggactcccagcctccagagctgtgagaataatttctgtggcttaagccttccactccatggtattttgttatggcagtcctagcatactgtgtaatataggtttcaattcagtttctctgcatcctccacatcctggccaacacttgttattttctttcttttttttttttggagacagattctcgctctgtcacgcaggctggagtgcagtggcacaatcttggctcactgcaacctccacctcccgggttcaagcgattctcctgcctcagcctcccgagtaactgggattacaggcagccgccaccgtgcccagctaatttttgcattttagttgagatggtgtttctccatgttggccaggctggtcttgaactcctgacgtcaggtgacccgccagccttggcctcccaaagtgttgggattataagcatgagccaccgcgcctggcattttctttttttttgagacagagtctcactctgttgcccaggccggagtgaagtggcatgatctcggctcactgcaacctctgcctcccagattgaagcaattcttgtgcctcagcctcccgggtagctgggattacaggcgtgtgccaccacgcctggctaatttttgtattttagtagagacagggtttcaccatattagccaggctggtcttgaactcctgacctcaagtgatctgtccaccttggcctcccaaggtgctgggattacaggtgtgagccatctcacccggcctattttctgtttcgtttttttttttttcattagtagctatcctagtggatgtgaagtggtatcttattgtggtttctgatttgcatttccctgatgataagtgatgttgagcgtctgttcatgttcttattggctatttgcatattctcttttggagaagtatctattcatgtcttttgttgaccattttaaaatggggtttttcatcctggctaacacggtgaaaccctgtctctactaaaaatacaaaaaaaaaaaaaaaaaaaaattagccgggcgcagtggcaggcgcctgtagtcccagctactcgggaggctgaggcagaaggatggtgtgaacctgggaggcagagctcgcagtgagcagagattgagccactgcactccagcctgggcgacagagcgagactccgtctcaaaaaaaaaaagggggggggggggggttttgagctgggtgtgcaggtgcacacctgtattcccagctgctcaggaggctgaggtaggtggatctcttgagcccaggtgtttgagggtgcagtgagctgtgattgcaccactggactctaccctgggtgacagagtggcccagtctctaaaaataaaataaaattaggtttttgtctgtgttgttgagttttaggagtcctttatacactctagatattaattccttgtcagatatttgacttacaaatattttctctctgtggttgtctttatactctgttgatagtgtcttttgatgcacagaggttttcattttgatgaagtccaatttatcttctttttttaaaatctgtgcctcatctgcaaatattaccaatcgaaagtcatgaaatttttcccctaagattttatagttttagcgcttacgtttgggtctttgatccaatttgagttaattttttatatatttttgttgtgtaagagtcccactttattgttatgcatgtggatattcagttttcggagtaccattttccatttgggaaaaagattgtactttccccattggatggtcttgacacctttgttgaaaatcagttgactaaagttcaagactagccttgccaacatggcaatatcccgtctgtactaaaaataccacaattagctgggcatggtggtgcctggctgtaatcccagctactcgggaggctgaggcaggagaatcgcttgaactgggaggtggaggctgcagtgagctgagattgcgccactgccctccagcctgggcgacagagcgagacatgagaatctgtcttaaaaaaaaaagaaaattgaccatatatgtgaggatttatttctggtctctccattcagttgattggtctttatgtctatctttatgtccttactgcactgttgtgatggctgtagctaaatggtacacttaaaaatggttaaaataggccaggcacggtggctcacgcctataatcttagcactttaggaggctgaggtgggcagattgcctgtgctcaggggttcgagaccagcctaggcaacatagtgaaaccccgattttactaaaatacaaaaattagctgggtgtggtgtgtgcctgtaattccagctactcaggaggctaaggcacaagaattgcttgaggcctggtgctgtggctcacgcctgtaatcccagcactttgggaggccgaggcaggtcaagagatcgagaccatcctggccaatgtcatgaaacctagtctctactaaaaatacaaaaaattagctgggtgtggtggcgcgcacctagtcccagctacttgggaggctgaggcaggaggatcacttgaacccaggaggtggaggttgcagtgagccaagattgcgccactgcactctagattggcagcagagtgagactctgtctcaaaaaagaaaaaaaaaaaaaagaattgcttgaacccaggaggtagaggttgcagtgagctgagattgcaccctgcactccagcctgggcaacagagtgagactatttacatacccaatttttttttttttttttttttgggatggtgtcttgcactgtcgcccaggctggagtgctgtggcgtgatcttggctcactgcaacctctgcctcctgggttcaagcaattctcctgcctcaggctctcaagtagctgggttacaggtacctgccaccacgcctggctaatttcttgtatttttagtagagatggagtttcactatattggccaggctggtctcaaatttctgaccttgtgatccgctggcctcagcctcccaaagtgctgggactacaggtgtgagccaccacgcctggtcatacccaaatattttaccataattatacaagaatttattatttttatttttttctttttaaattctttaatcttcttcatttgttaatgctttgctgaatcataaaaaattatgaaataaaaagaataggtcttgttgattcttctttttacttacctccccctacttaccccctcttactttatcaaagaaaacacttcatttgaaacttaacggaagtacattctcccagagaggaaaatccttcaggacaacatttttttttgtttgcttgttttttttgagacggagtctcactctgtccccgaggctggagtgcagtggtgtgatcgcagctcattgcaacctctgcctcccgggttcaagcgattctcctgcctcagcctcccgagtagctgggactacaggcgcctgtcaccatgccctgctaatttctgtatttttagtagaaacagttggccaggatggtttcaatcttatgactttgtgatctgaccactttggcctcccaaagtgctgggaatacaggcgtgagccacagtgctcagccaattttttgtatttttagtggagaaaaggtttcaccgtctttgccaggatggtcttgatctcctgacctcgtgatccgcccgcctcccaaagtgctgggattacaggcctgagctaccacgcccagcctttttatttttttattttatttattttattctcagccttctgggtaactgggactacaggtgtataccaccacgctcagctaatttatgtatttttagtagaaatggggtttcgccatattggccaggctggttttgaattcctggtctcaagtgatctgcctgcctccgcctcctaaagtgctgagattacaggcatgagccactggcccagactacacttaaaattttcaaatcgagatattttggggggcaagggtgcttctagcagccactaattccagttcttgagtgcatattaaagttgctactgtttaaaagcttgtagttggatccagggagtgggtaggcggtcagagtaacccttgcttcttggtgtctccttgatgctcttagctgaatgtcctgtgtagcccacaacatttactttgggaaaaaattaagagtgtttaaagcaggatcaagctgctgcataccacagctaaaactactagaataagacccctggttctgtttcattgttttttggagctaaagtcatgattaagaaggatggcctgggatattggtactgtgctgctagaggtgcaattcctggttctttgcaagatagaccagagtgaaagcatttgttaggaatgtttttattaatcaagagtgaaaggcaaggccaggcgtggtgactcaggcttgtaatcccagcactttgggaggccaaggtgtgggatcatttgaggtcaggagttcaagaccagcctggccaacatggtgaaaccccgtctctactaaaaatacaaaaattggctgggtgtggtggtgcatgcctgtaatcccagctactcgggagactgaggcaggagaatcgcttgaatccgggagacggaggttgcagtaagctgagatcatgtcactgtggtacagtctgggtgacagagggagactgtttcaaaaaaaaaaaacagaaagaatgaaaggcaaaacattaaaaatagaattaccatgtgatctaacaattttacttctggatatatatccaaaataattgaaaacaaagaaaaagaaaaacagagtctcgatgagatatttgtacccatgttcataacagcgttattcacattagctaaaatgtggaagcaacccaactattcattgatggatgaatagataaggaaaatgtggtatgtacatataactgaaaaattattcagtgttaggaaggaaggtaattctgacatatgctacaacatggatgaaccttgaggatattatgctaagtgaaataagccagtcatgtaaaagacaaataccatataatttcacttagacactttgagtagtgaaaatcatagaaacagaaaatagttgtcagggatggtgtgagggatgaatcagcagttactatttctttttgtttgtttgttttttgagatggggtcttgctctgttgcccaggctggagtacagtggtgtgatcttggctcactgcaacctctgcctcccaggcacaagccatcttcccacctcagcgtcctcagtagctgggactacagatgtgttccaccttgtccggctgatttgtgtgtgtgtatatgtgtgtgtgtgtgtggagacaaggttttgccatgttgcccaggctggtctcgaactcctgagctcaagcatcaagcaatctacctttttcagctttccaaagtgctggcattacagacaagggccactgtgcctggcctttactatattttattttatttattatttatttatttatttatttatgtattttgagatgaagtctcactctgttgcccaggctggagtgcagtggcacgatcttggctcactgcatcctctgcctcccaagttcaagtgattctcctgcctcagcctccagttattattattattattattatttttttgttgttctgtttttttgaggtggagtctcgccctgtcgcccaggctggagtgcagtggcacaaactcggctcactgcaacctccatctcccaggttcaagtgattcttctgcctcaacctcccaagtagctgggaatacaggtgcccgccaccacgcctggctaatttttgtatttttagtagagacggggtttcaccacattggtcaggctggtcttgatctcctgatcttgtggtccacctgcctcggcctcccaaagtgctgggattataggtgtgagcccccatgccctgccttgttattattattatttttatttttttgtctgagacggagtcttgctctgtcacccaggctagaatgcagtggcacgatcttggcttagtacaacctctgcctcccgagttcaagtgattctcctgcctcagcctcccgagtatataggactacaggtgtgtgccaccatggctaatttttgtatttttagtagagatggggtttcaccatgttggtcaggatggtctagatctcttgacctcgtgatctacccgccttggcctcccaaagtgctgggattacaggcatgagccactgcgcctggccccagtttttgtatttttaatagagacagggttttggcatgttggccaggctggtctcagactcctgacctcaagtgatctgcccacttcagccttctgaagtgctgggattaaagacatgagcactgtgcccagccacttttactatattttaaattaggttacttatcctttgtttttttttttttttgagacgaagttttgctcttgttgcccaggctggtgtgcaatggtgcatctcgactcaacgcaacctctgtctcccgggttcaagtgattctcctgcctcagcctcccgagtagctgggattacaggcatgcatcaccacgccagctaattttgtatttttagtagagacagggtttctccatgttggtcaggctggtctcaaactcccgacctcaggtgatccacctgccttggcctcccaaagtgttgggattacaggcgtgtgccactgctcctggcttatttttctttttgttactgagttgaaatcattttttatatattttagatacaagtcacttaccaaatatgtaatttgcacaaattttctcccattctgtgggatgtcttttcatttaaaccaaaaaattgtagagatgggggttttgctgtgttgcccaggttggtcttgaactcctggtcttaagtgatcctctgaccttggcctcaaaaagtgctgcgattataggcatgagccaatgtgcgcagcttaccttttcttcttttctttttttttgaggcagggtcttgctctgttgcccaggctggagtgcagtggtgcaatcatggcttactgcaggctgaaactcccatgctcaagtgatcctcccactttagcctcctaggtaactgggaccttaggggcgtgccatcacaccttgctaatttttttttttttttgagatggagtcttgccctgtcgcccaggttggagtgcagtggagcgatcttggctcactgcaaattccacctcccggattcaagtgattctcctccctcagcctcctgagtagctgggactacaggcgtgtgccaccacgcccagctaatttttgtattctgagtagagacgggatttcaccacattggccaggctggtctcgatctcttgacctcgtgatctgcccgccttggcctcccaaagtgctgggattacaggtgtgagtgtgagccaccgaacctggcctttttttttttttttgagaccgtctctgtcacccaggctggagtgcagtaacatgacacaatctccgctcactgcaacctctgccttctgggttcaagtgatccttctgccacagcctcctgagtagctgggattgcaggcatgtgctaccacgcctggctaatttttgtatttttagtagagacggggtttcaccatgttggcctacctggtcttgaattcctgacctcagatgatctgcccgcatcagcctcccaaagtgctggggttacaagcgtgagccaccacgcctagctggacctgactaattaaaaaaaaaattttgtaggctgggcagggtggctcacacctgtaatcccagtactttgagaggtggaggcggggtaatcgcctgaatcaggagtttgagaccagcccgggcaacataacgaaaccctaggtctaccagaaatacacaaaaaaattagccgagcatggtagtgcacatttgtagtcccagctactcaggaggctgaggtgggaggatggctggagccagggaagcagtggttacagtgagccgagaatgtgccactgcactcccgcttgggtgacagagtgagataaggtctcagaaaaaaaaaaaaaatttataggccgggcgcaatggctcacgcctgtaatcccagcactttgggaggaccaggcgggcggatcacaaggtcaggagatcgagaccaccctggccaacatggtgaaaccccgtctccactaaaaaaatacaaaaattagctgggcgtggtggcacgtgcctgtagtcccagctacttggcaggctgaggcagaagaattgcttgaaccctggaggcggaggttgcagtgagccgagattgcaccattgcactccagcctgggcgacagagcgagactccatctcaaaaaaaaaaaaaaaaaaaatttgtgaagacaaggtctcaatatttgcccaggatggtctgaaacttctgggctcaagccatccttctgcctcagcctcccaaagtattggaattacaggtgtgagccactgtgtctggcctatttatagactcttaattctgtttccttggtctgtatgtctatactatgtcagtgccacactgtcttgattactgtagctttgtggtgagttttggaattgggaagtgtcagtcctctaactttgttgtatatattcttttctgttttgcacagatatcaggttacaaatattttgcacacttttttttttttttgaaatggagtcttactctgtcacccaggctggagtgcagtggcgcgatctcagcccactgcaagctccgcctcccaggttcacaccattctcctgcctcagcctccccagcagctgggactgcaggcgcacactgccatgcccagctaatttttttgtattttaagtagagacagggtttcactgtgttagccaggatggcctcgatctcctgacctcgtgatccgcctgcctaggcctcccaaagtgctgggattacaggcgtgagccaccgcacccggccttgcacatgtttttaaaacttaatacataatagcttatcctgtatcaattaacatagctactttatttattcttagggccgcatagtatttttttttctttcttttttttttttttttttttttttgagactgagtctcgctctgttgcccaggctggagtgcagtggtgtgatcttggcttaagcaacctctgcctcctgggatcaagcctcgggatcctcctacctcaacctctgcagtatttgggactacagacacctgctaccacacccagttaattttcgtatttttttgtagagatagggtctctattgatgtgcatttaggctttataatatttatatatatattttttgaaacaaagttttgctcttgttgcccaggctggagtgcagtggcatgatcttggctcactgcaaccttcgcctcccaggttcaagtgattctcctgccttagactcccgagtagctgggattacagtttttaaaaaatgtatcctaggctgggcgcagtggctcacgcctgtaatcccagccctttgggaggctgaggcgggtggatcacctgaggtttggagtttgagaccagcctggccaacatggtgaaacctcgtctgtactaaaaatacaaaaattagctgggtgtactggcgggcacctgtaatctcagcttcttgggaggctgagacaggagaatctcttgaacttgagaggcggtggttgcagtgagccattgcactccagcctgggtgtcaagcaaaactctgtctctctctctctctgtgtctctctctctctctctgtgtgtgtgtgtgtgtgtgtgtgtatatgtatatatattctgccaatattttgtgattagagagtttaaagtatttacatttaaagtaattactgataaggacttttgccattttgctactacttttatgtttagctgatttttttttttttggtagtgaaaaaaaattttttttttttgagagcatgagactgttgcctaggctttggtgagcaaaatagtgcagtgccacaatctcagctcactgcaactttgggctcaagtgatcctcctgtcccagtctcctgagtagctggtagtataggtgtgccaccaccatgcctggctaatttttgtattttttgtagagatagggttttgccatgttgcccaggctggtctcaaactgggttcaaacaatctacctgccttagccttccaaagtgttgggattacaggcattagccactttctgccccctcccccgcttttttttttttttttttttttttgagacggagtttcactcttgttgcccaggctggagtgcagtggcatgatttcagctcactgcaacctccgcctcccgggttcaggcattttcctgcctctgcctcccaagtagctgggattacaggcttgccaccatgcctggctaattttgtatttttaatagagatggggtttctctatgttggtcaggctggtctcgaactcctgacctcaggtgatcctcctgccttggcttcccaaagtgctgggattataggcgtaagccatcacgcctggcccacgctttatttttttatttttattttttattatttatttatttattttttgagacggagtttcgttcttgttgcccaggctggagtgcaatggcataatctcagctcaccgcagcctccgcctcctgggttcaagtgattctcctgcctcagcctcctgagtagctgaatttacaggcatgcgccaccatgcccagctaattttgtatttttagtagagacggggtttctccatgttggtcaggctggtctcgaactccagacctcaggtgatcctcccgcctcggcctcccaaagtgctgggattacaggcgtaagccaccaggcctggcctgcttttttaattttttatttattttttctttttaagagggagggtcttgctgtgttgtccagattggagaacagtgatgagatcatagctcactgcagacttggattcctggactcaagcaatcctcccgcttcattctttgcaagtaactggaagtgcagacatgtgccacctgccttttttgttttttaaatttttcatagagatggggtcttgctatattgcctaggctggtctcaaactcctggcctcaagcaatcggcttcctgaagtgctgggattacagatgttagccactggcctgttgtgaaaatgttttgactttcttctcattttctttctttctttttttttttttttgaagtagagagagtctcactatatggccaatggtggtttcaaacccctgagcccaaggaatcctcctgcctcagcctcccagtgcttgtcgtgctaggacaacaagcatgagccactgtgcctagccccttctcattttctttttctttctagtgcataagcaggcaaccttattttcttatgtgtatattctaaagatatgttctttgcagttaccatgggaattacacttaacatctcacagttataatctaatttgaatttatactaacttaagttccatagtatacaaatctctgctcctatccagctcctttctcttcccttttctgttaagtcatggattacatctttgtaaatcgtatctcaggaacctagattaataattttttatgcatctgtcttttagatcacattgaaagtgaaaagtaggagttacaaagcaaaattgcaataatgctagtttttacagttgcccctgtatttgcctttaccagagatctttctttcttttttttttttttgggatggagtctcgctctttcgcccaggctggagtgcaatggcgcaatctcagctgactgtaacctctgcctcccgggttcaaaagattttcttgcctcaggctcctgagtagctgggactgtagttgtacgccaccacacgtggctgatttttgtatttttagtagagatggggttttgccatgttggccaggctggtcttgaactcctgacctcaggtgtgagccaccgcacctggccgagatctttatttcttcacatggcttcacgtctagcttttaaaaattcattctgggccgggcgcagtggctcacgcctgtaatcccgacactttgggaggctaaggcgggcggatcacgaggtcaggagatcgagaccatcctggttaacacagtgaaaccccgtctctactaaaaacacaaaaggccgggtgcggtggctcacgcctgtaatcccagcactttgggaggctgaggtgggtggatcacgaggtcaggagatcgagaccatcctggctaacatggtgaaaccccgtctccactaaaaatacaaaaaacaaaacaaaacaaaaaaaactattagctggcattgcggtgggcacctgtagtcccagctactcgggaggctgaggcaggagaatggcgtcaacccaggaggcggagcttgcagtgagccaagatcacgccactgcactccagcctgggagacagcaagactctgtctcaaaaacaaaaaacaaaaaaccacaaaaattagccgggcgtggtggcgggcgcctgtagtcccagttactcgggaagctgaggcaggagaatggcatgaacccaggaggtggagcttgcagtgagccgagatcgctcaactgcattccagccttggcaacagagcgagactccatttcaaaaaaaaaaaaaattcattctgaagaattcctttttttttttttttttttgtaaaaatggagtctcactctgttgccctggctggagtgctgagtgccatggcatgatctcagctcactgcaaccaacccccactccaagttgaagcgatactcctgcctcagcctcctgactagctgggattaggggtgcctgctactgcacctggctaatttttgtatttttagtagagacgggtttcaccatcttggccaggctggtgtcgaactcctgacctcgtgaccaacccacttcggcctcccaaagtgctgggattacaggcgtgagccactgtgcccggactgaagaattcccttttagcatttcttacaaggtctgtatagtggtaatgagcctccctcagcttttgtttatctgagaatgtcttgatttttttccttttttttttttttttttgagatggagtctcgctctgtcgcccaggctggagtgcagtggcgtgatctcagctcactgcaagctccgcctcctgggttcacaccattctcctgcctcagcctcgtgagtagctgggactacaggtgcccgccaccacgcctggctaatttttttttttttttttgtatttttagtagagacggggtttcactgtgttagccaggatggtctcaatctcctgaccttgtgatccgcccgcctcggcctcccaaagtgctgggattacaggtgtgagccgcctcgcccggccaatgtttttccctattttttgaaagacagtgttgccatttacagaattcttggttggcaatttatatttagggtttttttttttttttttgagacagagtcttgctctgttgcccaggctggagtgcagtggtgtgacctcggctcactgcaacctccgcctccagggttcaagtcattctcctgcctcagcctcccaagtagctgggactacaggtgcccgccactacgcctggctaattttttgtatttttagtagagacggggtgtcaccatgttggccaggctggtctcgaactcctgacctcaagtgatccacacgcctcagcctcccaaagtgcagggattacagacatgagcccccacgcccggcctaggtcttgtatgatcatacattttgccttggcattcatatggctttctaaatttcaccatatacatgttgctttggaatgtcctaatttgccaaagagtttcacctcaacttctgtgggcatctatctgtaatctcttgccccaagtgcctgttagtctgtagtctgctttgcagctttcattagcaatacctgctgctttctctgcctgagttttgtattaggttgaaatagaaacatgcaccttatgtctgtccttcaaatacccccgcagacagggtagaacagatatgtacgataatttgcaaataaggtctgctttgctctttgagggagggagctgggaattgggcttctactgctttaagacaaaaaacactgccatgctggagagggggtagggcaaggttgagtaaaacaccacagaactttccttctgttttgaagatggctttttcttcattggatatttgcttgtaaacctttgactcttttctaaaactgtcaaatttggttcagacagttactacttgtttttctgatgtttctatgaaggaatgagaccttgaaacttcctagtctgccattttgatgacctatgggctgtctttgtactctcttgatagtgtcctttgatacacagaagtttttaattttggtgaagtccctttatctactttttcttttaaagttccttgtgctgtaggggtcatatttaagaaatcattgccaaatccaaggtcatgaagatttgcctctttttcagtagctataacaaaggtcctggaaataacttcttatcttgacttgagttacatgtctgtcttcaaagcaatgactgtggtgagggtaatagattattccgattgctcatgctggatggtgtccgatcaggtctgagacagtggggttgatactacagtgctgtttccaaaaaggaagggctagtgagcgctagaaaaatcagtaaatacttacttcatgtagtaaatgtgaagcattcatagcacattgaaaagtttatggtgcccagagtacctttttttttttttttttttgagacagcctcactctgtttcctgaactggaatgcagtggtgcgatcttggctcactgcagcctcaacctcctgggttcaagcgatcctcccccacttcagccttccaagaagctgagactacacatagtcatcatgcctgactaatttttgtatatatattttttaagatggagtctcgctctgtcacccaggctggagtgcagtggcatgatcttggctgactgtagcctccgcctcccggtttcaagcgtttctcctgcctcagcctcctgcatagctgggattacaggtgcctgccaccacacctggctaatttttgtatttttagtagagatgagatttcaccatgttgcctaggctggtctcgaactcctgacctcaggtgatccacctgcctagcctcccaaagttctggtaatttttgtattttttgtagagatggcattttgctatgttgcccaggctggtctcaaactccttggctcaagcggtctgcctgccttggcctcccaaagtgttgaggttacaggtatgagccaccgtgcccgaccccagagtacacattttaattaaaaacttatttttctggccgggcacggtggctcacgcctgtaatcccagcactttgggaggccgaggtgggtggatcacaatgttaggagttcgagaccagcctggccaatatggtgaaaccccatctctactaaaaatacaaaaattagccgggcatggtgacgcgtgcctgtagtcccagctactcgggaggctgaggcagaagaatcgctcgaaccggggaggcagaggttgtggtgggctgagatagtgccactggactccagcctgggcgacagagagagattctgtctttaaaaaaaaaaaaaaagtatttttcttattataaatttaatatgtaagtgatgtaagtgtttgaaagtgacttccagctggatgcggtggctcatgcctgtaatcctagcactttgggaggccgaggcgggcggactgcttgagctcaggagtttgagaccagcctgggtaacacagtgaaaacccgtctctactaaaatacaaaaaaattagctgggcggccggcgtgcgcctgtagttctagctacttgggaggctgaggcaggagaattgcttgaacccggaggttgcagtgggctgagatcgtgcctttgcacttcagcctgggcaacaaagcaagactccatctcttaaaaaaaaaaaaaaaaaagaaggccgggtgcagtggctcacgcctgtaatctcacactttgggaggcctaggtgggcggatcatgaggtcaggagatctagaccacagtaaaccccgtctctactaaaaatacaaaaaattagctaggcgtggtggcgggcgcctgtagtcctagctactcgggaggctgaggcaggagaattgcttgaacccggaggttgcaatgggctgagatcatgcctttgcactccagcctgggcgacagagcgagactccatctcaaaaaaaaaaaagaaaagaaagaaaagaaagaccttcaaaattattgctgctgatgtggtccctcataaaccaagcagtgggaaactggtttagcttttagttcacattctaaagtactaatttttgtggtttattttgtacaggtactgctataaccagaatttggtagaaaaaggatttacttgttggggccctcttgataaaaagagatgtggggggattctcgacctgctaacagaactggaccttttcggtaagttctcaaatttgaatattgaaattgccagtattttaattataaatgtgtaacattttcgcctactataaatgaagatattttctctgtggagaaatagtttctgattttttaaaaatagaaatttggctgggcgcggtggctcacgcctgtaatcccagcactttgggaggctgaggcgggcagatcatgaggtcaggagatcgagaccatcctggctatcacggtgaaaccccgtctctactaaaaaatacaaaaaaaactagccgggcgtggtggcggctgcctgtagtcccagctactcgggaggctgaagcaggagaatggtgtgaacctgggaggcggagcttgcagtgagccgagatcgtgccactgcactccagcttgggcgacagaggaagactctgtctcaaaaacaaaaacaaaaaaaaaaaaagaaaaaaaaagaaaaatagaaactcaatttggaaaataatttcgaaaatgattgtgagcctgaatacccagcatgccaaatgttttgtcacatagcattttaaaattttatttatttgtttgttttttgagacaagtctctctctgtctcccaggctggagtgcagtggtgcgatcttgacttactgcaacatccgcctcccgtgttcaagtgattctcctgcctcagccttctgagtagctgggattacaggcgcgtgccactatgcctggctaatttcattattttaatattaaaaaatacccaaatattttatttctttttgtctcttagcgaaggaatacatatttggctagtaaggaaagctagcaaaatttacataaatgtttataaaagttgtattgagttcactaatttatgtctagaattcagagctgtgccttgtctgtggcatgttgacgcagtttgctaagccacctctcaattttaggggttacttggtaccaagaagagtggagaaagtggtagcatttagttgtaaatagattgtattttaaatttgtagggaattaatttttttatagctagtatcatacacactgtattttaactagtatttaaacatttttcgtattgtgtttacaattaatgagatgctatatgaatgtgacttttttggttttacttggtacatagcaaataaatctgacctttaaatgtatgcattcataagtattgttgctccagttgaaacttctattaactagtacattttcctttttttaccttttttcaaaatggagtctcactctgttgcccatgctggagtgcaggggtatgatctcagctcactgcagcctttgcctcctaggttcaagtgattctcctcccttagcctcctgagtagctgggactacaggtgtatgccaccatgcctggctaattattgtatttttttttttagtagagatggcgtttcaccatgttggccaggctgatctcaaactcctgacctcaagtgatccacctacctcagcctcccaaagtgctgggactataagtgtgagccaccgcacctgccatttggattggcaatctgcaagattttattacttaaatgcaacagatgttctcattcattgttctgaagcttggagttccaatgaaaaatttaggtggagaactgagtttagaaaatccatataatgtttagtaaaactagtatttcataaatgctgaatgacagagattggtctttaaattaaaacaacagtgtgatgttgggtattttttttctttcaaaatactaaggattagatcagtggtcagcaaactacagctgatagcctgtttttgtaaataaagttttactggaaaacagccactcttactcatttgcagattgtgtatggctgctttcatgctatgatggcagagttgaatagttgtaacagagattgtataacccacaaaatccgatatgtttacgaactggctcttcatggaaaaagtttcctgacctctcatctagatcaatggggttgtacgttaccatttaaaaatatttaggttgtaatctatcctcttattacttgtatttatgggtaactattttgtaagtaaggctgtttcgtatagaattaacgtggtttaggtaagcattcagaaatgttaggttaatttagctttattgtctaacttttttcaaatttagaacatttgtctttgactcgtttaaacttatttaaaattatattttcccaccttaattttagtttaaatgtaagtcattatatgctgttttttaacatctttgactaggagggagacagtttttgggaactaatttgaaccaaaacagatataggaaaatgattttgttacatttcctttgaacttttcttttaaaatttgtttttatttggttgaaaataattttcataactactgatattttatattagtagaatggtttcttgattcgtctgtataaaatacaaatctaagaaccctgctacagtaagttactctaaatctatttgatcttaatttagaagagtaagataatctttaggccatgttggatgtgttctggtcagaaaacatgtagatttcatacctcagtcctcatcccatgagtgtctgatgaagcttaaatcttcctgcaagaaagacttgaatgattttaaacatgagagacactgtatttagtggtaacatcttaattttagtgttaaattgtattgcctaagaagaacatctagggcgggcgtggcggctcacgcctgtaatcccagcactttgggaggccgaggcgggtggatcacgaggtcaggagatcaagaccatcctggctaacacggtgaaaccccgcctctacaaaaaatacaaaaaaattagctgggcgtggtagcgggcgcctgtagtcccagccccttgggaagctgaggcaggagaatggcgtgaacccgggaggcggagcttgcagtgagccaatatcgcgccactgcactccagcctgggcgacagagcgagactccgtctcaaaaaaaaaaaaaagaagaacatctaaacttgctcctcttatgatgaaccacatagacataactagtgttaatgggggtcagtggaagtcatcatgttctgaaaatccattaaatgtacatcattctagtgtttaggttaatgctgttaaattcctgttactttaagaaagggttggccgggcatggtggctcacgcctgtaaccctaaccttggggagacagagatgggtggctcacctgaggtcaagagttcaagaccagcctgggcagcatggtaaaaccccatctctgctaaaaataaaaaaattagctgggcatggtggcgcatgcctgtaatcccagctactctggaggctgaggcatgagaattgcttgaacccaggaggcagaggctgcagtgaaccgagatcatgccattgcactccagcctgggcaacagagcgagactccgtctcaaaaaaaaagaaaaagagaaagaaaaggtttggcattgcaactatttctcttgaactgagtgacccagaatcagttgtcctttgaattttagtatagtagcatagtctgagctcagaagggccttatgatagaccctgtatgttctgggaggcaagaattgagttggtattaatatcttaatgcttttgttttactgctgaataacagatgacccttcaggtcttttcatgttttcctttttcatgtctccctgcctaggatcctaggtgcctaattgcctacttaaactagtttagggaatcttggactgaagccaaaacatgtaaaatgccctgaaggttaggcaaagggaagaagttgggtagtatgaaagattaggtcacatcttgtttatctcttgagttctataaattgagaatgtaaatttaatactatgtctatttttaaaatgtattttattgccatgaaaaagtagcatgagacattggaatatggaatatcagcttcttcatttgggtcatggggatcatgcttgaagacctaatgctctctctaggtctatctcagcattgagcccctggatgctgttgcgtggcttagatgacttatacatgctttgtggcatgattcatactaccttctaccttctgtgatacccttgggtagttataataggacccaggttagagtgcttcttggtggagccactgtagaactgggatttagatgcagccagggctgatgctcagctggtgaacactggtgtgcttgttcctactggtgatttacaaccagtgtttcttctttttgggcctgcatccattttgattgggtggtgtccatgctgtatctgtaataaaatatttttgaatgttaccgctggatgcagcgtgagaaagatacctcctgaaacttactgtaagaaatttacagtgcattgatttttctgatatataggaatcgtcatgttgaccttggaattcttaagttccctggctgtaggaaatggaaatttttgtagtatgtcaccattgttagcttatttggtattgcggattttccctgttgcaggactgggtgaaagctttttctgcagcagtcatgttgaaaaccttgtgttgactttcctcgtgttctgaaatgggagcataaaagtttactccgccacttcgtcttaaaatagcaaaactttgctgttttctgcagatctaggaccttgttacagaactctgccaaaaaaaaaatgtttacagaagaatgtgctgtgattagagaagaatatgctggtgtgtagatttcaaactctctggacaatatgaataacactgtctttgtttctacagtgggagccaagaagaaaggtttgctcccgggtggaacagggattatcctcctcctccccttaagagtcatgctcaagagagacactctggcaactttcctggcagagattcacttccctttgatttccaggggcattcggggcctccttttgcaaatgtagaggagcattctttcagctatggagctagagacggaccgcatggtgactatcgaggaggggagggacctggacatgatttcagggggggagatttttcgtcttctgatttccagagcagagattcatcacagttggacttcaggggtagggacatacattctggggattttcgggatagagaaggaccacctatggactataggggtggagatggtacttctatggattatagaggtagggaggcacctcatatgaactacagagacagggatgctcacgctgttgacttcagaggtagggatgctcctccatctgacttcaggggccggggcacttatgatttagattttagaggccgggatggatcccatgcagattttaggggaagggatttatcagatttggattttagggccagagaacagtcccgttctgattttaggaatagagatgtatctgatttggactttagagacaaagacggaacacaagtagactttagaggccgaggttcaggtactactgatctagactttagggacagggatacgccacattcagatttcagaggtagacaccgatctaggactgatcaggattttaggggcagagagatgggatcttgtatggaatttaaagatagggagatgccccctgtggatccaaatattttggattacattcagccctctacacaagatagagaacattctggtatgaatgtgaacaggagagaagaatccacacatgaccatacgatagaaaggcctgcttttggcattcagaagggagaatttgagcattcagaaacaagagaaggagaaacacaaggtgtagcctttgaacatgagtctccagcagactttcagaacagccaaagtccagttcaagaccaagataagtcacagctttctggacgtgaagagcagagttcagatgctggtctgtttaaagaagaaggcggtctggactttcttgggcggcaagacaccgattacagaagcatggagtaccgtgatgtggatcataggctgccaggaagccagatgtttggctatggccagagcaagtcttttccagagggcaaaactgcccgagatgcccaacgggaccttcaggtatgttgatggggtggattgcttttttttttttttttttttttttttttgagacggagtctcgctctgttgcccagcctggagtgcagtggtgcgatctctgctcatgcaagctccgcctcctgggttcatgccattctcctgcctcagcctcctgagtagctgggactgactacaggcgcccaccaccacgcctggtgtgagccaccgcgcccggcctgctttttttttttttctttaaataagacttttgtgaaggatgacatttatttatttatttatttatttatttttgaaacggagtcttgctctgtcacccaggctagagtgcagtgacataatctcagctcactgcaacctccgcctcccagggtcaagcaattttcctgcctcaacctcctgagtagcagggattgcaggcatgtgccaccatgcccagttaatttttgtatttttagtgcagatggggtttcaccatgttggccaggctggtctcgaactcctgacctcgtgatccgcccacctcggcctcccaaagtgctggaattacaggcatgagccaccgtgcctggccagtttttttttttttttttcattttatttttatctttgcataaccattagaaagcaaaatttgtattcaggagtggaatgtaggaatgtaaatctctagagaaaaggtcctcagctcagatcatatatatgtgtgtgtgtgtgtatatatatatatgaatatatatgtatatatatgaatatatatttatatatatatatttcttttttcttttattcttttcttcctgcttcactttccatttgtgtatatatgtgtgtgtatatatgaaggaactatatatatatatatttgagacacggtcttgctctgtcactcgggctgaagtgcggtggtgtaattatggctccttgcagccttgacctcccaggctcaagcgatcctcccacctcagccttctgagtagctggaactacagatgtgcgccagccactatgcctggctagtttttttttttttcctttgagaatgagtcttgctctgtcgctcaggctgaagtgcagttgtgcgatctcagctcactgcaacctctacctcctgggttcaaggggttcccccgcctcagccttccaggaagctgggactacaggtatatttcaccattcctagttagttgtgtttttttttttcttttttgagatggagcctcaccgtgttgcctaggctggagtgcagtggcacgatcttggctcacagcaacctccgcctcccgtgttcaagcagtcttcctgcctcagcctcctgagtagttgggactgtagttgtgcaccaccaaatctgactaatttttgtattttttgtagagatgaagtttaggcatgttacctaggctgggctggaacccctgatctcaaatgatccacccttctcagcttcccaaagagctgggatttcaggcatgcaccaccatgcctggccagcaatttttgtatttttttgtagacagaaggttgcaacatatttcccaggctggtttcaaattcctgggttcaagcagtccccccaccttagcttcccaaagtgctgggattacagcaatgagccactgcccctacccttttgatgtgtgtttattcattattttgttttatgatgctgatttacatgccttgggataatttagtttgaaagtatatgtctttgggagttgactcttgcaactctcgcttagttagacctgtgattgtttagggatcattttcttatttaaattcattgagagaatacttaggagtctccctagttgtgaagagctgatattaatgttgcaactatcctcttgcagctaacgtaattaacttaaatgttaaacttcttgaatatatgatttaagcaaggagggttatatttgtaattttacaatgaaggtattctcttttaaagtagatttggctgggtacagtggcctatgcttgtaatttcagtgctttaggaggctgaggtgggaggatcacttgaggccaggaacttgagaccagtgtggtgcaacctcaggagagaatgtgagggtggggaagaaaaataaggccaggcacagtggctcatgcctgtaatcccaacactttgggaggcaaaggtgggcagatcatttgaggtcaggatttcaagaccagcctggtcaacatggtgaaaccccatctctactaaaaataacaaaaattaggccaggcgtggtggttcttgcctgtaatcccaacactttgggaagctgaggcaggtggatcatttgaggtcgtgggtttgagaccagcctgaccaacacggagaaaccccatttctactaaaaatacaaaattagctgggcgtagtgatgcatgtgtgtaatcccagctactcgggaggctgaggcaggagaatcccttgaacctgggaggcagaggttgcggggaggcagaggttgcactattacactccagcctgggcagcaagagcgaaactccatctgaaaaaaaaaaaaaaaacgaaaaccaaaaccagccaggtgtggaggtgggcgcctgtaatcccaactacttgggaggctgaggcaggagaattgcttgaacctggggggcggaggctgcagtgggctgagattgtgccactgcactccagcctgggcgacagagcgacactctgtctcaaaaaaaaaaagacattatctagtcatcttctctcaccagaggtatgaagtactgctagtttacagcccattctccagctctcagaccagggaaatttttctttttttttgagacgggggtctcgctctgtcacccaggctggagtgcagtggcacaatcttggctcactgaaacctctgcctcccaggttcaagtgattcttccgcctcagcctcctgagtagctgggaccacaggcgtgcacagcacagttggctaatttttgtatttttagtagagacggttttaccatgttggctaggctgagaaaattactgttttgagactatgttagtgtgtctttctggttattaaagtcttactcagtcttgtctctcgtaatgttttgctttactttgaagactctttcagtgagacttggtcttagcacatttacattcttatgatttgaagtcacattctggcactcagaacaatagagaaaattgtaattttttatatcttcacgtgacatgtcattatcatttttgatcctgagtggctaaatttcatgttgatttgtgttttgtgcagtaaagtatatttgtgaaataatttttcattctcaatttaaggatcaagattataggaccggcccaagtgaggagaaacccagcaggcttattcgattaagtggggtacctgaagatgccacaaaagaagaggtaaggcatgtcttctctcctgtttctctgtgtcaattaaaaattaaaaaaaccttttaatttgaaaaattgtagattcacaagaaggtgcaaagaaatgcacagagaagtcttgtgtatttttttcccatcttccctcagtgttaatattttgcacaactgtggtatagtatctaaaccaggaaattgaccctggtataatacataaagtttattcagatttcaccatttatacatgcactcactgaggtgaggttaaaaaaaattatgacaaatgattgctctctttagacctgatcacatcctttagagcatattatttctggagtatgtacataaggatgcagtttatttacaatagtaaaaactagaaactgcctaactgccctgtatcaaaggattggctgactaaattaagtctgaacttatggcagtgctcgctctgtgccaggcattgtgtgatacttacaagcattagttcatttaattatcacatatttaatataatcactctaaatattaagcattactgtatgtaattgttctagatactgagtgacacagcagtgtatattatcaagtcactgcctccatggataatgaaaaagcaagcaaaaggattacacaattttagtcagcaaataaatactctgaagaaaactaaagtacaggcggggcatggtagctcggcctgtaactcggagacagagtcttgctttgtcgcccaggctggagtgtgtggcgcgaccttggtgcactgcaacctccacctccccagttcaagcagttctcctgccgcagcctcccgagtagctgggactacaggcacacaccaccacgcccagctaatttttgtacttttagtagagacggagtttcaccacattggtcaggctggtcttgaactcctgacctcaggttatctccctgcttctgcctcccaaagtactgccattacaggcatgagccaccaagcccagcccatttttgatttttttgaggcagcgtctcactttgttgcccaggctggagtgcagtggcacaatcacggctcactgcagcttctacctcttgggctcaatcgatcctaccacctcagcctcctgagtagctgggaccacgggcatgcatgctaatggggctgttttttgtattgtgtagttagggagacatcactgaggaagaggcattcgagcccaggcttgaatgccgtgagagaacagtttatatgaatatggggaaatgaactgcccaggcagttcatgctgaggaagtgctgtggccctggactgtaatgaacccagtacatcattttatatttaacacatgagaaactggacactaaaaggttacacagcaagtgagcagagagcttggaatgcacacagtatgatttcagagcttaagcctttgaaggttatgctcttctgcttttctttttttttttttttttttgagacagagtctcactctgtcacccaggctggagtgcagtggcgcgatctcggctcactgcaacctctgccgccagggttcaagagattctcctgcctcagcctcccaagtagctgggattacaagcacctgccactgcacccagctgatttttgtatttttagtagagatggggtttcaccatcttggtcaggctgatcttgaactcctgacctcaagtgatccacccgcctcggcctctcaaagtgctgagattacacgcatgagccaccgcgcccagcattttgtttgtttgtttgtttgtttgtttttgagacagagtcttgctctgtcacccaggctggagtgcagtggcacaatcttgggtcactgcaacctccgcctctcgggttcaaatggttctcctgcctcagcctcctgagtagctgggactacaggcatgtgccaccacgcccggctaagtttttgtatttttagtagagacggggtttcaccgtgttagctaggatggtctcgatcccctgacgtcatgatccgcctgtctcggcctcccaaagtgctaggattacagatgtgagccaccgcttctggccctgcttttcctatgtacctgagaatttttaaatatttatttatttatttttgagacagggtactccagactggagtgcaatggcccaatcaaggctcactacagcctcaaactcctgggctcaaactatcctcccgagtagctgggattataggtgtgagccagtactcctggctaattttttttttttttttgagatggagtctcgctctgttgcccaggctggaatgcagtggtgcgatcttggctcactgcaagctccttctcccgggttcacgccattcttctgcctcagcctcccaagtagctgggactacaggtgcccgccaccacgcctggctaatttcttgtattttttagtagaaacggggttttaccgtgttagccaggatggtctcaatctcctgaccttgtgatctgcccacctcggcctcccaaagtgctgggattacaggcgtgagccaccgtgcccggccaattttttttttttttttttttttttttttttaaagatagtgtctcgctctgttgcccaggctggagtgcagtgtcatgatctcagctcactgcagcctcagccttccaggttcaagtgattctcctgcctcagccttccaagtagctgggattacaggtgtgtgccaccacaccaggctaatttttgtatttttagtagaaatggggtttcaccatgttagccaggctggtctcgaactcctgacctcaggttatccacccgccttggattcccaaagtgctgggattacatgtgtgagccaccacgcccggtctctcctggctaattaagaattttttttttttttttagagatagggtctcactatgttgcccaggcttgtctcaaacatgtggctttaagcaatcctctcaccttggcctcccaaagtgctgggattataggcaggagccactgcatcccaccaatttttgaataattatgttctactcattcaatatgtgaatgccttgagtgttcatagtttaactttgcttttccaaagtaatcatggctttaaattatgtatgataaaaactgttagggaaaatctgatattcagtgtttgattatgatttgtatcatttgtataaatgccatatttttgcagattcttaatgcttttcggactcctgatggcatgcctgtaaagaacttgcagttgaaggagtataacacaggtgagtttcttgacttgcatatggccttgggttaggaagggtctttgtcagatctctgcatcatgtgctacttaaaatttgtttcaagaaaccacaattaaaatttccagaagcctcccgttggtgcctccaaataacaaccagctttagttttagctgtggttctttgtggatgtttgtccacacatgggtgatgaggatgcatgttccagttcttctgaatgcctgtgatatatagagtgttgcagcaattgccttgaatatattttatataattattaaacttgctatgcatgttcttcatggtggtggaatgtttatgcttgagcctaataggatttaataagcttgttgtatgtaaaattttacattcattgcttcagtaaaatttatgacttcccagagaaattgtacaaattagtggtttaattttcagttttgctttgagaatggagtcctgttacagttattttgttgaaatccatgaatagacccagaagagctttccctttgacatctgttctgtggtctgaatggtagattaaacttttcagaatatcctcctagttgtatttcacagtaccaatttcagtcatttcctttaaatcttactacagtaaaagtaggcaaaggtgaaatgccaagaactcaaggtttttgaccaatatttttagaactatgtataataataagtttatttatttaaaaataaaggtaatctttaggtgacctattttgcagaattttaaatggaagggaatagagcatgagtcttcacagaacttagaatttcagtaattcagttaaagacatcttcaagtaagaacatgtcatattttgaggatataatttactattagcagtttatcatgggataaaaattttgcattaactagataacttcttcagaatgcttctgcagaggaaaattatccacaaaataaattttggtgcttgaaagaatatggtgttaagttcagaaataatttgttctgtaatttgagaacaagctcagaagtattatttctcagagagccaattatttatttgttttaaaaacatcaaccctgaatttgtggaagcatgagtaagagtagatatattattattcttggtatctcacttatgttggttatatttattttttgcatatgccttatacatgctttctttgggaactcaaggtagaatttacaggctggagatgctttttaactctcaggataataacctcagtctggtttcatgaactgtgctttcattaagtattgatatgtttaggaaaggagatgtcttaatatttaaatagcagttcaaactccagtttctttagtattcattgactttctaattgtcaaatttgtcaggacagtaaaaattgtattaacatatagtgtctagagaggaagttcttaaatttgccgattgtggtagctgttagaattggcagactgaagacattgatacacatgggaaatcattcagggcagtgcttaaaaataaaacgaaaaatacctttcagcaaatacaatcttttcttggcattctgttaagttgtgttttttatttttgttttttagtgaaagaattggattgctagtttcatgttatttatattacatctctatgtgacaaataggatgaacttttgacaatatcagccagatcatgttactcccatgtctaaaaccctcttagggccttcatcttcacttggaagaaattcccagcttcttcttttgtcttacaaacccatgcgtgagctgacccttggctgtttgatctcattcagtactgccctccacctaccctattttgctgtagccacactgagcttttctcttgtctttgaccaatacaaacttctttctgtgtcagggtctttgcactactcttctctctgatctttacttgtcttctggggtttagttcttggcttcagtttcacgtctctgaggccttgtgtcactctcaaatctaaaatcatcgggcagttgttttccatcatatccttgtttggatctatcactgattggatatttctatcactggtatttttcagttggatctatcactgatctatcactggtcactgattggattgaatctgtcagtggtattggatctatcactgatatttttctccgtggttttgtgtatcttatttctctcactagagaggaatgtcagcaggagccttattccttcttgtttccaccagtgcttgacactcggtaggttccctatatgcatggaatagattattatttatggtgtatgtgaagagcagctgtgatttcccctcaggtgaggaacataaaagggtagtgtaggtttcacagcagtgcagcttaggtcttacatatctgttgaagaatatgtcttggaacaatcagatgttctaagaactatagtgtttactgttaaaagatcatatgtggtagtcaggcatggtgttgcacacctgtagtcctagctacttgggagtctgagatgggagaattttttgagcctgagaatttgagatcagcctgagcaacatagcaagaccttgtctcttaaaaagaaaaagaaaaaaaaatgtgaatcttagtagtaacagtgacttaaaaatttttttttataagagaaagggtcttactctgttgcccaggttggagtgcattggtacgatcatagcttactgtaacctcaaacccctcggctcaagtgatccttctgtctcaacctccagagtatttgggactacaggtgcgtaccaccatggcaggctaatttttaaactttttgtagaggcgcggtctcactatgtttcccaggctggtcttgaactcctgggttcaagtgattctcctgcctcatcctcccacagtgctgggattacagatgtgaaccagtatgcacagacaaaaaggtgacattcataggtgaaaactggtaataaatattttaggctgagtgatgacctgcagagaccatgcaggatggatattgctcataagaggggaattgtggagtacagtctgtcctgttagttgatgtaatggagggctgatctataacacaggagagaagattaacgcctcttcgttgactctagtaatgtattagtgtaatttttgtctcctctagagctgtataagtacagggtcacaattttatctagaacctgtgaggttaaatgagcttatgaatttttcaagttatagaaatgtagtttacatagatcatatgggaattatatctcccaggggaatgtgtactcagacataatacttacgctgcaaaattattaatattctcactaacaggagtaaataaagtctcacagtataggccaggatttgcctcaaaatgagtttgttgaattttaccaaaaaacttgacatttatgggattttggaattgtagataagagattttggacctatatatgttgtgtatatttgaatttttcatttgccatttacaaatacattataaccccatgaattgtaaattatcttgaattatatgattatttctggaaaaagtaccaggagtaaaatgtcttttggtgactagacaaactctagtatatatataaaatggaatacttctcagcaatgaagaagaaactactcatgcacctaacaacatggatgaatctcaatggcaatatgctgagtgaaagaaactagactcataaggatatatacactaccataaggaggaatgaaatactgatgtatgctacaagttggatgaaccttgaaaacattataaaagaagccagacacaaaagaccaaatattgtgcaattcagtttatatgaaatatctagagaaggcacacccgtagagatagaaagcagattggtggttgccaggggctaagcgggaatggggaacgactccctaatggttatggtacttcttttgggctgatagaagtgttctggaactaggtagtagtgatggttgcatgacattgtgaatgtacttaatgctcctgaattgtacactttaaaatgatgcattttatttgatgtgtatttgcttactttgttttttttttttttttttgagatgaaatcttgctcccgttgtgtaggcaggagtgcagtggcatgacctcggctcactgcaacctccatctcccgggttcaaacgattctccttcctcagcctcccaagtaactgggattacaggtgtgtgccaccacacctggctaattttttgtatttttagtagagacggggtttcgccatgttggccaggctggtcttgaactcccgacctcaggttatctacctgcctgggcctcccaaagagctagcattacaggagtgagccactgtgcccagccagcttacaattttttaaaaaggctacatactatatgtgtatgtgtgatttcacttatgtgacattctggaagggacaaaattttagggattggaaatagtggtggccagggtattgggggaggagttaactataaagcggaagcatgagggaatttttgggtataatggaattgttctatatcttgattgtggtgatgatgtatcaatgttaaattccccgagttgataactactgtggttatgttagagaacatcttttttcttttctttttttttttaaacggagtctcgtttggtcacccaagctggagcgtaatggcgcgatctcagcttactgcaacctctgcctcctggattcaagcaattctgcctgccttaacttcctgagtagctgggattacaggcgcctgcccctactcctagctaatttttgtattttttttagtagcgacagggttgcgccatgttgaccaggctggtcttgaacacctgacctcaggtgatctgcccaccttggcctcccaaagtgctggaattacagacgtgagccaccatgcccggctgagagtatctttattcttagaaaatacataatgaagtttttagaagtaaagtactgtgatgtatgcagctttctctcatggtttcgaaaataatacttgctataaatggagaaggaaggaagagagtattgataaagtagatggatcacaatgttattaatagttgaatctggggccacacgcggtggctcacgcctgtaatcccagcactttgggaggccaaggcaggtagatcatctgaggtcaggagtttgagaccagcctggccaacatggcgaacgaaacctgtctactaaaaaatacaaaaattagccgggcgtggtggcgggtgcctgtaatcccagctactcgggaggctaaggcaggagaatcacttgaactcgggaggcggaggttgcagtgagccaagatcacgccattgcactccagcctgggcgacagagcaagaattcatcttaaaaaaaaaaaaaaaaaaagttgaacctgggtaaagcatatatgaatcttttccctgtactattattattgcaatttttttgtaacttggaaattatttccaataaaaagttgaaaaactgacaaaactgatttattttattttattttttatttttttgagacggagtcttgcactgtcaccagtgctggagtgcagtggcgcgatatcggctcactgcaacctccgcctcctgggttcaagcgattctcctgcctcagccatcggagtagctgggattataggcgcctgccaccatgcccagctaattttttgtattttttagtagagacggggtttcaccatgttggccagcctggtctcaaactgacctcatgattcgtccacctctgcctcccaaagtgctgggattacaggcatgagccactgcgtccggcctatattttatctttaaatgatcagcagaaaccttgtaagctgaagactgcaatcaacagcttatgtcaagtaaactatagagcagtggttctcagagtggatcctggaccatcatcatctctttaccccttgggaacttgttggaatccaaattcttaagccccatcctaaacctactgaatcagaaactctggggtggggcccagtagcctgtgcttttaagaagtcctccagatatttttaatgtaccctgaggaccactggcagtagataaagtgtttgtttagattctttattctagaacttttgtatagtttaaaagtgacttaataataagcaagtggaccttttgtaagtagacaaagctaatgcttatgtgctttaggagccagtgctgatcacatgccttgcctacctaatatcagttctcctgctctgcatagcaggagaaggagctggagtagtgttggtactatcttatgactttagttatatgtaactaaggacatataacttagttgttttttctgtttatatatagtatacttcctccagagatcttggaatggttgtagatcttctcattcacacagtgtttctgtgacatatgaatgcaggcagaattgcttttgatttttaggtttgtttgcatactacgtagtatataagcttgctgtgatatttttccaaaagggatttatatcatttaagcaaaaatgatacagcttctggattatgtttcctaataaggctcaaacatagaaagtaattatagtaactgaagtgctacagaattactttagtactggtttattaactaatgtcacaaagttagaggattactaaggtggtgttagtaggaagaagcaatatcttgctttagcccgtcagtgttcatgtggtgaatggacagtctctgtattcttgggaaggaaaattcttcttggaaagtgagtatttgcaatgactaggtcagtcacttggtctgttgcctggcattttgggtctactgaaagtgacgttgtagcaaaggccctgtaccttctgcatttcttttcttttcttttttttttttttttttttttttttttggtagaaacaaggtcttgctttgttgcccaggctgcccttgacctcctgtcaagcagtcctcccaccttagcttcctgagtagctgggactacaggcgtgtgccaccatgcctggttaatgtaaatttgtttggtttttttgagacagagtttcactcttgttgcccaggttggagtgcagtgacgtgatctcagctcactacagtctctgcctcctgggttcaagcgattctcctgcctcagtctcccaagtagctgggcttacaggcacccgccaccacgcccagctaattttttgtatttttttagtagagacggggtttcatcatgttggccaggctggtcttgaactcccgagctcaggtgatccacccacctcggcctcccaaagtgctgggattacaggtgtgagccaccgtgtctggcctatttttaaattttttttgagacagagtctctctcagtcacccaggctggagtgcagtggtgcaatctcagctcactgcagtctctgcctcctgagttcaattctcctgcctcagcctccctagtagctgggattacaggcctgccatcgtgcccagctaatttttgtatttttagtagagacagggtttcaccatgttggccaggctggtttcaatctcctgacttcaagcaatccacctgcctcggcctcccaaagtgctgggattacaggcatgaaccaccacgcctggcctaaattttttttttgtagagacagggtctcacgctgttgctcaggctggtcttacactccaaggctcaagcaatcctcctgccttggactcccaaaatgctgagattacaagtgtaagacactgaggccagctgccctttacatttcttaagggtaacaggctcatgtcctttcattattcacaatttaaatattttgagtctttacttctgtgtcaatataacagaagtaacttccttacgaagaaaattccagagggaatctttcaatgtagggatagaaatccattgtgaaactcgagaattgacactgatgatataaaacatgcacagtagccgagtgtggtgatgtgtgcgtgtagtcttagctactcaacagtccgagacatgagctcaggagtttgtgaccagcatgggcaatatagtgagactctgtctcaaaaaaaggaaaaaaaaaagtgcatagtttatggtatcccaactggaggagctaaagacagaatagcttaacatcatttagaaaaaaaattataattgaaaagtgcaaatacacattttgcagtgtttttggcatttacaaaatatgtaaacacttttagtttcttagggaaaagatgacgataggctgattgaaaaatatcatttttacttgtcacatctctaaaacagcagaagttcttgtttttaaccaggagtcctatcaggtttgatacaaccttcggggaggatgtggcagttgaaatttaaggaaacttagtttccttaaggtggctgagcttaaaaaatcaaaatgtttaggaaggcaggagacactaatagggctgggctagtcttgtggaggcagtggatggacgctttggctggcctagggaagaatctgtgattcagtgctgcagggatcaggtgatcctggtgagagaggtcctggaacaagggttaatttggtcatttttggaatgacctgggatttggcttatttattttatttttaaaatttcccgctgggcacagtggctcaaacctgtaattccagcactttggaacgccaaggccagtggatcactcgagctcaggagttcgagaccaccctgggcaacatggtgaaactctatctctccaaaaaaaatacaaaaaaaattagctggatgtggtggtgcatgcttgtagtcccagctacttaggaggctaaagcaggaagatcacttgagctagggaggtgagggtggaggttgcagtgagccaagatcatgccactgcactccagcatgggcaacagagagagaccttgtctcaaaaaaataaaatggtgaatgtaaaataaaatggtagctcacgcctataatcctggtactttgggaggccgagatgggtggatcacttgaggccaggagttacagaccagcctggtcaatatggcaaaactcccatctctactaaaaatacaaaaactagctgggctggtggtgtatgcctataatcccagttactcaggaggctgaggcagaggtcacagtgagctgagatcacaccactgcactccaggctggatgacagagtgagaccctgtctaacgtgacatcacatcacatcacatcacatcacatcgcatcgcatcgcatcgcatcgcatcgcatcgcatcgcatcgcatcgcattgcatcacatcacatcacaacataacataaattttcaaggcagaaatcttgtagtcagccttactgtttgttgacaaggacacggccctgagcacagaaatctcggcagttgataaagccaagaagaaggatactaattaaagaaattttcagattttgcatcttctggcatctcagctaaatagctctgaggaggaggatgccacttaccagttttgagacacaggcaggttatattattttcctgaaaaccatttagctgagatggaatttgcctctctgaggttggggaaggtgtttgaactctgtttacagccctctgtcagttccactgccttgctgagttccctcacccttctttagatagaattgctgttggcttctatagtcctcacttacctcttttgccaaatgctcaggtagccttggctgagtcttccaggtttgataaggctgtatggggcttcctatgccttttggtagttagaagtcactgaagaggtacttctgctacagtgacaagaagaaaagggcattactcagcttgtatagtgcaagggctgcttgactcccagcttcagtctaggcaggggaatttatttatacaattaccttaaatgagcaccagatagaggccatctataaaaactgtttacaggatttaaaaatacgttgacattggcttcttcctttaactttctgcttgcaacagaacatctgatgcgacctatgctgctcactgtttctaggttacattctctacccttgcagtgtaaattaatttttgcctggttccatgtttcttgcttaggttatctcttaggtcttttgtctgatttaaatataagccttcttaggactagatagtggtgatggttgcactactttgtcaatataccactgaattgtatgtattcactcttttaagaatgagtttatttttatttttatttttattttgagatagagcctcactctgtcgcccaggctggagtgcagtggcgtgatctcagctcactgcaacctccacctcccgggttcacgccattctcctgcctcagcctcccgagtagctgggactacaggcgcctgccaccacgcccggctaattttttgtatttttagcagagacggggtttcactgtgttagccaggatggtctcgatctcctgaccttgtgatccgcccacctcggcctcccaaagtgctgggtttacaggcgtgagccaccatgcctggccttaagaatgagttgattgttcttagtctcagttgagtacattgtgttatgtatagaaaatgttatattttcatttttaaaaattattattattattttgagatggggtctcactttgtcacccaggctggagtgcagtggcacggtcttggttcactggcaacctccacctcccaggtacaagtgattcttctgcatcagcctcctgaatagcgggaattacaggcgcctgccaccaagcctaagtaatttttgtattttttttttttagtagagacggggtttcaccatgttagccaggctgatcttaaactcctgacctcaagtgatccattcgtctcagactcccaaagtgctgggattacagatgtgagccattgcgcccagcccattttaaaaaattaaactggcctggtgcggtggctcacgcgtgtgatcccagcactttgggaggccgaggcaagcggatcatgaggtcaggagattgagaccatcctggctaacatggtgaaaccccatctgtactaaaaaatacaaaaaattagccgggcatggtggcgggctcctgtagtcccagctaattgggaggctgagacaggagaatggcatgaacccgggaggcagagcttgcagtgagccgagatagcgccaatgcactccagcctgggcaacagagcaagactccgtctcaaaaaaaaaaaaaaacaaaacaaaaaaaaaccaaaacattaaaccatactctctaactgtgaagaagttgtgatttattctttagtgttacctgccattctttttgtctctttctctctcttctcttctcctctcttctcttctctcttcttccctcccttcccctcccctcccctccccttctcttttcttctcttctcttttcttttctttcagagttttgctctgttgcccaggatggagtgcattggcatgctcacggctcactgcagtgtcaacctcccaggttcaagctgtcctcctacctcaccctccctagtagctgggactatagacatgcaccaccatgcctaattattttgtattttttgtagagacgaggttttgccatgttgcccaggctggtcttgaactcctgagctcaagtgagctacctgcctcagcctcccaaaatgctgtgattacaggtgtgagccttattttattatttttttttgggacagagtctctctctgtcctccaggctggagtgcagtggcacgatcttggctcactgcaacctctgcttctcgggttcaagcaattctcctgcctcagcctcccaagtagcctcccaaagtgctgggattacaggcatgagccaccatgccaggcctctgatgcatatattttttaaaaatagtattttccaccttacagtgtatttaagagtttgtaaatttccttttttgttttctttttggaacagtgttgctctgttgcccaggctggagtgcagtgacatgatcttggctcattgcaacctccacctcccagattcaagtgattctcctgcctcagcttcccgagtagctgggattacaggtgcccgccactacgcccagctaaattttttgtaattttagtagagacaggtttcaccatgttggccaggcaggtcttgatctcctgacctcaagtgatccgcccacctcgacctcccaaagtcctgggattacggacataagatactgtgcctggctgagtttgtaaatttctttctttcttttttcttttttttttgagacagagtcttactctgtcacctgggctagaatgcaataatgcgatctctgctcactgcaacctctgcctcctgggttcaaacaattcccctgcctcagcctcctgagtagctgggattacagccgcctgccactatgcccagctaatttttgtattttttgtagagatggggttttgccgtgtaggccaggctggtctagaactcctgacttcaggtgatccacccaccttggcctcccaagcgtggggattacaggtatgagccaccacgcccggtcatcaaagataatgtttttaatgatcaggagcactttgagatgtttagaacaatctgaaacctgatttccaagccatctcaaaatatactttggtaatcaagacagggaaatgatggtgttatatcatttgtgggactcaactgattttgttgagtattgattttgctgtgggattccttgttctcttggttgtgttgggcctactgctttttaaaaaagtattttgagacagggtcttactctgttgctcaggctggagtgtagtggcgcagtctcttgtctctgcaacctcaatctcctgggctcaagggatcctcccacctcagcctcccaagtagctgggaccacaggtacccaccatcacacctggctaatttttgtattttttgtagacatgggggtcactgtcttgcccaggcaggtcttgaactcctaagctcaaacaaccgtcctgccttgccctcccaaattgctggaattacaggtgtgagccagtgcgcctggccttcttttttttttttaaccactattttttagaactagatttggcctggaaagagaaaaaagatattcctcgacttgatctatatattttatggttcattcatttgctttagaggtagaaggagcaggaaaaagtacaacaaaacaaaatcttacctttggtgtttaatttgaatgcccacagatgcttttgcatttattagtagtgagttttcataattatcaaatatgtagtagaaaaatctggctgtgcatggtggctaatgcctgtaaatccctatatgctgggaggctgaggcaggtggattttctgagctcaggagttcaagaccagcctgggcaacatggcaaaaccccatctctgccaaaaataagctgggtgtggtggcacacgcctgtggtaccaggtactccggaggctgagctgagaagattgtggaggtttcagtgagccaagattgcaccactgcactccaacctgggtgacagagtgagactccatctcaaaaaaaagaaaaaaaaatctccttgtccaggagctgtgttgagtgggctgtggactagcaggaattcatagctctggtgaaagatgactagataatgtcattttttttttaaaagtccctgaatgattgtgacagggtaggaaaatcatcacatagcaaaatcttcattagattttccctaatgacttatcaactgggtttgtgcaccaaacgaaacaacttcctgcctttgtttgtctgaaagtcaaagaaaatattattcaggtatattatattgtactccatgctacagaagtttctggcagcaatataggttatatgccaatcggttaaataatatttgtgggccaggcccggtggctcatgcctgtaatgccagcactttgggaggccgaggcgggtggatcacttgaggtcaggagttcaagaccagccagggcaacatggtgaaaccccatctctactaataaaacaaaaattagcctagtgtggtggcacacgcctgtaatcccagctactcaggaggctgaggtaggagaatcgcttgaacccggaaggtggaggttgcagctgagattgtgccattgcactctagcctggggccacaagagtgaaactgtctcaaaataaataaataaataaataaaataataataatatttgtgtaagtacagggatatgtttcttcaactccaaagtatgagttaatgtgcatatgccaactctagaaataaagtattaagtcaaaactcccaagaaaatttccccaaaaagttgctaacagacgttattttattttatttatttattttgatacagagtctctcccactgtcacccaggctggagtggtgcagtggcatcatctcgattcactgtagcctccgcctcccagattcaagccattctcgtgcctcagcctcccttgtagctgggattacagttgcccaccaccacgcctggctgatttttgtatttttagtagagatgaggtttcaccatgttggccacgctggtctcgaactcctgacctcaagtgatctgcccgccttggcttcccaaagtgctgggattacagttgtgagccactgcacctggcctttaattttaatttctaaaactatggagtaatactacattgagggaacagaattttctattccttcatttgtattattattaaatacagtcatgcattgcataatgacaggaatacattttgagaaatggatcaagtgattttttcattgtgtaaacatcatagggtatatttacacaaactagatgttatagcctactatacagctaggctatattgtatagcctgttactcttcggccacaaaactgtacagtgtgttactgtattgaacaccataggcaattgagacacaacggcatttgtgtatctaaatatagaaaaggtaatgcattgtgccaccaaatcaacaacagctatgatgtcactgggtgataggaatttttcagtgccattataatcttatggaaccattgtttcatatgcatgcagtttgctgttgatcaaaatgtagttaagcagcacatggctgtaattaaaacactattgtttgttataatagaaaataaaatttttctttttagcctctgtattaataaagagcactagaaagtactttgtttatcagataatgaatatgtttgacagatgtacatacgtatttatcaaatgaatctttttttgtgggggaaaccttaactaagaataggcctgtgttttaaaatggctgcctggaggacaagtgctataaggaaatttcagtggtatttgcttgacctggcattaagtggggggaaaaacaagccccaggtgaattgatagatggatgtctgaacatgttcaggaatgatgttttgaacaatgtttgcctcctgtgtcatgtaggcagagagatgataaaagtttttttcccctcttgataccaggtaattctgataccgactaccagaagttagcttcagactccgcaggttgaagggctttgtcccataagaccattcttacttcagacaccaattgcaatgatcagttatcaggtcccaaggttacctacacttatgtctgatttggctacaaaattggaggttcccacagtctaccccttcagatttgataactttctaatatggctgcaaaaaactcagagaaatacttatgtttatcagttttttataaaggatacaattagccagatgaggagatagatagggcaaagtccaggagggtcctgagtgttgagtgtaggagtctctgtcctgtggaatatgccaccgtcccagcatgtagatgtattcaccaatcaggaagctctctgagcccttttgtgtagttgtttttatggaggtctcattatgtaggcaggattgattaaatcattgacagtgggtgatttgctcaagcccctctcccctcatcagaagttggtgggtggtactgaaagttctgaacttctggtcaaggctttgtctttctaggtagccctcatcctgaagctatctaggggctttccaagagttgtcttattagaacaaagaacactcctatcacccttatcactcaggaaattccaagggttttaggagctgtatgccaggaacctgggacagaccaagtatctttctgtgataccacagaatgggaccccaaaagccagctccagctggtgtctagtgcctttagttgggcactggatatcggttacagggcataagtggcccagtggggttgccgtttaacccatctctgctgtattaacctcatgtaccttagctcatggctaggtcgtttcaagtctcacctaatgtcagttgtttcatccttctctggatgcatgttcacttctggaataggtgaatatctgggccactatgtttgctgtcatcctgagcaaacttccagcttagaaaccagctttatggaatcatcccagagcctttattttattttattttattttattttatttatttatttatttattttttgaggcagagtcttgctctgtagcccaggctgaaatgcagtggcaaagtcatggctcactgcagcttcaacctcccaggctcaagcaatccttccgtttcagcctcccaagtagctgagattacaggtgtgtaccacgacacctggctgatttaaaaccttttgtagagatagtgtcccagtgtgtttgcccaggctggtctcagactcctggggttaagcgatcctcttgcctcagcctcccaaaatgttgggattacgggcgtgagccactgaacttggtcccagagccttttagaacagtgttgagttgccctttatttgcaccagggctaaggcagtagaaaaaaaatgtttatgggccatgtttttcttcctagtcaaaataaaaatagccatgtaatctatggaggcagcagatatgttgttagtatacactagaagtcaggaaattcgtactgcctttcagctgctaaagtactgggacatatttgagaagcagtaatgcagaggcagctgtctgatctttgatctctgataatgcttatttcattgcatccctgaaaccaccctgcaaaggatttatcatctttgctgctttgcatatggaatagcataggcccagagagacgtagcttgactgcaatcacatggtgagttagttgtagcttctgcaaatgtacagaactaagaagctacttttcttgtgtgttattctagtgatgatggtcattataattgatgtacctgatattatgctaggtttagggatacagaaatgaaagaagatcacagtccctcatctgggacctctgtttttttggtgtcacctctctgcatagacagttctgcagtattgatgctgctgttctggttgatccttctgtcatgcctgcaccatcttttctgccagactgaagtgttcttgcttggggaaaagcagatttgcaaaggttctctttttcctgattgttgctttgcagattgagtatatttgtttgtttgtttttaagtgaacaaaagttgaatgagattgattactggctctttaaagaataattactcccccttttgacttatgtagcatcttgaggtgatctatgaccgtttgtacttgtcatgacttccattagattaaactctggggcaaagacgttgctcttcattgtgctcatatgacaccattactgccagtggaattgaaataaattgagtaagggcgagtgtttcctaacaaatgttatcctgggcctgaggaaccatcatcaagatggagtggccctgcgattaattttggacttaaagcaaaaaacaaacaaatttttttctttaaataaccagttggcacagatacagaataaaataagatagatccacgtgtagtttttgaaaatttaggtcaggtggctcactcctataatcccagcactttgggaggccaaggcgtgtggataactcgaggttaggagtttaagaccagtctggccatcatgatgaaaccccatctctactaaaagtacaaaaattagctgggcatggtggcgcatgcctgtaaacctagctactcaggaggctaaggcaggagaattgcttgaacctggtaggcggtagttgcaatgagccgagattgcgccactgcactccagcctgggtgacagagtgagactctgtctcaaaagaaaaaaaaatttaagaaataatcatcagtgtatatcttccttttttcatttttctttaaaaaaaaaaacaacccttgtatgcatagctgaaggagaaataattgaaagtgtttataagatttcaaggtgatgggctggacacagttgctcatgcctaataatctgcacgcctgtaatcccagctattcgggagcctgaggcaggagaatcacttgaacccaggaggcagaggttgcagtgggccgagatagtgccattgcactctagcctgggcgacaaaggtgaaactccatctcaaataaaaaaaaagatttcaaggtgatgggtttcatgtggaccaattttatccttccctgatgataatttgacatatgagtcagatattttcctaattttcgtaattcgagtgggattgtgtgtttgtttgtttgttttgagacagggtctcactctgttgttcaggctggagtgcagtaggccagtcatggctcactgtagccttggcttctcaggctcaagtgagcctcccacctcagcctcttaagtagctgggactataggtgcgtgctcccacacctggctaattttttctgtttttttttgtagagacaaggtctcattatattgccgaggctgggactcctgagctcaagtaatcctcctaccttggtctcctaaagtgctgggattatatccacgagccaccacacccagcctcgcatgagattttaacagagcaaagtacctgttggaaatcttgcgcacaaagcctcctttattctgttattcccactgacaggaattcagatacctggatcaattctgtttcggttttgctaaaatctctaacttgatattttacttttctaaaaacctgtattatcaatgaaatggaattaggaaaacaggacctatagaagttaagacctcttcaatctattgatgtttcatggtgccttttatattcaaaatgctttgttctcacaaaaataatactttttgtttggagaaaaaggctgtggggtgtgtgtgtgtgtgtgtgtgtgtgttttcctctcaaagatagcagtaaaataaactccttctgacaaaggcttcttaaaagaaaggagaaaaaaaaaccttcctgctaattgtgttctttaaaatcctgattccccgttttactttctggatgtgtattctgggctttttcaatgtcaaccaatactctcttgatgggaaattcagctggatttgggtatgttcattgggttttcctagaacagtttgaagatccatctcatttacctaaacaaatattccttataattattatgaaaattgggcctgttatagactaataattgacttaaaccatacagggttatgtttgtcagtatctcgtgagtcagcttttctaggggcagagattgaagagttagttctgagattgaatactatttatcagggttttgttttgtgtaccttattctcctgtaaccacctggttggcttttatcatagatacatttttgggaaacaggcaaccacatggttaatgaagatagagaagacgtgaaatttgttacctttatagattttttccccttgccctgttctcattcttctcatttgcctaaaaaaaaatataaggaggccgggtgcggtggctcacgcctgtaatcccagcactgaggcaggcagatcacctgagctcaggagttcgagaccagcctggccaacgtggcgaaactccgtctctactgaaaatacaaaaattagccgggcgtggtagtcccagctactgcaggtacctgaggcaggagaattgcttgagcctgagaggcagaggttgcaatgagccgagattgtgtgccattgcattccagcctgggtgacaaagcaagactctgtctcaaaaaaaaaaaaaaaagtataaggagtattcacatttctatgagatctgtaaatttaggttagaaaatttagttaactgtgttttgtaatagtcatataaataagcacaaagaccctccagacttcttcccagcatgtgacagtggaagaaaggggtaataaagtagatttttttgttactctcattggtaaaaataagtctgtccatgggaaggttaacactgagtttaccatcttgatgattccatatggttcctagcaattctaatctcaaagttggttggcagaatgtttaggtctttgggtagaatatcttctgtgccttttctgtgaattgtaaaattacatttgggaaataaagaaaaaaatccctgattatcccactatagcaatacaaccactgtaaacattttggtatacagttgtgttgcattatatgcattttctgatttttgtatgtccacctgtgcttatttgaactgtatccccctccccacttcccacaccctgttttctcactcctggagtgagcatgggcagtggggatgagactcgcctgtggcttcagtttgtctccttttctaagtttctctgagtgggcattcactgtgctggctgtgattctgttatttaaagcaatatattttcataccttatggcccttaaatgcaagccaacctcttcatctggtgtcaaccaaaggaaaagtgatctgttgcagcgctggaggaaaaactggcaatgttggacttacctaaattgaaagatggtatgttgttcttcaccttggggtcttcaagtatgatttttgacagtgcatggtttttatcttacatgctgacttttgtctctaacccttgagttagatgcaatttaattccagccctttttccctatatacattttacataattatccataagggtatattcatttttaaggctcttaaaatatactatatcaagtatctttccatattgctatacaatttttgtagctgtcatttataataagacattttagttttcgtcttttcagaagaattttgggagctagtataatcagctccttagaatgctttctaatttgcatactcaggtctactcacaatagttctgccatagatatttaaaatagaagcaactgttatgctgctaaattgaatatttcttaactaggcttatttcttaacaggggcatagatgtatgttttcaggcatatgggaccctttctgtaactaggcttctagagtttagaattaagattatttaaattggtctatgatcttattgaagagtgagaggctagagtgtagtggttaaaaacatcaacttgaatctggactgcttgcatttaaagctcagtattggtacttacttggttactttgatcagtttacctatcctttctttgccgccttctacatggctaaaatcaggttaataatatttacctcttaagatagtattgtgaatattaaatcagtatatacaaagtatttagaataaaatcttgaaccaacaagttttatgtaaatattacttactttcataggctagtttgctaattgctgaaaatccttatggcacaaccatgagtcttgaacacacagaataccttttttttttttaacgttttaggcagtatagttaaaccttaaatttctgttcttgtttgatagctaaagtttcagtcagaataaatttagtgttgggcttgtgaatataatattaaatctgaagtatgttgtcaacatatagtattgcagggttgatgtctagaaatgctatattagatgctcataatgttttctgtatctttttcttcccaatgtctacttgtcctttagcaaagtatgaacgttgtcatgaatcttttctctctgtccacagattctgtgtgctcctctgggccacagtagttacttctttaagcacagaaaggaaacttagggctttgccagttttagtattagttctctatgtttttcatccgggcagctatggagagggttgctttccacacacctgggtactccattgatatgttctgtagaggtaatcaacacactagagagtacacctgtttgttccatggctaaccctttctgattgtagacatgcatttgagtgtttgcagtggatatttggtgctaacaggtgtcttagttccttctgttattctgtaatgtttcccaagaatattcagagctgtttataaaatgcagagtgatttatgtattaggtgttcaatgagtttgatcaagaagattcacttgaaaggaattaactaacaaagcagtttccattgttaataggatatgcatgctgtttctctaaagtatttttatttcttcaaagagttattaagcagaggagactgattttgtggtaagtttggaggggttagttttaatccacgttggtcaaaactaaaagtagattagaaaatctatttctcatcctacagtagtgctgaggtttctagtagattgtttttcttcttcctagtcattttctgaaactcaaaacaagaatcaacctataccattgtaatgtttcacagttaacttggagtatttaacaagtctaaaatcaaagtttattgttattagtaaaacattttgaagccattcatttcatgtgacaaggaatcttatttcaccaaatgtggtatgtttttaaacttatactttctattgttctagttttgttgatctttgatattgatgcagtgatatcagtttcctattgttatatatactttgtggtcaaaattatcatagggttttgtgtttttctttgcctgagttttgcttctcatctgaacatcacatctttttcttgcggttccatttacacagtgtgattcctagagatgagcttctttatcctctgaggcagtggaggaagcatggaagccacttggggagcactgcattgacaagtgtatttttgtagtcacatggtggcagtgtcagggaaattataggactggttagattctagttcagcaacctataaatcccaggacttcccagtctcgtgagtcatacaactctcaggcctgtgctgcaaatgacacttgcttaggagtaaggtgaagggtattttatagctctaatggtttgtacagttcttaaacatgtattgattgctaacaactgctgtctttctcccagcttgccccaccaccagtctttgtgcataagcacaattttggacatagttatttgtacttatttatgcttttacaccttcttccttttataaagattttagctggtttatgacttgagttgaaacaaggaaaaaaagaggagacctgaaatggtctgtcccctgccaaccagaagcctcctgtggtatccaaacagaatagttgcctcagtctgtcagcacttctgtctttgaaggtggtttctgcttgaaaagtggtgactattagcatagcctggggataattgcttttttttcttctctcgggatacctttttttttttttttttccagatactttcttgctcttgtcgactttgtttttccagaagatttagcctgtggttaaaatgtttcgggtccccacgtgaactctctgtgggattacccaattctggggtaccttcaccagatcaccagtgctaaagagggcaaaggatcttcttggttaatagaaaaggctgttttggaatgaatctcaaagtccagaaacatcgagacttttcttcaatacttttttctatttggggtagcaactttacctagtgtaggggagggaggggttagttgggagggcttgtgtttaaggggttcagaaacaggggatttaagtgtgtcttttgtgtttgcaaggcactaacaccactcccgtctgtatttaaatgctgtccccaggttacgactatggctatgtctgcgtggagttttcactcttggaagatgccatcggatgcatggaggccaaccaggttgctttatacttcggtcaaatgatgctggaaggatatatttttttatatatggggagggagggtttcaaatgattttactttggaaaggtacaagaagtctatctgtggagcatactgtattccaaccatcggttgtgaggaaaatctttaaaaaggctggaaagctttctctacaaaacttaatgggcacagagtgcattttaaaagctagagcccagttgcttttggactagattccaaagacaatagttggaaaaaaaaaaaaaagacacatctggagtgtttccttttggagtgtgactgagatggtaatcctgatgcaaagaatgatccttgattgtctgtgaccccaaggatctgcctagcacagaaattctaggtcaatagttacacccagacctagggtgaagacctctgatggtgacttctgtggcatcagatcctgcctgcaggggctacttccaaaagagagctatcagggaagagagaggagtggattgttggtgtctattgcattcatcattgttttttgccaattggagttgcatactcaagtccttggctgcgtatagtcagagctggtgaatcagaatctgtactcaccttacgtttgaactatctggagttactcagcttgccacctagatttttcatctatgtctttaatagaaccctacctggtagttttgagaggaattaataaataggtagaatccttcttgttatggtgcttccttggggaaagttgttttctttgggttgtttcagttcctccatctgtaaagtaggaaaagaaacttaggaatatagtttgatgtgttttttttttctttttttttttttttaatgtacccactgcctatacttaacagtgtgaatacagtgggcccagaatctttctttctttctttttttttttttgagacggagttttgctcttgttgcccaggctggattgcaatggtgcgatctcggctcactgctacctccacctccctggttcaagcgattctcctgtctcagccccctgagtagctgggattacaggcatgcgccaccacgccggctaattttgtatttttagtagagatggggtttctccatgttggtcaggctgctctcgaactccagacctcaggtgatctgcctgcctcggcctcccaaagtcctgggattacaggcatgagccaccgtgcccagccaggcccagaatcttaaaagaaggctctgccagagaagagtagttattagatgagaactcttcttcttctgtagcctgatgctttgttcagctttgtttaactcagtgtggctcattatacgtacttttctcttcttggccaagttctcctcttatgggtatggagatgacatgctctaaatgctttgggagcaagcactcattagagaagacttttgatgtatccttatcttgttagtagtttaagcttgtcagatccttaaagaatgacaggcttaggaccatatcccctagacttaagaggattctcattgaccatttgttcagtgtccatcactgaatcacttaccaaatacagttgacactctgtatccacaggttccacacccatagattcaaccaaatgctgattggacatattcaggaaaaaaatgcattaacactgcaacaataaaaaataatacaggccaggagtggtggcttactctgtaatcccaacattttgggaggcccgggtgggaggattgcttgaggccaggagtttgagaccagcctgggcaacacagggagaccccatctctacaaaaaataaaagtgaaaaaattagccaagtgtggtggctatcaacttgggaggctaagatgagaggattacttgagtctggattgagactgcagtgagctgtgatcactctgctgcactctagcctggggtgacagagtgagaccccgtctcaaaaaacaaaaaagtacagttaactatttatatagtctttattaggtattagatataagtaatctagagatggtttaaagtatgttggaggatgtgtgtaggttgtatgcaaataccatgtgattttatataagggacttgagcatcctgagatttttgtgtccttgtgggtcctggaaccaatcccctgtggacaccaagggacaactgtactaaccatgtgtcagaaactgctacatgccaattttggagagaagaaaaaagcttccaatctgtgtgctttcggtggatcctattctgacagtctgtccaattttgagaacactcattaattcataagcagtgaatgtgattaagtcgttcgcctctgtgctaaatactcaatgtaatagctgatagctgagtgctataaagaaaatgaagcagggtattgggagaatgcatcatggtggcaattttagaggggtggtcagggaaacttcttgaggagtgacatacatttaagttgtgactcttggcgaataatgtatccagaacacttactatagtacctagcacttggtagcatttgaattaatttgaaattcagtgtccttctttctctctcttaccctcctccacatgtcaagtaatttccaattataaattttgtgtgtgtgtgtgagacggagtccagccaggctggagtgcagtggcgtaatcttggctcactgcaacctccgccacccgggttccagagatcctcctgtctcagcctcccaggtagctgggactacagatatgcgccaccatgcttgggtaaattttttttctttttttttttttttgagatggagtctcgctctgttgcccaggctggagtgcggtggcacgatctcagctcattgcaacctctacctcctgggttcaagtgattctcctgcctcagcctcccaaatagctgggattacaggtgcccgccaccacacctggctaatttttgtatttttagtagagatggggtttcaccatgtttgccaggctggtctggaactcctgacctcaggtgatccgactgccttggcctcccaaagtgctgggactgcaggcgtgagccaccatgtcctgccaatttttgtattattagtagagatggggtttcactatgttggccaggctggtcttgaactgcagaccttaggtgatctgcccaccttggcctcccaaagtgctgggatgacacgcacgagtcaccgtgcctggccttcaattataattataagaaaataaatttatttttatatctgaagtttaataaaactaattctttaaggaaatggatgtggattaaactccttatgacatagtaaacaatcttatgagagacataagaatgtgagggaagaagtcctgtctcctcagggtgaataaagtaaatattttgggaggctgaggcgagcggatcatgaggtcaggagagcaagaccatcctgaccaacaaggtgaaaccccgtctctactaaaatacaaaaaaattagccaggtgtggtggcgcacgcctgtagtcccagctacttgggaggctggggcaggataattgcttgaacccaggaggtggaggttgcagtgagccaagattgcaccactgcactccagcctgctgacagagcaagactctgtctcaagaaaacaataaaattgaataaataaataaataaataaaataaatatttgtggaagataaaatgtgtttgtaggccgggcactatggctcaagcttataatcccaccactttgggagaccaaggctggaggatcacttgagcccaggagtttgaaatgagcatggggtaaatagtgagaccctgtctaaatttaaaaaaaaaaaaaaaaaaaaaaaagtctttgtctatcctttcccccagttttacttacagaccaaattggtatggattctgagtcaccacgatctgcttggcaactcttagtagagcctgagtgtgtgtgtgcctctgagaaggttactccgaagtactttgagtttttttgtaactctttgctattccgactcttgatgtgaaatgtcttttatttatcattggctggtacttgtaggcctaggggatggaaataaaggaattttctgctagcttgctttgtcaaatattgttgggtatgtgtgccttcgtgaagttgctcaagatgataaccaaggtccctctagccttttcctggtgcctagatcaagctgttaaacagtaggatgctctgcagcagtactgagctttgtggctgtggtgaccgatcagggtatcacttaggcagcagctgtctatctggagaaataatttccaacaggtatgaaggtatgaatctgttagtctgtaccatcaccatttctgtctaggagaagggggcagccagcaagcactgtcaggcagagcctttcgttccacccttcctgcaaagtgtatttctagccctgtcatatgcccttggctttctttgttgtcaagtctctgggagattgagggtacatattatttccttctgctttgtgtgcccttgcactgggacttggggaggggagtaagaagtattgtgttaaaatgttaatccctttcattggttgcccagttgtgagtactagccctctcagactgttggcatttggtatgcagggattagcattttatgttctcaagtatgctggtgtgatgcttattgtctattatttggccaaattagtcactaaagtgcccttatagaagataactctgggagaggtatttatttctctgaaatttttattctcctttcccctttcctttcctttcctttttctttttctttttttctttcctttttctcccctcccccccctcccctctcctcttattggagacaaggtctccctctgtcacctacgctggagtgtagtggtacaatcatggctcactgcggcctcgatctcttgtgccgaagtgatcctcccaactcagttctctttagtagctggaactaccaccaccacagctggctatttttttttttttttttttgtagaggcagggttttgcaacattccccaggctggtcttgaactcctggactcaagcaatttacctatctcggcctcccaaagcactgggattccaggtgtgagccactatgcctggcctatttttaaatttttatttttttgagacttagggttctgttctgttgctcaggctggagtacagtggtacgatgagagctcattgcagctttgaactcctgggcttaagcaatcctctcacctcagccttctgagtagctggactacaggcacctgccaccatgttcggctaattaaaaaaataacaaactctgttcgtaaagatggggtcttgctgtgttgctcaggctgctcttgaactccttgcctcaagtgagcctcccacctggacctgccaaattgctgggattataagcatgagccactgcgcccagccttactcacctttttgtatgacactatcagtctttctaaagtgcaaagaaaaagggttctgttatcatctgatgtgaaaattcctttaaacattgactttttctggtgtgaggaatgaaagctgtggaatacgtgaagttttatgaaatagtgtttttttgtgtgtgtgtcaacaaaattaagagagtttgggttattgaagatacaagagtgtttttgaaggtatatataggaaaccaaatctcaaatgtggtctgtccttgtgattaaaattagagcaatagggaagccaggtgtgatggctcacacctgtaattccagcacttttgcaggctgtgacaggaggatcacttgagcccaggagttgagtccagcctgggtaacatagcaagacctcatctctacaaaacattgttaaaaattagctgggtgtagtggcacatgcctattgtcccagctatttggaaggctaaagtgggaggattgcttgagcctgggaggtcaaagctacagtgagccgtgattgtgccactgcactgcaacctgggcgacagagagatcctgcctcaaaaaaaaaaaaaaaagcaacagagaaagcttatgtttttagtgatgagaatgctatttgtgaggccatgatggaaaaaattgaagaacctagtttgttggaaacttaaattggtagtaaagacataatactatctgaaacactttagtacttaaattgtgtgcattccaagcaacaaaaccaataatctgtaggttgaaggttgtagtgttacctaaacaactatcaccccaaaaacacttcattgaggagtatccagcatcctagccagagctcaactgtataacttatggctggaatcatgccattcttgctggaaacttcaatttcagtactttttccttatcaccctcagaagggtagtagtagaaacatggggaactgcattctaaaatgagtgtataggttcataacctagctagaaaaaaaaattaaaacaattaatgagtacaaaccaagggttattgaagagtctcgctctcaagagagttggggtattcaagaaaattgaaagtgagtttaaggatcgatgacttgattacacattttggctatttatccactgattgagacttttttttttgagatggagtctcactggttcgcccaggctgtagcgcaggggtgcgatttatccactgattgagacttttttttttttttttttcagatggagtctcgctgtgtcgcccaggctgtagcacagaggtgctcactgcaacctccgcctcctgggttcaagtgattctcctgccttagcctcccgagtaactgggattacaagcatgtgccaccacgcctggctaatttttgtattttcagtagaaatggggtttcaccatgttggccaggctggtcttgaactcctcacctcaggtgatccgcccgcctcggcctcccagagtgctgggattacacatgtgagccactgtgcccagcccagtgattgagactcgactggacatgaagcagtataatgtagcagtataacatagtattctggaagcagactaccgggggttgcatttcggctccatcactttctaaggtgtacttgaacaagtggcttaacctctctgtgttttaacgtactctcacacacatctagggattaaataagttaatgcatgtaaggtgattagaactggggctggtggccgggtgcggtggctcatgcctgtaatcctagcaagttgggaggccaagacgggcggatcacgaggtcaggagatggagaccatcctggctaacatggtgaaaccccgtctctactaaaaatacaaaaaaattagctgggcgtggtggcgggcgcctgtagtcccagctacttgggaggctgaggcaggagaatggcgtgaactgggaggcggagcttgcagtgagccgagatcgcaccactgcactccagcctgggcgacagagtgagactccatctcaaaaaaaaaaaaaaagaactggggctggcacaaagtgaatgttgagtgcatctttgttgttttcacacaacttctcatctgaaacaaagtcttaagttacagcagctctggtcttggcttaatggagtatatggcaaaaagaggatttggtggcagtgcctaggaggatttttttttttcccatcaacaatacttctcatttagcctgttgattgatacggattatcaggggactccttccagcttccctagttggagtttttttttttttttttccttttttgagacagggtctcattctgtctcctaggctggagtgcagtggtgcgatctcggctcactgcaacctccgtttttggggctcaagccactctcatgcctcagcctcccaagtagctgtggctacagacacgtgcctggctaattttgtatttttgtagagacggggttttgccatattgcccaggctgatctcgaactcctgaggtcaaagcgatctgcctacctcagcctcccaaagtgctggattacaggagtgagctaccatgtccggcccttagtaggagtttctgctgccttagccttcaagagagaatcttaaattttcttttttttttttgagacagagtctggctctgtcgcccaggttggagtgcggtggcgtgatctcggctcactgcatgctccgcctcccgggttcacaccattctctcgcctcagcctcctgagtagctgggactacaggcgcctgccaccacacccggctaatttttttgtatttttagtagagacggggtttcaccatgttagccaggatggtctcgatctcctgacctcgtgatccacccgcctcggcctcccaaagtgctgggattacaggcgtgagccacctctcccggccataagaatcttaaattttctaaagagaaagagcaggagacagacagtaccacatggagtatgtttaggccatgtaggaaatctagcctgtggctttaaaaccgtaagttctaaattagctgggtatggtggtgcacacctgtagtcctagctactctggaggctgaggtaggaggatcacttgtgcccaggagttcaaggttgcagtgagctgtgatggtgtcaccgcactccagcctgggcaacagaatgagatgctgtctctcaaagcaaaacaccctaagctctgataaccagcccattatttgccacatctcaggctctttaattatgagaggtgctctaaacgactcattttaattctctcgaatttgaaaaataaacatttatcatttggcagttttaagggaaccttctgatatgtgtcctacaatgggtttataattatttttgtcacaaatcatggtttatttctatggattaaagtagtttagttcttaatttgttctaaattggaaatatacctatatgttttaacctcgtgcttcagtgttgtcacatctcattagttcaggggtcgtacaaaggcatagttcagttagccatcttgattataactttggtttatgaccttatgtatgttcagatggtatagggttcgtagcacagaaagatttagaattccagcttcattacctcctggctcttttgtaacttttttttttttttttttttttttttgagacggatcttgctctgttgtccaagctggagtgcagtggtgtgatctgggctcaatgcaacctccacctcccgggttaaagcgattctcctgccttggcctcccgagtagctgggattacgggcatacaccaccacgcccagctaatgtttattttagtagagatggggtttcaccatgttggccaggctggacttgaactcctgacctcaggtgatccacccaccttggcctttcaaagtgttgggattataggcgtgagccaccgtgcctggcctctcttttgtaacttctgaacctcagttttctcatctgtaaaatgagaggatgatcataataccacccatagtgcagttgtgaggttagagtatgtagtatatgtaaagtgatcagcatgataactggcatgtggtaagtgctctgtagtaaagggtgattcataacactggactctgcttggttgtaccaacttctcattttccctggctccttatccacctcttgggattcagagttggctgaaagtggcaggcagtgctgctttgggtggcagcttgattttagacagccagttcacatagtgcttttgttcaggacctctcgggatttctagacagacagcaagagagttgggctaacacctgtcatgaagtgtctaaggaatgagtgcacaagcattcaggcatgtgagggcagaagaccatgaccatacctgccttcctacagtaaacagcctgttgtttctgcaggtagcattgcaggtagttcttttatcagaaaattcttgtaggctgcaggtgacattgagtgttattaggtatcttcttcattcaagttgaacttggaggttacagtatatctttatgtccccctctccacaggtgtttaagtgttgtcattcatcctctagtgcatagattatgtgtgcacatttcttgttaaggatattgatgaactgatagtttatctagaataatgtttattttatattttattttattgagacagggtcttgctctatcacccaagctggagtgcagcggcatgatcatggctcactgcagcctcaacctcctgggttcaagccatcctccctacctcagccttctgaatagttgggactacaggtgtgcgccaccacacctggctaattttgagggggtagaggggaggtacagatgagatctcactgtgttgtccaggctggccttttgctcctggactcaagcagtcctgcctcagactcacaaagttctggaattacagatgtgagccactgtacccagcctagaataattattatttatttttatttttatttatttattttttgagacagagttttgctcttgttacccaggctggagtgcgatggcacagtcttggctcactgcaacctctgcctcccgggttccagtgattctcctgcctcagcctcccatgtagctggaattacaggcacaccaccacacctggctaatttttgtatttttagtagagacagggtttcaccatgttggccaggctgctctcgaactcctgacctcaggcaatccacccgtctcggcctcccaaagtgctgggattacaggcgtgagtgatggcacccagccagaataattagttttaatctcacagggtgagatttgtgaggttaattttgtatattaatgatgtatatattaccaaaatctgtggtcaagtgaaatttgtgcttaatctttgcaaatgctatttccaaaggaaaatatgtaggagaaaaggtggtgtatcacaggatgtagagtagtggttactgggcacaagggtggccggggagtcggggggtggcaggagaggatagagaatgataactgattgatacagggtctcttttttgggatgaggaaaatattttagaattaaatagtgaggatggttgaccaagcttgtgcatgtactaaaagccattaaattgtatatactttaaaacagtggattttatggtatgtgaattttatctcaattttaaaaaaagtctttaaatgtagtatgaaactttttttaaggccaggcagggtggctcacacctgtaatcccagcactttgggaggctgaggcgggcagatcacctgaggtcaggagttctagactagcctggccaacatgatgaaaccctgtctctaccaaaaatacgaaaattagcccagcatggtggtgtgttcctgtagtcccagctactcgggaggctgaggcaggagaattgcttgaactcaggaggcagaggttgcagtgagctgagattgtaccactgcactccagcctgggcgacagagcaagactgtctcaaaaaaaaaaaaaaaaaaaaaaaagtttttttagggttccagcacaatgggaatgagtccagatctaaaataaagtacagattcatttaccaccctccaccctaccccaaccccccaaaaagattgtctatcagtttgtcaggaagttagagtaaaatggtcttaaaatgcatcaagagggctgggcacagtggctgatgcctgtagtttcagctactcaggaggctgagataggaggatcacttgagcccaggaattcgagtgagccatgattagatcactgcactctagcctgaatgacagagcaataccttgtctcttaaaaaaaaaaaggcatgaagaatttttttgctaatggtatctacttaccacagaggaacatttaagctaaacatctgaaagattatggatggagttggtaacaggctccatttgaactggttatgtagtttatgctcagtaaggttgaacggactttctgctttgagttattcacagttaaaaataaaggactattttgaagtagaccgaaaatgaaaataacattaagaaatccttggactaatttttaggggagattcctgtaatcggatggtttgtagttgtcaatgtagacctttcctggtttcctgaaattgctaatcaaagctcaaagccatgggaaaagactggattgcagctagaatgtgtgctctccacatatgtctttcttagaggcctctttcaagcagcattgacactatggctatcatctttgaccctcttagtatacagagagttgtaggttttctttttttaagggggaaaacattattgacataaattatatatcataaaagtcactcattttaactgtacaattcaatgattttttagtaaatttaccaagttgtaacatttattattataattagttttacaacatttttcttttctttctttttttttttttctttttctttttttctgggacacaggatcttgctctgttgcccaagctgagtgcagtggcatgaccatggctcactgcagcctccacctcccgggctcaagcaattctcccacctcaacctcctgagtagctggaactataagttggaaccatcgtgcccagctaattttttattttttgtagagagaaggtcttgctatattgtccaggttggtcttgaacttctaaactcaagcaatccttcctgcctcaccttcccaaagtgctgggattacaggtgtgaaccatcatgcctggtctagaacattttcattacctcaatcggatccccgtttggggatacatttacatttttaattttttaatttttattttttttagagacgaggtctcaatctattgccaaggtggtcttgaactcctggtttcaagtgatcctcccaccttggtttcccgaagtgctgggattacaggcatgaaccaccatgcccagtccattccaattttttttttctttttttttgagatagagcctcactctgtcgcccaggctggagtgcagtggcgtgatctcagctcactgcaacctccacctcccgggttcacgccattctcctgcctcagcctcccgagtagctgggactacaggtgcctgccaccacgcccggctaagtttttgtatttgtagtagagacggggtttcaccgtgttagccaggatggtctcaatctcctgaccctgtgatccgcccgtctcagcctcccaaagtgctgagattacaggcgtgagccaccgtgcctggcccattccaattttttacaaaagtgatttcagacttataaaaaagctgcaaaaattcctgtgttcttttcacctagattctacctttttttttttttttttttttgaggcggagttttgctcttgtttcccaggctggagtgcaatggcgcaatctcggctcaccacaacctccccgtcccgggttcaagcaattctcctgcctcagcctcccaagtaattgggattacagccatgcgccaccacgcctggctaattttatattttttagtggagaccaggttcctccatgttggtcaggctggtattgaactcccgacctcaggtgatctgaccacctgggcctcctaaagtgctgggattacaggcgtgagccaccgtgccaggcccacccagattcttcttagcacatttgaatgcagatttttgaatagttatgatctattctcattgaaaaagggacatcatttgacttgacctcccaccagactcttcctttgaggttggatggaggtgcttaatggatgctgtggatggtgtgtgaatttccattgggttgagtggatgatgtatgtggaaggcgattgggatttactttgtcggtgtctccaagaggtcccccactgggctttgtcaggtgctggggttggaggtcaagaagtagggcaacatctaaagcttctactcctgggcactgtgaggtttttataggtcttttaaaaaaaacagtgaataggccgaacgcggtggctcacacctgtaatcccagcactttcagaggccgagggaggcggatcacgaggtcaagagatcaagaccatcctggcctcgtggtgaaaccccatctctactaaaaatacaaaaattagctgggcatggtggcacatgtctgtagtcccagctactcgggaggctggagcaggataatcgcttgaaccctggaggtggaggttgcagtgagcccagatttcaccactgcactccagcctggcgacagcgaggctctgtctcaaaaatatgttcttccatgagacagcgggcatttggatgcctgatacaaaaagaggagggactatgtgctagtcagctttagactgagaagcagcagcaaccatggcaaaggggaagcaaactttcctgagtggccttaataatgttattcgtcaggcagtggctcttaaacaggggcttcaagcagtgatttttgacatgctcttctcctccccaaccactggacatttggcaatgtctggagacatttttggttgtcaccactgggagagggtgctactggtatctagtgaatagagccagggatgctgctaaacatcctacagtgcaaagggcagctctccacacaaagaatcatctggcccaaaaatctctattgctgaggttgaaaaatactggtgtaaggagacaagagttgtggttagtcagaaaggatgacctggcttgccgtggattgtcttataataatcagttatctctttccttgccttattcctggtcccaacagagtgaggattggcaagggggtttgggaatatagtgggaatgctgtgtagtgagagtgcaggcacggcactccagactaccagtcacgagcttagcctgtgtccttggggtaggagctgtagaataagacctattttgatatgtggaccagaataagttctttaaataatcaaaggtaataaacattcttaaaatatactatcactaaggtagtctgtcatccagcagaatgagggagtagtcagaagattacacatatttggcagcaattactagaaaaaacaaacaagttgagagttttcaaaatagatgttacttcatatttcagatagttttccagggaatattgaaaatgcaagtgcagattttcacatccttctttatactgattaaaacatttgaatctattggatcatcttttcattaggctttacttcacagggccatctactggatcctgtatgctgatatagttaaggggactgacctcaaagtaaaagatgcatatattttatcttaatacaatatcactttgctgtgaaggggagctgctgtgtatatagaatgctgtgtaatagtgattgggctgttgggaatcacattggaaatatcagtaagcaactcattttaacttttgttaacacagttaagtgctgagcacctcttgtgtttgaagctctgtgctaggtaatatgtgttcattaatgaatgaaaaaacaatacaaaaattagccaggcatggtggcgtacacctgcagtcccagctactcaggaggctgaggcacaagaattgcttgaacccagaaggtggaggttgcggtgagccgagatcacgccactgtactccagcctggccaacagagtgagactgtctcaaaaaaaaaaaaaaaaaaaaaaaaagttttttatttttaaattttttgttttatttcttttttacttttttttcttttgagacagagtcacgctctgtcacccaagctggagtgcagtagcaccatcttggctcactgcaaccccccgcctgccaggttcaagtggttgtcctgcttcagcctcccaagtagctgggactacaggtacccaccaccacgcccggctaatttttgtatttttagcagaggcggggtttcaccatattggccaggctggtctcaaactcctgaccttatggtctgcccgcctcagcctcccaaagtgctgggattacaagcatgagccactgtgcctggcaaaatttttattttattattattattatttttttttttttttttgagatggagcctcgctctgttgcccaggctggagtgcagtggcgcgatctcggatcactgcaagctccgcctcctgggttcatgccattctcctgcctcagcctcctgagtagctgggactacaggcgcgtgccaccacgcccggctaattttttgaatttttttagtagaggcggggtttcaccatgttagccaggatggtctccatctcctgacctcgtgatccacctgcctcagcctcccaaagtgctgggattacaggcgtgagccaccgctcccggccaatttttattttatttttaattgataattgtacatgtttatggagtacccatgttatgatacatgtgcacattgtagaataatttttaattgataattgtatacgtttatggagtacccacgttatgatacatgtgtacattgtagaatgattgaatcagactagttaacatatccatcacctcatgtagttatttctttgtagtgagaacatttaaaatctcttttagcaattttgaaatagatacaatacattgttattaactatagtcaccatgctgtgcaatagataactaaaacttcttcctcctgtctgactgaaactttatactctttgactaacattctcccgttctcctccacccgccttctccacccacggcctctggtaaaccaccattctgctctctacttctgtctgaatatttgatttttttagattgcacatgtgagatcatgcagtatttgtctttctgtacctagtttataatacacttagctaagtgtccttcatgtttttccacatgtcgcaaatggcagaatttccttcttttttaaggccaaatagtatttcattgtgcttacataccacattttcattatccattcattcattgatgggcaatggatgaatggatatcatggctattgtgaatagtactgcagtgaacatgggaatgcaggtatctctcagacataatgatttcagtttcattggatatatactgtacccaaaagtgggactgctagatcatatggtgattctcgttttagtttttttttttttaagaacctccatacagtttccaaaatatctgtactaatttacattcccacagtgtaaagggttcccttttctccatatcctcactaacacttgttaccgttcatcttttttatagtaaccatgctaacaagtatgaggtgacatctcattatggttttgtttgtttgtttgagacagtgtcttgctgcatcacacaggctggagttcagtggcgtgatcccagctcatttgcagccttaacttcctgcactcaagcagtcctcccacctcagcctcccaggtagctggtgtgtcaccatgcctagcgtttttttttttttttttttgagacagagtctcgctgtgttgcccaggctggagtgcagtggtatgacctcggcttactgcaatctctgcctcccgggttcaagtaattctcatgcctcagcctcctgagtagttgagattacaggcatgtgccaccacacccagttaacttttgtatttttagtagagatgaggtttcattatgttgtccgggctggtcttgaactcctaggctcaagtgatcctcccaccttggtttctgaaagtgctgggattaccagcatgaaccactatgcccagctccttatggttttaatttgtaattctctgataattattgatgttgaacattttgtcatatattttttggcaattttttttcttcttttaaaaattttgtttttagccataaggccaggaatgcacgtatgtcttctttcaagaaatgtctgggctgggcacagtggctcacgcctgtaatcccaacactttgggaggccgaggcgggtggatcacgaggtcaggagatcgagaccatcctggctaacatggtgaaaccccgtttctactaaaaatacaaaaaaattagctgggtgtggtggtgggcgcctgaagtcccagctatgtgggaggctgaggcaggagaatggcgtgaacccaggaggtggagcgtgcagtgagccaagatcgcgccactgcactccagcctgggcgacagagcaagactctgtctcaaaaaaaaaaaaaagaaaaagaaaaaaaaatgtctattcaggtcctttgcccattttttaatagggttatttgttttcattattgagtagtttgagttctttgtacattttggatattagccctttatcagatggaagatttgtaagtattttctctcaatctgtgcattgtttcttcactttgttaattgtttccttgctttgcagaagctttttagtttgacgcaattccatttgtctgtttttgcttttgttgcctggcctttgggggtcatgcacaagaaatcattgcctagaccagtgttgtggagctttccaactatagtttcttctagtagttttacaatttctgttcttacatgaagctatgaacagttcctgtatagttatccctgccacccttctcccaacattacatacacagcctccccaactatcagcatcctgcagtgtagtgtatatgttacaatcagtgaagcaacattgatacatcattatcaagggttcactctgggtgttgtaccttctatgggtttccacaaatgtatgtcatatatccaccattatagtatcatacagaatagtttcattgccctagaaaccctcttttctccacctgtttgttctttcctcttgcaaacccctgcaaccactgaactttttattgtccgtgtagttttgccttttgcagaattttatatagttggaattggacaatatgtagccttttcagattggcttctttcatttagtagtacatttctctatgtagtctcattcctctatgtctttttgtggtttgatagctcatttctttttagcactgaataatatcccattgtatggatatatcacagtttattcattcacctactaaatgacattttggttgcttccatgttttgacagttacgaataaagctgcaataaatatccatatgcatgtttttgtacggacatacgttttcaactagtttgggtaaatacaaggggcatgattactggatcgtatggtaggagtgtgttttttttttttttttttttttttttttttgacacggagccttgctctgtcaccagctggagtgcagtggtgcgatctcggttcattgcaacctctgcctcccaggttcaagtgattcttctgcctcagcctcccaagtagctgggactacaggtgcatgaccatgcccagctaattttttgtatttttagtagagacagggtttcaacatgttggccaggatggtcttgatcttgtgacctcgtgattcgtccacctcggcctcccaaagtgttgggattacaggcgtaagccactgcacccagcctgtagagtatgtttaattttgtaagaaactgtcaaacagtttttccaaagtagcgattacaatttgcattgctaccagcaatgaattagagttctgttgctctgtatccttgccagcatttggatggtagccatttttatttttatttatttattttttttttttgagacaaggtcttgctctttcacccaggctggagtacagttggacgatctcagctcactgcagcctccgcctcccaggttcaagttattctcctgcctcagcgttctgcatagctgggattacaggcacgcaccaccacacccagctaatttttgtatttttagtttcaccatgttggctaagatggtcttgaactcctgaccttaggtgatctgccccgccttggcctcctgaattgctgggattacaggcatgagccaccatgcctggcctcctttgggtatttctattggacagtcatgtcattcatgaataaagacaattttatttcttcctttctaatccatataccttttatgtccttttcttggcttattgcactagctaggatttctagtacaatgctgaaaggagctgtctttctcttcttttctctcctttccttgccttttccttttcttctttttctttcttttcttcctatagagatagggtctcgctatgttgccaaaactggtctccagctcttgggcccaggtgatcctcccacctcagcctcccaaagtgctgggattacaggtgtgagccaccacacctagctgaaaaggagctgttgagaatacatccttgtcttgttcctgatgttagtgggaagaaagcatctagtctctcaccataagtgtgatgttagctataggtttatcaagttgaggaggttcccctctgttcctagtttgctgagaggtttttttttttaaatcatgaaaggggattggatttttgtcaaatgatttttctgcatctattggtatgttcatgttaatttcttcttcagcatgtcgatgtgatggattacattaattgatttttttttttttttttagatgcagggtctcactctgttgcccaggctagagtgcagtggcacaatcacagctcactataacctcaagttcctcagctcaagcaactttcccatctcagctttccaagtagctaggactacaggcacataccaccatacccatctagttttttaaaacattatttgtaaagatgaagtctctctattttgtccaggctggtctggaactcctgggcgggctcaagcagtcttcaccttggcctcccaatttgtttggattacaggtgtgagccactatgcccagcctcatttttgttattagtaatttgtatcttctttctttttttcttagactggttaaatgtttatcaattttattgatcttttcaaagaaccaacttttggtttcactgatttatctctattgatttactgttttcaatttcattgacttcagctctaatttttattattttcttctgcttacttttgatttaatttgctcttttactggtttcctaaagtggaagctcagattattgatttttagatttttcttctcttttaatatatgcattcagtgctataaatttccctctcagcactgctttttgtgtatcgcacaaattttgataagttgtgtttttcattatcgtttacagttgtgtgttaatccccatacagttaatgatggggataaattctgagaaatgcactcttaggcaattttgtctttgtgcaaataccatggagtgtacatacacaaacctaaatggtatagcctgctacccacctaggctatatcatttagcctattgctccttaactgcaaacctgtacaacttgttaccatattgtatatgataggcagttgtgacacagtagtatctaaagatagaaacggtacagtgaaaatacagtatttcagtattttgggaccaccatcatatatgcaagcccattgttgactgagatgtcattatacagcatctgaccataattcggaatatttttaaattcctcttgagatttcttctttagcttgtgtgttatttagaagtatgtttttaaatctccatatactttgggatttttacaactatattactgttactgacttctagtttaattctattgtgatctgagagcatatattattttttctgtcattttaaactggaaaaggtatgttttatggcccataatgtgctgcgtgagcttgaagagaatatgtagttcgctgttgctggatgaaatagtctacaaatgttgattagattgctgctgttattttgatgcgtatccttccagatttttctatgcatgtatcatctatctgtgtatctatctgtaggataggagagtcttgtacaaatggttttataactctttaacttcaaatattgtggacttacttccttgtcattaaatacatttaaggctgggtgcagtggctcatacctgtaatcctagcactttgggaggccgaaacaggcagatcacctgaggtcaggagtttgagaccagcctagccaacatgttgaaaccccgtctctactaaaaatacaaaaattagctgggtgtggtggcacacgcctgtaatcccagctgctcaagaggctgaggcacgaaaatcggttgaacccaaggaggcggaggttgcggtgaaccaagattgcgccagtgcactccagcctgggtgacagagcaaaactttgtctctaaataaataaataaacaaataaaatacatacctatgtacatacatacattttaagaatcattttgatatattcatctccatactgaggaatttaagtgcttttttttttttttttttttttttttttttgagacagagtctcactttgttgcccaggctggagtgtggcggcacgatcttggctcactgcaacctctctacctcctgggttcaggaaattctcctgcctagccgggtgagatttcctctttagcttgtgtgttatttagaagcatgtttttgtacctatcgtagcttctctagagaagggaggtaggagaatcgcttgagcccgggaggtcaaggctgcagtgactgacccatgaccatgccactgcactgtagcctgggtgacagagtgagcccctgtctcaaaaaggaaaaaaaagaaatcagcatattttatgacttaataaatgtattcaaattccatccagatatttcctaatttattattttactaacagtgtttgagagcacttgtctcccctgccttccaaccagtgtcaagtgtattttaacaaaatacttgtattgggtagtagtacatggttggttgttactctctaatcgcctgttgtgtttgaaatatttaataatttttttaatgttgctagtgtagtgaagaagataatgatttagtttttcttctttcttttttttttttgagatggagtttcacccttgttgcccaggctagagtgcaatggtgcgatctcagctcaccaaaacctctgcctcccgggttcaagtgattctcctgcctcagcttcccgagtagctgggattataggctcatgtcaccacgcctggctaattttgtatttttagtagagacagggtttctccatgttggtcaggctggtcgcgaactcccgatcttaggtgatctgcctactttggcctcccaaagtgctgggattacaggcgtgagccaccgcacctgacaaatgatgtagtttttctcccttaggttattagtaggcagaatagttttacatttgattattagttattcatatttcttttgtgacttgttggttcttaatatatctattcagccaaaaatgaaaaataggatatcttagcctgtctagtcttaaggtaaatatatgtgggatataagggagtttgggggctgggcgcagtgactcacacctgtaatcccagcacgttgggaagctgaggtgggctgatcacttgagcccaggagttcaagaccagcctgggcaatgtagcaaaaccccatctctaccaaaagtacaaaaattagccaggtacagtggcacatacctgtattcccagctactagggaggctgagatggaaggatagcttgagcccaagaggttgaggctgcagtgagctataagcatgccccactacattccagcctgggtgacagagcgagaccctgtctcaaaaaaaagatttttttgaaaagttgaaaatgagtatattcgctgaatacgagatgagttttcccaagaatttatccctcagaatctttcacgttcttcctcctccttctcctcctcctgctttcttcttcttctttcttctttttctgtttcttcttcttgcttttataaagtcttagctcctgtggagttttctctcagttacttcttatttatttatttgagacagagtttcactcttgttgcccaggctggagtacagtggcgcgatctcggctgactgcaacctccgcctcctgggttcaagctattctcctgtttcagcatcccaagtagctgggattacaggtgcctgccaccacacctgactaatttctgttacttcttttgagccacaaagtatttgaaaaagatgcattaagtagtgaccgcagtccgtgctagtattgggtgcttacagaggtctagtagaataccgtgttttaaaaggaggtgaatttaataattgctgtgattactctggcattatacgctcacaaataaaatgtttggtgattttttttttttttttttttggagacagattcttgctctgtcacccaggctgtgcaatgatgtgatctcagcttactgcaacctccgagttcaagtgattctcgtgcctcagcctctcgagtagctgggattacaggcacccgccatcatgcctggctaatttttgtatttttgtagagatggggtttcaccatgttggccaggctggtcttgaactcctgacttcaggtgatccacccatctcagcctcccaaagtgctgggattacaggtgtgagccactgctcccagccgggtgtgatatttttaataaaacaagtattcaaattcacttacaggaccaatgaaagaatcgtttgtcgtaattttatgccaaagggtacttgtggcttaagataaacttcccataatgacattatccacagattcaaaaagtagtttatcttaaacaacttctgtgacattttaaaatgatgtggcttagaaaattgctaggttatctaaaatggctctattgatgatgtaaatgtagcacatgaagagcttgaataaaatagacttttgaagtgtgcaaatggaaagaacagtccttctaaataattatttcccctcccttttattgacgtatacatacagaaaagatatcatgtcgtaagtgtattgcttagtgaattactccaaagttggatatacctggttaaccaccacctgaatgaaaaaaacagaacactgcttcatatggagaagcccctcctgcccctcctggtcattgtccttttcatccctcccacaggtagtcactgagttctaataccacagagtcttttgactttcttttgagccttatgtaattagaatcacaaaagatgtattcttttgcctgacttttatacttagtattgtttttgaaattcatcttgtgtgtaactgcgatttgttcattttcattgcttagtgaattattccaaagttggatatacctggttaaccaccacccgaatgaaaaaaacagtttttggccgggcacgatggctcacgcctgttatcccagcactttgggaggctgaagcgtgcagattacgaggtcaggagatcaagaccatcctggctaacacggtgaaaccccgtctctactaaaaatacaaaaaattagctgggcgtggtgacgggcccctgtagtcccagctactcaggaggctgaggcaggacacctgtaatcccagctacttgagatgctgaaacaggagagtggcgtgaacttgggagatggagcttgcagtgagccgagattgcgccactgcactccagcctgggcgacagagcaagactccgtctcaaaaaacaaaaaacaaaaaacaagaaaacagttttccagtctaagaatgtattacaatttattcaaattccactctagatggactgtgggtttttttttttcccccatttggagctatggcaaatgatgttttttcaaagttgttatttctcagccaggcgcggtggctcacgcctgtaatcccagtactttgggagactgaggtgggcagatcacctgaggtcagaagcaagaccagcctggctaacatggcgaaaccccgtcttttctaaaaatacaaaaattagccaggtgtggtgatgggcacctgtaatcccagctacacaggaggctgaggcaggataatcacttgaacccaggaggtagaggttgcagtgagctgagatcacaccactgcactccagcctgggtgacagagcgagactctatctcaaaaaagaaaacaaaacaccacggaattgttatttctcttggcgaataggtagatgcacttattcctgttaatatatacctacctgtgaatgtgcttgttggattttctatgtatcttctgtctgccacctagaaatttaaccttttatatatatacaactttaatttttttttttttttttttaagagacagggtgtcactatgttgcccaggctggttgggaactcctggccttaagccgtcctcctgcttcagtctcccaaagtgttgggaatataggcgtgagccactgtgccccactgttcaagttttcattgattgctgcctacatatagttgttcaacagctattgattccccctgctctgtatatatgtctcctagtgtaggtatcagggttacagcagtaattaagaccacattatttcattttatcatttaaatatataagactaattgataaattaagtatagaactttgaccaacatggtgaaaccccatctctactagaaatacaaaaattagctgggtgtggtggcagacgcctgtaatcccagctactcaggaggccgaggcagaactgcttggagatggaggttgcagtgaaccaatatcagaccactatactccagcttggatgacagagggagactttgtctctttttttttttctttttttttgagacggaatctcgccgtcttccaggctggagtgcagtggcacgatctcggctcactgcagcctccgcctcccgggttcaagcgattcttctacctcagccttccgagtagctgggattacaggcacccaccaccatgcccggctaatttttgtatttttagtagacagggtttcaccatgttggccaggctggtctcaaacccctgacctcaagggatcaacctgctttggtctcccaaagtgctaggattataggcgtgagccactgtgcccggcccttttttttttttttggagacagaatttcgcccagttgccagactggagtgcagtggcacgatctcagctcactgcaacctctgcttcatgggttcaagccattttcctgcctcagcctcccaaatagctgggactacaggcatgcaccaccacgtctggctaattttttgtatttttagtaaagccagagtcccaaagtgctgggactaggcaggcgtgaaccaccacgcctggccaagactctgtctctcaaaaaaaaaaaaaagaaaaaaaaatataggactttgggaggccgaggcaggcagatcacctgaggtcaaaagtttgagaccagcctgactaacatggtgaatccccatatctaccaaaaaatacaaaaattaggcaggtgtggtggcgtgcacctgtagtcccagctattggggaagccgaggtgggagattgtacctgggaggcagtgagcagagatcgcaccactgcactccagcctgggtgacagagtgagaccttgtctcaccaaaaaaaaaaaaaaaaaaaaaatagcataggtaggcatttgatgatttgatgatttcattcgcatccctaaaagtttatttgttcctgggtcgtcagatagctttttggccatcttcctgttgagaaaattgatgtacccttctggagtcctccaattttccattataatatggtaagtgggagctagagctttgggtaagaattgggatgtgataaggaggatgagttttgcagtggtgtgcatggttaggaggagaaaaagctggaggcagagtgttcacttagaggcttggggtaggaggggtaggtttaagtggtgctcatctgggccagaatagggcaaaaagggaagaatgaaataaccagatgtctttgctttgtcagtagtcttgcagccctgaaagctttttttgttgtgttatatttgttgtaattgaggtataatccacataacataaaacttacctctttcaagtgtacaatttagtagtttttagtatattcataaaattgtgcaactatcaccactgataccagaacatttctgggaacaaaaagaaactatatatccattaagagtcactctccattttctcctacttccttctctacccccagtcatctgctagtcggctttctgtctctatagatttgcctgctctggatatttcatataaatggaatcatataccatatggtcttttgtgactggcttcttttacttagcctaatgtttttaaggttcatccatgttatatgaatcagtacttaaatcatttatagggttgaataatattccatcatatggatataccacattgtctttatctgctcattaattggtagacatttaggttgtttccacttttgtttattatgaataatactattcacattcatgtacaaggttttgtgtggacacattttcagttctcttcgatatataccaaagagccacaatgctaaaacttccagctttttaccagctatccccagatgcgtagcctagtaagccccatgttggagtggtgtagtgttgaaaacatggcatactcatacattagataaccaggtttcaattctggtttggaagcctttggatatttgcattacccatttgaattctctcttgggctgtgtttggtttggggttttgtacttgtttttttttttttaactagatgttttgaggcacttggtactgtggacatgtgtcagtcttaaatatttgggttttgagcatatcaagggcttggtttgcagttgacagttgaatagcagtcttcttccttccattccttacagattctcctgttcagagtcaaccattgaatagcatatttattgtttctgcctgtgtgtctgttagtgctcatatggtctagttcctgagttaagaagtatagggtagtggtcatcttttttctttgacttgattcctgcgtactgtgaatgcagagcaatgcaggatatgttgggttttctacaaacagagcatcagcccagagacatgtttgcatttgtttctgtcaggtttcctggctcaactggcaccctttaaggccagagaacgttagtttaggcacttttcctagtaaaatacttcttgtggctcttcctgtgtacttggaataaaggaggcattccattgttagacatgcttgggtagttcagggtaatcttagagtcatgagagatatgatataaaggaataactagctaaaccagaaaaaatgcctgggtaatgactagcaaataggtggtcaacagatgtcctcattagattgaaaggtccatgaaagcagggactatttcttttctttactgcttaaaaaggttagaactggacctggcaacatatgatgagctaaataaatacatatttgtgaattgggttaacacatattgcataaagtggttttggctctgttttattcttcataagccctagtgatctttttaatttctgtaaaatgtggtcttgacccccccaacccaagtgacctccttatttgctaggctctgatatttctgttaggtttctactgtattttctgagatagcaattagtagatactatttctcctttgatggagctagccatatattcttgtttgttcattttagctttcaaatttctgtctgattcttgttcttttactctggaatgtagtgaatggaatgacttggaaggtacaaggtaggtcagtttaggttgtctagggccttgcatttaaaagtttaatttgatgacatggtggattacaagaatgtaacagtatcaaaatgatactatcttcttgtggtggtatgtagacttaaaaagagaaactgcagagaaaagggtcccttaggatgtagagcagcagttgatatgtgagaagttgatgccttgcattagggattaggagtagatgtggaaggaagagatcaggtttgaaagagtttaaacaaagaatctctaggatttgataacactggatatcagaggggaaggtacaagagagagggcagaatcaaaggccactcagaggttaaaggaatcataccggtttggcatggtggctcacgcctgtcatcccagcactttgggaggctgaggcgggcagatcacgaggtcaggagttcgagaccagcctagccaatatggcgaaaccccgtctctactaaaaatacaaaaattagctgggcgtggtggcgtgtacctgtaggcccagctactcaggagactgaggcagaagaatcacttgaacccaggaggcagaggttgcagtgagccgagatcgtgccactgcactccagccagggcgacagagcgagactctgtctcaaaaaataataataataataaataaataaaggagtaattccaacacttgggaggccgaggcaggaggattgcttgagcccaggagttcaagaccagcctgggcaacatagtaaaacctcatcgctataaaaattttttaaaaagaaatttagccaggcatggtggtgtgcccctgtagttcccattactagagaggttgaggtggaaggatctcttgaacccaagaggtcgagagtacagtgagccatgatgcaccagggcactccagcatgggcaacagagtgagactttgggaggccatggcagaaggattgcttgagcccaggagttcgagaccagcctgggcaatgtagtgggaccttgtctctataaaaattttacaaatatatataaaagctgggcatgggggcacgtgcctgtagtcccagtgactggtgggtggggcgggggtgaggtgggagaatcacttgggcccaggaagtcgagattgcagtgagccatgatcatgccactgctctctagcctgggtgacagagtgagactctttttgtcttaaaaaaaaaaaaaaaaaaaaaaaaaaatggttgtaccttgaacagatacaaagcatgtagaagaggaaagcatttgggagggagaataattggttggatacattaagtgtcaagtgacagtaggacctctagaaatacacaaacagagctccacaggttttttcattgtcatttcttataccttttgttccactacctacttttttcctacaactttctgtttattttatagtttatgaattttaagcaaaatacttccttctgcctcttaccagtaattttcaaaagcgtctgtattggttaggattagatttggctgggaatgacagaaaactaaaaataaaagcagtttaaacaagtttatttctctctaatgcaaatgaagtttgagctgtccaggctttcttatggtggtttggtcatgatcagggacccaggttctttcaaccatgtagccccatcttaacatgtgatttctatcttattgttcaagatggctatttgagtgtcagttatcagttttatttagcaaccaatgggaaggaagggggatgaaaatgggccctgtctttaaggatacttcctggacatagtgagtagaaggatggttaccagagtatgggaagggtagttagggggctggggggaaggtgggaatggtaaaggggtataaaaaaggtagaatgagtaagaccatcagagaaatgcaaatcaaaaccacaatgatataggtggctcacgcctatatgtatctcacaccagttagaatagtgatcagtaaaaagccaggaaacaacaggtgctggagaggatgtggagaaacaggaacacttttacactgttggtgggactgtaaactagttcagccattgtggaagacagtgtggcgattcctcaaggatctagaactagaaataccatttgacccagccatcccattactgggtatatacccaaaggattataaatcatgctgctataaagacacatgcacatgtatgtttattgcggcactattcacaatagcaaagacttggaaccaatccaaatgtccatcaatgatagactggattaagaaaatgtggcacatatacaccatggaatactatgcagcaataaaaaaggatgagttcatgtcctttgtagggacatggatgaagctgtaaaccatcattctgagcaaactatctaagggcagaaaaccggacaccacatgttctcacttatacgtgggaattgaacaatgagaacacttggacacagagcggggaacatcacacactggggcctgtcgtggggtgggggaggggggagtgatagcattaggagatatacttaatgtaaatgacgagttaatgggtgcagcacaccaacatggcacatgtatacatgtgtaacaaacctgcacattgtgcaccatgtaccctagaacttaaagtataaaaaaaaagacctactatttgataccacaatagggtgagtatagtcaataatgacttaattgtacattttaaaataacataaaaagaaaaaaataaaataatgcagagtataatttgattggttgtaactcaaaagataaatgcatgaggggatggatactctattccccatgatatgcttatttcacattgcatgcctgtatcaaaacatctcctgtactccataaataaatacacctactatgtatccacaaaaatttcttaaaaaaggatacttttgagcgtttcaagcattacttctagttatgttcagttgatcagaatttagtcatagccacacttcagcttcaaggagggctgcagaacgtctttattttaggcagctatgtgcccagttaaaaagcagattttctcccaaggtaaagagagcagataggcattaggagactactagtagtcttttaattttccaggccgggcacggtggctcacacctgtaatcccagcactttgggaggtcgaggcaggcggatcatgagatcaagagatggagaccatcctggccaacatggtgaaaccccatctctactaaaaaaaatacaaaaattagctgggcgtggtggtgcgtgcctgtagtccaagctactcaggaggctgaggcaggagaattggttgaacccaggaggtggaggttgcagtgagcgaaggtcgtgccattgcgctccagcctggcaacagggcgagactccatctcaaaaaaaaaaaaaaaaaagcagggatttgctcccaaggtaagagagcaaatagacattgggagactattagtagtctcttaatttcccagaatgagaaccagattctttccggttacagaactcgtttctccaaacattaattattcttataataattttaaaaaatactaaatatataattatcaccagccaaatgcttcttttaagaaatagagacagggggccgggcacggtggctcacgcctataatcccagcactttgggaggccgaggcaggtggatcacctaaggtcagagttcgagactagcctggccaacatggggaaaccctgtctctactaaaaatacaaaattagccgggcatggtggtgcatgcctgtaattccagctattcgggaggctgaggcaggagaaccgcttgaaacaaggaggcagaggttgcagtgagccgagatcgtgccattgcactccaacctgggcaacaagagcaaaactccatctcaaaaaaaaaagaaaaagaaatagagaagagacagggaagccaagctcatgcctgtaatcacagcacttcgggaggccaaggtgggcagatcacctgaggtcaggagtttgagaccagcctggccaacatggagaaacccagtctctactaaaaatacaaaaattagctgggcatggtggtgcataccggtaatcccagctactcaggaggctcagacaggagaagtgcttgaacccgggaggcagaggttgcagtgagccaagactgtgccactgcactccagcctgggtgacagagtgagactctgtctcgaaaagaaaaaaaagaaaaagagacggggcctcacatatgtacagtggtatgatccgtagttcactataatcttgagctcctgaaacctgatgctttaaaacaaaacagtacaaaactactaaatttataattaaatatataaataaaatataataaaaatgttcacttctgtttttatattctttaaaatgacccataggctggtgattagtaactaaagcatatgctgtggaacatccagcactgatgtaagtatatgaagtttgaatgccaggtcagtagattcagaagctaagttactgtatggtaaagaccatgttttgcctgagcagctttggatatggttttttcttttttttctttttttgagatggagtctcgctctgtcaccaggtggagtgcagtggcgtaatctcagctcactgcaagctctgcctcccaggttcaagtaattctgcctcagcctcccgagtagctggggctacaggtgcataccaccacgcccagctaatttttgtatttttagtagagatggggttttaccatgtaggccaggatggtctcaatctcccgacctcgtgatccccctgccttggcctcccaaagtggtaggattacaggactgagccacagcacttggccggatatagtttttctatgtgtgtttttcctaaaccttattatacataaacatacaaggacagagatcaaatgccccctgtctagaaacaccatttctgccaggcccatcttaataagactatgtcttctttttatttgtttctatacttccttttttttttttttttttctgagacagggtttcactcttgttgccaccacactcagctaatttttgtgtttttagtagagacaaggtttcatcatgttagccaggctggtctggaactcctgacctgaagtgatccccccacctcggcatcccgaagtgctgggattacaagcgtgagccatcacgctcagcctagacttcttagtgtggtgtttcattttcttttctctggttcccatccagctttgttcattgtacatgctcacggtgcactttatatgacctgttggcatattttctcactctctttttgtctctcttcacttccagcagtgttaaataactctttccattctgcagttttcctgataagaatttcagatggtggtggccaggtgcggtggctcacgcctgtaatcccagcactttgggaggccaaggcggcagatcacttgaggtcaggagtttgagaccagcctggccaacatggcgaaaccccatctctactaaaaatacaaaagctagccgggtgtagtagcgcatgcttgtaatcccagctactagggaggctgagtcaggagaattgcttgaacccgggaggcggaagttgcagtgagccgagatcacaacactgcactccagcctgggcgacagagcgagactccgtctccaaaaaaaaaggcaatgaataattggacaaggaaccaaaacttttattctgaaaagagaaaattccagtctatagcaagggcagttttccttctaaggaacagtactgatatatcatggctaaagaagcaggctcagcttctttgtccctttcactaatttgctatggcttctaacataggctaggaaaagaaaaaaatctgtttctctttctcctctcctctcctctcctcttccctctcctctcctctcctctcatcttccctcccctcccctcccctctcctcccctactcccctctcctcccctcccctctctttatctgtctatctgctaagggcagcaaatctgtatccatacaggtctgcagcaacttcaattcttgcctcctcagaagaaacaatttgactgagggtcataaggcagaaggagagaccaaggcaagttttacaacaggagagagtttatttaaaagctttagaacaggaatgaaaggaaggaaagtacacttggaagagggccaagcaggtgacctgaaagacaagtgcaccaacacatagcctttcaacaggatagagagcagttaaaactgccctggaaaagccagacttacaggctactctgtataatagaaacttcaggacagggtgcggtggctcacacctgtaatctcagcactttgggaggccgaggtgggcggatcacgaggtcagaagatcgagaccatcctggctaatacggtgaaaccccgtctctactaaaaatacaaaaaattagccgggcatggtggcgggtgcctgtagtcccagctacttgggaggctgaggcaggagaatggtgtgaacctgggaagcggagcttgcagtgagctgagatcatgccattgcactccagcctggtcgacagagccagactccgtctcaaaaaaaaataaataaaaaagaaacttcagcatgcttcctaatactgttcaaaggtctccctttttatgattttatttaaaaaaattttttttttttgagacagagtctcactctgttgcccaggctggaacgcagtggcgtgatttcggctcactgcaacctcccctcccaggttcaagcaattctcgtgcctcagcctcctgagtagctgggattacaggtgcccaccaccatgtctggctaatttttttgtatttttaatagagacagggtttcaccatcttggccaggctagtcttgaactccacaccttgtgatccacccaccttggcctcccaaagtgctgggattacagacgtgagccactgcgcccagctcaatttttatatttttggtacagaccaggtttcactatattggccaggctgttctcaaactcctgacctcagttgattcgcccacctcagctcccaaagtgctgggattacaggcatgagccactgcgcccagcagggtctccctttttaaacgtattttctttttatagcctacaaactacaagagatgccttttaataaactggatggtatgtcttaacgtctgatggagtttaaaggcatccaagggttacgtctgtgatagattgccaaggcatacaggtctgatcaggagagtttcttgatgactagctatgggctatgcctttgtagcacatgatcccaactccagcagggatatagttagtgacatgctggctttgtcttctccctaactcctggattactacaaatttcttcttcgtgcaggaatcattccctcactctatacatatctgctgttaaaaaaaaaaaagttaagatattatagccattatattgtagcagccatgatattatagctcagtaaatgctgctttccaaatattggctaatttaaccatagcatgtcttcaatgttagaagccagccctcatttttatcaagggctgaagtttgataattctttgtgttatttgcttgtgaaaataagtagaacaaaaaggattagggacctaaccttgtatcccatgtatcccagtgaaccttttctgacttaaagcttcctttctttttttttggagatgggagtcttgctctgtcgcgaggctagagtgcagtggcgcgatcttggctcactgcagcctccgcctcctgggttcaagtgattctcctgcctcagcctcccaagtaattgggactacaggctcatgccaccatgcccagctaattttttttttaatttttagtagagacggggcttcaccatgttggccagtatggtctcgatctcttgacctcgtgatccatccaccttggcctcccaaaaagcttccattcttagtcttggtacttctaagtggcattgggtcaatagctttctgcctaagaagagaattggctgggcatgatggctaacacctgtaattccagccctttgggaggctgtggcaggaggatcatttgagcccaggagttcaagaccagccggggcatcataggaagaccccatgtctgcataaaataaaataaattagccagacttggtgacatgcacgtattgtcccagcttgtcaggaagctgaggtgggatgattgcttgagctcaggagatcaaggctacaatgagctatgatcatacaacaccagtgcactctagcctgagtgacagagcaagaccctgtctcaaaaaaagcaggggggcatagtcacctccctaaaatattagttgaacagtatgtattcagaagtccagaggctctgtattttattaatattttcaaggcactatttctgcagaaatcaagtcagcaagactctttgaggacgttacaggcagaggggctaaagatacctttgaggaagctcaagtacttgggtgggaggtgatagataaagggtcagtagaaataatgtctctttttattttttttcccattaaaaaattttgttttaatagcaatggagatggggtctcactgtgttccctgagctggtctggtctcgagctcctgggttcaagcagttctcccaccttgaccttctaaagtgtagggattatagacatgagccaccatgcgtggcaaatttcttttctttcctttttttttttttttttttgagacagagttttgctcttgttgcccaggctggagtgtggtggcacgatcttggttcactgcaccctccacctcccaggttcaggtgattctcttgcctcagcctcctgagtagctgggattacaggcgcccgccaccatgcccgggtaatttttgtatttttagtagagatgggatttcaccatgttggccaggctggtcttgaactcctgacctcaggtgatccacccgcctcagcctcccaaagtgctgggattacaggtgtgagccaccgctgccggttccaatgtctcttttggatggtggatcctgaagaatagctgctggttctttggggatgcctggggaatactgtgcaggctttgtgatgggctcagcagtgaggcctgtacagtatcttaggtcttgtgggcctcagtctgctctcttggctgttctctaccacctcctgccattaagtttttaagaaaaaggaatagttttattatattctttggtaaacaaagcaaattaagaagctttatattttccacatttatttaccaaactccctatttgtttttctctatagtgattcagtttagagacctattcaatgaagcatgccttgatgttgaatttagagtctactttttccagaagaaaagagccagggagctccaatagtagtcatctcagaatataaaagtgttatagaaatgatgtaaatcaggccgggtacaggggctcacgcctgtaatcccagcactttgggaggccgaggcgggcggatcatgaggtccggagatcgagaacatcctggctaacagggtgaaaccccgtctctactaaaaatacaaaaaaaatcagccaggtgtggtggccggcacctgtagtcccaactactcaggaggctgagacaggagaatggcgtgaacccaggaggaagagcttgcagtgagccgagatcgcgccactgcactccagcctaggcaacagagcaagactccgtccccaaaaaaagaagaaaaagaagaaaagaaatgatgtaaatcagctgcccttcactctgtgttgaggtgggggatgtccctaattgcagtaggagagagcctctcttttatctgggactaaaagcccttgccctacatacctcataattattttagggttaactgattcaattgtcagaaaagaacaagctgtatcttgtttctgtacatattctactttgtgagtatttttatttcattgctatgtgattggaatcaactcaggaaagaggaaaaaaataagatagaggttatagaattctgaattctgaagggaattctgagaattatcagtaaaatatgtcaaaatgtgatattttacttccaccaagaattaggccatatctttgtgtgaaaataaattattattatttatttatttattttgagatggagtctcgctcttttcacccaggctggagtgcaatcacacaatctcggctcgctgcaacctccacctcccaggttcaagcgatgctcctgcctcagcctcccgagtagctgggattagaagcgcccattaccacacccagctaattttgtacttgtagtagagacagggtttcaccatgttggccaggctggtctcgaactcctgacctcaggtgatccaccccccccccccccacccttggtctcccaaagtgctgggattacaggcatgggccaccgcacccagcatacggaaataaattattaaccagagaaattttgactaaggtttttataaatgttaggtgaaccattgctctaaaagatacaaaattataacaagctgaaaagttttttaaaaatctgcattttagtggttcagtttttcagttgttctgagtgctaatagttggagtttataaattgtaagaagcaatctacggagattctgtgatgaaggaatttgttgaatgccctgtctgcctcacagtctcagtctttatgatagagtcttgtcttctcacaaggagagaaaagatttgaggctcttttgattacttacttacttgcttatttatatattttgcctctttgtttttgccgcaaatacaaatgtaatggaaccttagaataggagagacgtgtggatcccctggtaggcactgttctttctatgttcctggagccaagttcatggaattacctccaagactacggatccctggttttctttcatcatgataggaggcattttctagaacctgaatcttactttaaaatgcatgtaagacctgcaaggagtggtagtgaagtgggtggaatatattcttagcaccagacacctttaaaatatttaagttctcggccgggtgccctggctcacgcctgtaatcccaacactttgggaggccgaggtgggcagctcacgaggtcaggagaccgagaccatcctggctaacacggtgaaaccccatctctactaaaaatacaaaaaattagccaggcgtggtgatgggtgcctgtagtcccagctactcgggaggctgaggcaggaaaattgcatgaacccgggaggcagagcttgcagtgagctgagatcgcaccactgcactccagcctgggtgacagagcaaggctccttctcaaaaaaaaaaaaaaaaaaaaaaaaaaatatatatatatatatatatatacacacacacacacacacacacacgtgtgtatatatatacacacacacatgcatatatatatacacacacatgtatatctatagatatatacatatatatgtgtatatttacattttcttatgtcagggtctggcttggagtgtattgtgttcccagagcagaattcttttttttttttttgagattgggtcttactttgtcacccaggctggaatgcaatggcgtgagcttggctcactgcagcctcgacctcacaggttcaagcaaccctcccacctcagcccctggagtagttaggataacaggcgcacactaccattttgtattttttgtagaggcggggttttatcacattgcccaggctggtctcgaactcctgagctcaagcaatccacctgccttgacctccccaaatgctggggttacaggcgtgagccactgtgcccagccgcagagttcatcttgagaccctgacttctgccagctctgatcctagtgggtggggctctggggctcagtgaaacagtcagccgttttgcttcagagaacacaaataagattttggcttgatgctggttgttgctggcgtcatatagtctaaaacgtttgctgtcaagaacattttagtaaaagtttttgttgtgctttcatctagtcaagaaaagataggaagtggcagctgacagggcagtgtcttcatgcccctcaaccttacattggacactgaagtaggattgtgttttcactggaagtcccagtggggccttatctcctggatgctcaaagtgcagctcagatcctgttgggtaaaaagtctagtcaaaatggaggacatggagaaggccaacaggcagagctatagagctgacatagggcattctttgtacttcccttagccactgtactttctttcttcctccatctcctccttccctcttctatctcattttggtttggcctttgggaatagtgggttttaaaaaatatttgaactataacatatccttgtaccataaagaatgagcctgactgctttacaaaggatttctataaaaagtaatcttttatactaagagaaatgacacatctgttttaaacctgttacttttcttccccgggctttgctctttctgcaggtccgtttgacatggttcttgaaactcctggtagcagccatttactagtagcactctttatcttagacacagcacctaaagcaattgtaggtgttttaagaacagaaagcccatcttaagcagaccagtttgagggattggcagtgctgtcaagaaacaagggctttgtggcagtctctctaaaaactccctatgagtccatttcttgcaaacttctttagactctactgtatcttttcatcagaagctacctctttgatgtgggaagtgtcatgaatggactgactctctggaatttaaaaacaaagacaatatggcaaaaagaaaacctgacttttagtactgtatgtgttgctaattagctctgtattcttgggcagactactccatgtatcccagccatccatatgccctatttgtaaggatctaatgagatgatattgtgaagaatgcctttgtaaactgtaaattgctttgtgaataaagatactatctctgataaacagtaccagttctcagccaccaataacctgatactcccatactgtgtttggaagaaacacaaaacaatgaagagtaattgtgacttttcaatgtgagttgtattcacaaagctcatatactttttccctgccttttgatactgtttatcgctttctgtgttgtaatgggaagatcacacagcaatcattttctcagtacaaagtataactacaactgagcttgcattgaagatctttaacaaagatgcaaagctgctgtccagaaatgttttctttccattttctcttgtacctcccagtattttaagaatccttgaggctgggcaccataactcacgcctgtaatctcaacactttgggaagctgaggcaggaggatcacttgggcccaggagtttgagaccagcctgggcaacatagtgagacccccatctctacaaaaaaatttaaaaattagctgggcatggtggtgtgcacctgtggtctcagctacttagggaggctgaggtaggaggattgcttgagcctgggaggtcaaggctgcagtcagtcatgattgcaccactgtgctctatctagcctccaacctgggcaacagaagcgagaccctgtcttttttttaaaaaaaaaagactatccttgatgattggttttgagccaacggaatgggagcatatggtagagtttcaacactctgaccctagtccttctgacaggcagtcacaaaatgagatcatgaagtctctaagagcagctgatgaaaaaggaaatgggaatgtagatgttcaatcagcagccctccagacccagagtttgctcctctgtggtgtctctaggtggagaataaggacttgatttgccattctggagtgcaaatatctagctttttgcagcttcatattaagatttcttgaaatgtacttagtaatatccatgtgtgactttgccaagtgatggctttgggctggaaaggattttagcaggttttagtctaatttaagcctaatctaacactgctgagaaaggaggagatgtctttggttttactttctaatatatggtacctcttagccgggtgcagtggctcatgcctgtaatcccagcacttcgggaggccgaggcaggcgatcactttaggccaggagttcaagaccagcctggccaacatggtgaaaccccatctctactaaaaatacaaaaattatcccggtgtagtggcgcacacctgtaatcccagctacttgggaggcagaaacaggagaatcgcttgaacctgggaggcagaggttgcagtgtgccaagatcatgccactgcatgccactccagcctgggcaacagagcaagaccctgtctcaaaaaaaaaaaagagagatctatctctcttctttttatatacatatacatatacatacatacatacatatatgtatgtacacacatatatatatatggcccctctttttttatttgagtcggaatctggctctcttgccaggctagagtgcagtggcatgatcttggctcactgcaacctctgacttcctggttcaaacggttctcctgcctcagcctcccgagtagctgggattacaagcatgtgccaccacacccagctcacttttgtatttttagtagagacgggatttcaccatgttggcagggatggtcttgatctcctgaccttgtgatcctcccacctcagcctcccaaagtgctgggattacaggcatgggccaccgtgcccagcctttttttttttttttttaaagagacggagtctcactctgtcacccaggctggagtgcagtggcgtgatcttggctcagtgcaacctccacctcccgggttctagcaattctgcctcagtcttccgactggctgggactgcaggtgtatatcaccgcaaccagctaattttttgtattttagtagagacagggtttcactgtgttgcccaggctggtctcgaactgagctcaggcagtccacccgcctcggcctcccaaagtgctaggattacaggcgtgagccaccgtgcctggcctatatggtacctctttaggagccagacctggttaatcagacacatggctttcatgactcctttgcttgagtagcttaataactcaataaatcaaaagatgaataaatattctaatgtgtgaagatactctaatagataataggcaattaagaatggacatccacggctgggcgctggggctcatgcctgtaatcccagcactttgggaggctgaggcgggtggatcatgaggtcaggaggtagagcccatcctggccaacatggtgaaaccccatctctgctaaaatacaagctactcgagaggccgaggcaggagaattgctcgaacttgggaggcggaggttgcagtgagccaaaatcgcatcactgcactccagcctggcgacagagcgagactccgtctcaaaaaaaaaaaaaaagaatggacatctactgaaggtgattgcatcatcctacccattcattaatctaactccctacaggatactttcctaggagacactgacaggtctgttttctgaaatccagagaaaggcagcaatggggaggggtgcagtgtatgtatgtcatacctgtgcttggtatatctgagttgcctgtgtatgatagcagctggggaatcaaatcatagataaattgttctcatacaggtttgtcctatgactacctattcttattaaacaattggctatattgaccctttttggttttggaaaaataataataatttttttaagagagaaaaagaaacaattggctacccttcaacagtgatgttaaaaccatttcacattctttagcagtggtcactgtcctatgtctaactatgtgcaggttgagaaaaaggactgcccgagttatagatgattctgtgagaataagaaatcattgcttttgtaacacatgaggtaaaagtaatctcaaagttgacatgctgatggggactcctggcaaggggagttccctgccctcaacaaaaggtcatccacagctactggaacatttttgttgtctgagaagtataaagtgccttagaaatacctgaatccattaatgcctccagttggtgaaatcagaatttgcaggtgactgaaattgacagtagtgccttgttcttactcactgttcaaatgacaacccacatgttttatggattgggtatacagatgtatgctctaacagcagtatctccctccagagccactgtgtaccaagcaccaggtcctccagggatagttggctctattcagtctttgattcattcaacaagagcttactaagctcctttttggtaccagatactctttgttgctgaaaataaataaaaggccagcaagattaagtagactgtgagatctggaccagtaatttgacaacacaaagtactgtcgtaaagatacagtttctgatgtgtagtgaccattccgtatgaaagcttagtctttcaggagattaaaatgggtggtggaatattcctacctagcaagcaagcaaggtgaaatgagtggctgtttgactcccacctgctgatgctggtcttttttggttcctagggcttataatgatcaacatttcttgagccctcactatattctatgctaagctctttacatgtatgaatttacttaatcttcacaaccaccctaagaaataggtactgttgtccttactttacagatgaggaaatggaagcacaaagaagttaaggaccttgctgaaggtcatggagtagaggcaggattcaaatttagggaactcagcctacagtccatgctcttaaagatgttatatcctgtctctgggcttagaaggggttcatcttaggccggacacagtggctcacgtctgtaatcccagcactttgggaggccaaagcgggcagatcacgaggtcaggagttcgagaccagcctgaccaacatagtgaaaccccatctctactaaaaatacaaaaattagccaggcatggtggtgtgcgcctgtagtcccagctactcgggaggctgaggcaggagaattgcttgaacctgggaggcggaggttgtggtgagccgagatcgtgccactgtacttgagagtgagtgacagagcaagactctgtctcaaaaaaaaaaaaaagacggccaggcgcagtggcttacgcctgtaatcccagcactttgggaggccgaggtgggcggattacctaaggttgggaattcgagaccagcctgaccaacgtggagaaaccccgtctctactaaaaatacaaaattagccaagcgtggtggcatatatctataatcccagctactcgggaggctgaggcaggagactcgcttgaacctgggaggcggaggttgcagtgagccgagatcacgccatagcactccagcctgggcaacaagagcgaaactctgtctcagggaaaaaaaaaaaaaaaaaaggagggggcgcttcatcttgactaacttcctgcattggtggagcttgatagagtggtccttcccagatccttccctgcatacagagcctgtctcttttctgattggtccctaaggccagattacctgtccctaatactgagcagaagctggtgaatgaaacaggagatccctcagtcaaaacaaaaggaaaaagaaaaatgaaacaggagatcccttctctacagcccagatgtaagtccagctgtgcccttcaccacctgggtgaccccacctctgtgaacataggtcctcatctgtaaagtgtagataatgttatttcatcggatcatttaggggattaaataagataatgtacttcgtggtttctggctcttagtaagtgcttaataaatgttagcgatttttattatcattgtccttagccttgagaacaagccagggaatagtgtctcagaccagatgctaagacctaggtagatgggcaattttccttggttttgacaagacaataattttatcctgtgtatttctcttgacttttttgatgtgaaaagcagagaggtaaagcattatttgacagatgtatggattcaagcaagaaactgaggtccaattgcaaagaaatggcttgtataactcagagccctgtctgaggaaacacagaggaccctagagggcggagaatgaacacagcgcaggggctagttccagagtcgcattctcggttagttcactttcaagtgtgggtgagggtcccttgtcagtaggcagagaatttttttcccctgcaccaacacatacctgctgcctagtgtttattaaacaaaactttattttaatgtgaaatagaattcatgacttgtccaaaatggagaggcaagggagctctttaacaggcttgttgagccccttttcccacctgttcctgtgccagactttcccaaaggcttacttgccaatggttgctcctcagatctcagggctagctcactctataggctccaagccagagtgataccgccgccgccgctgttgctcccaccagccaatcagtttcctgctgtaaggatgtaacttgctgtgaagctttcaccttcctcctttcttcctgtcttcaatgttgtatgtctttgtcctggtgcttttgccatacagccagtgtttcaaagaaaattttcaggcactaaagttatagcccttactacctttccaaggagatgtgagatagctgtggaaaagaagagggctcctctgcctctgtgcagaaggaacagtttacttcttgatagtgtgctagctcctgagctaggtgggggacttgctgggattcaagagagtgcattacctgacctctggacaagtagactgggcatagcctgcccaaggacagcaccctaacctgcaggaaccaaggccgaagactgatttcaccttctcgtactcccctttcctaagctaaagcttgctctgtaacactgccccaggtctgtggcttaaaacagccatttcctttcaccagtgaattaagctcactctttataaaatgtttcagcttggggattggaaaggctctctgtgcctttctgtctctgtctgtttctccaagggttgatgttgatggcttctgtctttgtctttacagggaactctaatgatccaggacaaagaagttaccctggagtatgtatcaagcctggatttttggtactgcaaacgagtaagtaccaagaatccctttctttagaagtaagtatctggaataacagctcctccatatctctaggaaggctgcctgctaacatgcattcccaaggacaaagctcttcttcctcaggtcacttcagttgaacaggaggaggtcaagacaaggtcattcataatttctccttcccagctgctacatgtggccatagagagttctggacctgcaattggagacactttcccaaggacatgtgccattatttctatcagttataaaaataacagttccttgacatataatatcttctcacctctcctgggggtggtcataaaggaattcttggttggaaaagtaggtttggagagactagttctttgggagtcgtacattttttggatattcttgggtttccaagggtatagaacttcagacaccatggcattttacctctattaaactccatattctcttagagtgggatatttaaaattttaggctatactctttttttttgaaacggaatctcattctgttgcccaggctagagtgcaatggcgtgatttccactcactacaacctctggctcctgggttccagtgattctgctgcctcagcctcccgagtagctgggattacaggcacttgccacctcacctgcctgatttttgtatttttagtagagatggggtttcaccatgttggccaggctggtcttgaactccgacctcaagtgatccacctgcctcagcctcccaaagtgctgggattataggcatgagccaccgcgctggcctgtttatttatttatttatttattttgagacagagtcttgctctgtcgcccaggctggagtgcagtggcgcgatctcagctcactacaacctctgccacccgggttcaaacgattctcctgccccagcctcccgagtagctaggattacagttgtgtgccaccatgctcagctaatttttttgtagtttttagtagagatggggtttcaccatcttggccaggctggtcttgaactcctgacctcattatccacccacctcggcctcccaaagtattgagattacaggcttgagccacggcacccagccggctatactctttaaaggtccagtttgattgcagtgagcatgaaaatataatttgttttcattgctactacttagtatcaaaaataattatgaaaaatatataaagtttctgagccccgacacactaaaaatgttacagtacttgaaaaaatttagtaaagactttagcttgacatttgttagtctcggtagaattgacattgtgttagtctcggtagaatacaacttgaagagctatgattgttattagccaaagtactcatatttcatggatatactcccttatggtgtcattttaggaagatatttcgtttccttttattgagataaaatacatgtaacattacatttgccattttaaccattttgaagcattaattcagtgacattaagtaccttcacaatgttgtgcagctatcaacactacttcctagaacttcttttttttttttttttaaataagagatgggatctcactatgttgcccaggctggtctcacagtccctggctcaagtcatcctctcacctcaacctcccaaatagctgggactataggtgccatcatgtccaggttagttccagaaattttttttttctgtcttttttttgagacaggatctcactcttgtttctcaagctggagtacagtgatgtgatcatggctcactgtacccttgacctcctgtgctcaagcgatcctctcaccttggcctcccgaagttctgggattacaggtgtgagctgccatatctagcctcagatcttttttaaaccctcaaaaggaaacctcttatcattaatcagtaacttcccacttcttcttcccccagtccccagaaaccattaatcttttttctatctccatggatttgcctattccggatatttcatataaatggaatcaaaatatgtaaacttttctgttggcctttcacctagcatgttttcagagttcatgtatgttgcagtatttatcagtacctcatttctttttgtggctaaataatatgaatatatcacattttgttcatccattcctcaattgatggacatttgggttgtttctaccctgactttggtgaataatagaacctttgtgtgctagtttttgtttgaacagctgttttcagttatttgggggtatgtatccaggagtggaattgctgagtcatatggtaattttatatttaactctttgaggaaccatcaaactgtatttcttttattttattagcaaaccttttcatagaccacagctgtaccattttatattccagcaatatgtaagggcttcatttctccacctgcttgccaacatttgttcttttccctttatttgataatagccatcctaatgggtatgaaataatatctcattgtggttttgatttgcattttcctaatgactttgagggttttttttcatgtgtttgttggccatttgtatacctcctttggagaaatgttcaaccaagtcctctgccctttggaattgatttgcatgtatttttgttgttgagttataagagtactttatattttctggatattaatcccttatcagatatatgatttataaatattttctatgtgttatctttcactttcttgagagtatcctttctaaagaaaaaaaaagagagagagagagataaggtgtggctcatggctgtaatcccaacactttgggaggctaaagtgggcagatcacttgagcccaggagttcgagaccagcctgggcaacatggcaaaaccccatctctacaaaaaatacaaaatttaactgggtgtggtggtgcatgcctatgatcgcggctactaagcaggctgaggtgggaggatcacctgagcccaggaggtcgaggcatcagtgagctatgatagtgccactgtacttcagtactccatcctgggtgacagagcaagaccttgtctcaaaattttttttagctgggtgtggtggctcacgcctataatcccagcactttgggaggccgaggcaggcggatcatctgaggtcgggagttggagatcagcctgaccaacatggagaaaccccatctctattaaaaatacaaagttagctgggcatggtggcacatgcctgtaatcccagctacttgggaggccgaggcaggagaatcacttgaacctgggaggcagaggttgcggtgagctgaaattgcactattgcactccagcctggacatcaagagtgaaactccatctcaaaaacaaaaaagaaaaattttaagtttattatgtacctattaaaatttttttgtaattaaaacaaatgctaatggcggtattattcataatagccaaaaaatggaaataaccaaaatgtccattggctgatggatggatgaacaagttggcatatccatacaatgaaatgctatttgacaatgaaaaggaatgaagtactgatgcatgttacaacctagatgaaccttgaaaatactatgccagacacagaagaccatacattgcacaattccatgtccctaggggtaagaatgggggaggtaactccactagatttcttttggggtgatgaaaatgtttcagaattagattatggtgatggttgcactatacatttactaaaaatcattgaattgtacacataaaataggtaaactttatggggtttgtttttgtttttaagagagagtcttggtttgtcacccaggctggattgcagtggcacaatctcggctcacgacaacctccacctcccaggttcaagtgattctcgtgcctcagcctcccaagtagctgggattacaggcgtgtgccaccatccccagctaatttttgtatttttaatagagatgaggtttctccatgttggctaggctggtcttgaactcctggcccgaaatgatccaacttcctcggcctcccaaagtactgggattactggcatgagccatcatgccaggcctgttttatgctatttaaattatacctactaaggttaggatcctaactgccactcactaactgaagtgtcacatactttattcgttggcatgtatatactcagttgtcccagcaccatttgttgaagagactattctttccccattggcactttccccattgttagaaatcagttgaccataatctataggtttattcctagattctcagttttattctgttgatctatatgtttacaaatagcaccagttaccacagcagctctcctgtagtaacaactctccaatcccagtagcttaaaacagcaagcatattcttcactcacattacatgtcagggactatgggttgtttgctacagttctgttccacgtggcttctcatcccaggacccaggcggaagaaacagtctcaatatggggcagtgtccctctggctaagggagagagaggttcattcacgcaagcagtggctcctaaggcttctcttagacctagtgtaggtcatgttcactcatgttttattggtgaaagcaaggaaggcacatggccaaggctgacaatggagagaggaagtatactcaccctgtgggaaggcataacagccatttggcagtgggcaggggtgtgtgtgtgtgtgtgtgtgtgtgtgtgtgtgtgtgtgtgtgtgtgtgtttataatctgtttatagggaagggaacaatgaaataactgactgtagtgatcttcctcaagtgagttaacctctctaggcctcagtttcctcatctacaaaatgaggagataagagtacccatttcatgaagtttattggggttgtcaggatcaataagtgatgacatatacagtaggccaaatacatggtatgtactatttaagaattagccggctgggcgcagtgactcacacctataatcccagcaatttgggaggccgaggcgggcagatcacctgaggtcgggagttcgagaccagcctgaccaacatggagaaaccctgcctctactaaaaatacaaaattagccaggtgtagtggcacatgcctgtaatcccggctactcgggaggctgaggcaggagaatcgcttgaacccgggaggtggaggttgtggtaagccgagatcatgccgttgcactccagcctgggcaacaagagtgaaactccgtctcaaaagaaaaaaaaaaaaagaattagccactgctactattgttattgttttctcctcaactccatctggcagacctttactcgccctataaggccctcctcaaataccatcctctttatagttcttactcttttatttcctgccaaccaagtttctgcccccatggcatttggaagctcagtggcaaaagttcagggatttcggggttgggcagtgtgcttgactttttgttcacatgttcagacaaaaataattacattcacattaaaaatgtctcttaccttattctgggctagtgaatgttccctttcaatgtcttttagatagctgccagagacactatctgtatctcttcctcctaccttgtacctcattatcagtgtttgagaaaggagttgataactgaattctcagttctagccaaatgtgaatggggatctcatagtcagttcaggcccaagttttgggtgcagactgtaaatggctttgggacaataatattctataaaccatgtaacagtagttttctaggcatatttcctataggaatctttatccagggcaaaggcatttgggctgcaccaaagtcccagatgccttgttataaggtagctctcaaacagtagctcatcagatcccatctgccagctctaatcagtggggaatatcagattctttttttaagctttgaggggatctgggatatggcttgtttctttcatttttggggggtttcactttgttagatatacataagatttttaaaaatgttttcagtcaaattgatttccttcttccttacagtgtaaggcaaacattggtgggcaccgatcttcctgttcattctgcaagaacccaagagaaggtgagtggcgaaagtggtagcagtttttatctcgtgcattgagcaaaacaaatttcatgttttccttggctttgaagaattatcatccctaaatccaagttgatctacaaacctttttttttttttttgagatggagtctcgctgtgttgcccaggctggagtgcagtggcaccatcttggctcactgcaacctccagctcccaggttcaagcgattcccctgccctagcctcctgattagctgggattccaggcatgtgccaccacgccctgtagcccggctaatttttttgtatttttagtagagacggggtttcaccatgttggtcaggctggccttgaactcctgaccttgtgacccgacccaccttggcctcccatagtgctgggattacaggtgtgaatcactgcacaaggcctgcaaacctttatttatttatttatttttgagacagagtctcgtactcacccaggctggagtgcagtggcgcaatctcggatcactgcaagctccgcctcccaggttcacgctgttctcctgcctcagcctctctagtagctgggactataggcgcccaccaccatgcccagctaattatttgtattttagtagagacggagtttcaccgtgttagccaggatggtctcgatctcctgacctcgtgatctgtctgcctcagcctcccaaagtgctgcgattacaggcgtgaaccaccacgaccggcccaaacctttcaaaagtgcaatttgagctaggcatggtggctaacgcttgtaatcccagcactttgggaggccaaggcaggtggatcacctgtggtcaggagttcaagaccagcctgaccaacatgccgaaaccctgtctctactaaaattacaaaaattagccacaggtgtggtggcacatgcttggaatcccagctccttgggaggctgagacactagaatcgcttgaacccaggagtcagaggttgcagtgagctgagatctcgccactgcactccagcctaggcaacagagtgagaaaaaaaaaattgcagtttggtgcccaacttaacgtaacctgttagtaaatgatttcagatcttattttcaccagaggaaagagatagggttgtgggctcctaggctaaagtggctaagtgggcagctgagcagaggtcagtatattgttatttggaatacatttaaggattaaggatgttaggttgaaaaagagtctttatgacatcagtctgtgtggcaaacctttctcccactcctacttctttgaagttattgggaatcatttgctctattgttttctcttttacattctgtaagcatttcaggattttcaagagaaaaacatttgttaaaataacagtaaaaacataaataggagaaaataatcaggatgtggggaacattttattattttagaggaataaaactaccagcttctcaagcacttatctttaatgtaaatttctttagagaaatttcaggtaggcaacttcgaagagtcagacacatgcatccataacaacagtcctgtagtcatcccttaaggaaagccacagcatgaccataaaatatagttcagtgcagggattcaggtagccttctgtttgttgcaaggttagagtttaatgtgcctacaaggagtttcttaggtgggcttttgtcctcttgtggagattttactctggtgaagactgaaaggcaggtgttctgaaaatctttaggggaaggctgtgtatgttctagaaaccaaaccaaaatgtgggaaggaggatgaacaactgagatttttgcttgttaggtcacttcaggttaggcaaagttgtgtttttttccccccacaagaaacactttttttcaaagctattccagcaaatgaatagatagttttttgttttttttctttttttttttgagacggagtcttgctctgtcacccaggctgaagtgcagtggcgcaatctcggctcactgcaagctctgcctcccaggttcacgccattctcctgcctcagcctcccaagtagctgggattacaggcacccgccaccgtgcccagctaattttttgtattttcagtagagacagggtttcactgtgttagccaggatggtctcgatctcctgacctcgtgatctgcccgcctcagtctcccaatgtgctgggattacaggcgtgagccaccgctcccggccatgaatagatagtgtatgaaaaccactgggcaccataccactaagatgagacagctttaatctggaaacctgtcactgctattatgtaatctctatattgctctcatataatacctctttttgagccacatggattccagtgaaccctccaagaatgaattagttacaagaatgtgcccctaattataaaacaaactataaagacaaattatcctgctgtagtaggacatttgaaataaatcatttatattttgaaggacgtctgcccattatgtttatttgcatataaaggagctacgtgcagatagggtctgttcctagcttcactggaggagggcctgtggtcttacaggatatgagtagctgtttgagcactgtaacactggaagaagcaaggcttctagatgtgtgtttgggatatgtgtttctactaaaccttaagtaagggccatatcttcggtaattttgtccccagatgtgttgttatcattgattatgatagtcaggttcaaggtgtcatgaaggatttgttatatttaaatgtttagtaggtgatatagagatttcataagattacattttttaaatgcttggatagtttcttctgtgaactatttcatgtcctgtctcagcttcacttaaaatattttgtcaggaactgtcagaggactttttattagatatttctgagataatattaaaagcattccaggccgggcgtgtttgctcacacctgtaatcccagcactctgggaggccgaggcaagtggatcacctgaggtcaggagttcgagaccagcctggccaacatggtgaaacctcgtttctactaaaaatacaaaaaattacctgggcgtggtggtgggcacctgtgatcccagctactctgaaggctgaggcaggagaatcgcttgaacccgggaggcagaggttgcagtgagccaagatcatgccattgcacttcagctgggcaacaagagcaaaactccgtctcaaaaaaaaaaaaaaaaaaaaaaggcattccagtatgagtatttgctggcaggtaaggagaaattacagtagcagtgttttttctttttttttttttttgataaagctttctagagattctctttgtttctgttccactagtgacagaggccaagcaagaattaataacctaccctcagcctcagaaaacatccataccagcaccattggaaaaacagcccaaccagcccctaagaccagctgataaggaacctgaacccaggaagagggaagaaggccaagagtcacgcttaggacatcaaaagagagaagcagaaaggtatctgcctccttctcgaagggaagggccaactttccgaagagaccgagagagggagtcatggtctggagagacacgccaggatggagagagcaaaagtaagtagtttgtcagggcacataccagactgtgatcatcacaatggagcatagatggccaatgttatgtccgggagctatctgctttccagtaccctgagagatctgtgcatgacctgatgacagaggccattgctgtctgtggaccttcctgtactgcttaaaggaatctatgcccttcaaatagtaaattgctatatgaatgcagtaaggcatgattttagatttctaagtattggtgaagaaaagtatgcagtatttatttgtttagcatttttttacagaaccagccttgctagtagcatctatagtaaaaaatgacagtcagattcttgggacttcaaaaatttatctttctctcccttgtgttgcccttctcccatttatggttgattcagctatcatgctaaagcgtatctatcgttccacaccacctgaggtgatagtggaagtgctggagccctatgtccgccttactactgccaacgtccgtatcatcaagaacagaacaggccctatggggcatacctatggctttattgacctcgactcccatgcggtgagtttcctccaccttggattggcctagagacagatggctaaagaaccttcaagaaggtttgactgggggccgggcctggtggcttacgcctgtaatcccagcactttgggaggccgaggtgggtggatcacgaggtcaggaaatcaagaccatcctggctaacacggtgaaaccctgtctctactaaaaaatacagaaaaattagctgggcgtggtggcaggcgcctgtagtcgcagctactcgggaggctgaggcaggagaatggcgtgaactccggaggcggagcttgcagtgagccgagatcgcgccactgcacttcagcctgggtgacagagcgagactctgtctcaaaaaaaaaaaaaaaaaatttgagggacttcttgatcatttgaattcttgtgtgctacctgatatcataatccctcttgctctctcctttgggtttattgttcattcaggtcaggtgacagccctcaaaagttaggatcccgtctggttttctaggttcatttttttcttgtgtcatttactgtttccaacttactcgcttgtgaagaatctgagtactgaatccttcatgattttagtgaactttctgatttattttgtccagccacagatggttttatatttgatgataaaacatttcctctttttcctcaaagtatttatagattcctgtggcttaaatttttagttgcggggcctttttctatggaagtaaggtgaagataatgaaagtcattggtatttcttagatttttcatgctcaaaagtcacaagggactttgtaaactgaatctgattgatgataattgcaacctaaaagaagaggatttgaatttctgaagtttatgccagaactgacatctattctgattcctgttccaatcagtccttcattaaaagttgcctgtttctgccagtatgctcttactgttaaaattttgacagaatataatgtagtaaatttatcctctgagaaggaaaatccacgttcacttctctttcaaaggagaatttttctgtctttgggttctggcattttctgtctctgggttcaagtgtgtctggttctataggaagctcttcgtgtggtgaagatcttacagaaccttgatccgccatttagcattgatgggaagatggtagctgtaaacctggccactggaaaacgaaggtaaggcagaagggtgaggatctcttgtgctgcccccacttgtgtttttgagaggaaactccttttcctggctggaaaaacagtaaagcatgatgttttcctaacatggactgcttcagataggtgtttattacagtttctttctgaagcctgacttgtcctgactctcgaattgttttctttcttgaataatactaggtacttttgtcctttcccttttgactgtctggtatctttgggtcccaaatggcctggcgtggtagcacatatctctattccaagctactaaagaggctgaggcgagatggggagcgggttacatgagcccaggagttctaggccatagtgtgcaatgaagatgcctgtgaataaccactgtactctaccctgggcaacacagcaagaccctatctcttaacaaaaaaatgatggtacagttttggatgtgcagacacatgtcaatacattcttgccccttgcaatcctaggaaaatgctgtcctggcttttccttcccctgaccttgtgcatatttccatagcactgggaaatctaatttctctttcctccttcactcatcttgacccaggagtggtaacttggaaatggccatgtcagagaaacaggcttaccaatatggggcatatcttgctctagcaccctccacttaatggctgttttgctccaccacttggctttgtaagagtcttactgctcattgggcaggcgtggtggctcacgcctgtaatctcagcacctggggaggccgaggcgggcagatcatgaggtcaggagattgagatcatcctggctaacacggtaaaaccccgtctctactaaaaatacaaaaaaaaaaaaattagctgggcgtggtggtgggcacctgtagtcccagctacttgggaggctgaggcaggagaatggtgtgaacccaggaggcggagcttgcagtgagctgagatcacgccaccgcactccagcctgggcgacagagcaagactccgtctcaaaaaaaaaaaaaaaaaaaaaaagagtcttactgctcattctttcaggagtgtctggaccacccaacctgcttgctgtctaggttggttcctttccctgcaaaatgaggaacagaggatttctcgataggaactgtaggattaagtactcgtcaaatgccacttggtagcagccttaagaattgttgtgttatctgttgcagaaatgattctggggaccattctgaccacatgcattactatcaggtaggctgtaacaggtggggagtgctctattaaaatcctcaggtgactataagggtgatcttgaattttctttagtgggtgactgttaaggtgaatgaccattggatagttctgtaattttaacttgcctttctgtgatagggtaaaaaatatttccgagataggaggggaggtggcagaaattcagactggtcttcagatacaaatcgacaaggacaacagtgtaagtaacctttgttttatttctgttgctcttttttgcttgacttgctactcattacttgacatctgtgtgatcacagttggcaagatacactgttgactgagggtgctcatccagagagaggcatctgtagatgcacctatttgtgttggtcaccctaattcttgggttcttgatgagtctccagtaagggcttcattggacagagactaacattggctctgatcttgttacctttagcatcatctgactgctacatatatgattctgctactggctactattatgaccccttggcaggaacttattatgaccccaatacccaggtgagtttggggcttttttttttttttttttttttttacctctgtcaatgattcttttgagaaaagcacccataatttgctacttgaggattttattccctggattctctggatgctcattgcatgaaaagtggaaaagtttagatctatggaaacagaactgttgcctatatggaaaatcagtgccttgtggcaatacaggtaagaacagtgttgctcttgaaaaagtggacagtgggtggtctgaatgtgtcctggtccctggagtgggtttttagattgatgtggactcttcttagacttgtaagtaaaaaagttgtttcttcccctaaaagggaactgtgcgccttagacctggaattgctgggaaactgaaacattctgtagacttacttgtttccaactgtatcgcagcaagaagtctatgtgccccaggatcctggattacctgaggaagaagagatcaaggaaaaaaaacccaccagtcaaggaaagtcaagtagcaagaaggaaatgtctaaaagagatggcaaggagaaaaaagacagaggagtgacgagggtaagaggaattgttaatttgctgtcttttgccacatagttattaaaatgttggaggtacgaacagaggatatctatgtttgcaagtgtaaagtaactttaaaaatactctgtcagccgggcgtggtggctaacgcctgtaatcccagcactttgggaggccaaggcgggcggatcatgaggtcaggagatcgagaccatcctggccaacatggtgaaacccctgtctctactaaaaatacaaaaattagctgcgtgtggtggtacacgcctgtagtcccagctactcaggaggctgaggcaggagaattgcttgaaccctggaggcagaggttgcagtgagccgagatcgcgccactacactccagcctggcaacagagcaagactctgtatcaaaaaaaaaaaaaaaacctctgttaatgagtatttttacctggtgtaggcaattccctcacctcttatatcccaactctctcttttacaaatgggaaaactatggatggtagaacaaagtggcccagctcaaatcccaacacctcagctccatacattttcacttttctacattccttttttagtgtttgactttatacacatttctctagttgtaattatagcaggagatactgtttagtcactttttatcctaagtattttttccatgtttctatatactctattatttttaatgcccacatggtaaaaattcacggtataactgtaccttcattttcttcatctctcctacattatttgtcttctctttctaatcttttctttttcctttttttttttttttttctgagacaaagtcttcctctgtctcccaggttggagtgcagtggcatgatcatagctcacttctacgtcaaacccatgggcttaagcagtcctcccacctcagcctcccaagtagcggggactacaggcatgagccaccatgaccagctaatttttgcttttttgtagagacaggatcttgctagattgaccaggctgatctcgaacttctggcctcaagtaagcttcctgtctcagtctcccaaagtgcttcagttacaggcaagacccaccttgctcgcctctttctaatcttatactgtcataatatataacatttagcattttgtttcttcttttaaattactccctatgacacattttcagaatcagagatgatgaacatttttacatctaatacaaaatcaaattattaggcagggtgcagtggctcacacctgtaatcccagcacgttgggaggccaagacaggtggatgcctgagtttaggagtttgacaccagcaacatggtgaaactccatctctaccaaaaatacaaaaaaaattagcctactgtggtgatgcatgcctgtagtccaagctacttgggagactgagttaagaggatcgcttgagcccaggagattgcagtgagctgtgattgcgccactgcactccagcatggacaacagagccagacttgtctcaaaaaaaaaaaaaaaagaaaatctgccgggcatggtggctcatgcctgtaatcccagcactttgagaggccaaggcaggcggattactttaggtcaggagtttgagaccgcctagccaatatggtgaaacccccatctctactaaaaagacaaaaattagctggacgtggtggcgcaagcctgtagtcccagctactcaggaggctgaggcaggagaatctcttgaacctgagaggcagaggttgcagtgagccaagatcacacctaccttgatatcagttatgcattagtgaaaatggatgaatttgcttgtgattcaattcataacacctttttttcccttttttttcttttgagacggagccgctctgtcgcccaggctggagtgcagtggcgtgatctatctcggctcactgcaacctccgccttccaggctcaagggattctcctgcctcagcctcctgagtagctgggatatcaggcgctgccacaacgcccagctaatttttgtatttttagtagagacgcggtttcaccatgttggtcaagctggtctcgaactcctgaccttgtgatccgcccacctcagcctaccaaagtgctgggattacaggcatgagccactgcgcccagcctttttttccccttctaacactgttagttgtttagagatacagaaaagaggagagagagtgtgtgtgtgtgtttaaaaacttagagtcatactgatttaatatttggactctgcttcagccacttaatctgtcaaactatattcccaatcatttgtaaaattaagatagtaaagcttacataggaggatcatagtaaagtctgaagaagacaatgtttatatatacatgcctcatctggtctgacatacagtaatcatgcaatatatactaacgttttattttattttattttattttttgagacagagtctctctctgtcacccaggctggaatggagtggcacgatctcggctcactgcaacctctgcctcccaggttccagcagttcttctacctcagcctcccaagtagctgggattacaggccaaaaccaccacacccagctaatttttgtatttttactagagacggggtttcaccatgttggccaggctggagcacagtggcacaatcttggctcactgcaagctccgcctctcgggttcattctcctgcctcagcctccctactaactgggactacaggtgcccgccaccacgcccagctaattttttgtatttttagtagagatggagtttcactgcattagccagggtggtctcgatctcctgacgttgtgatccacctgccttgacctcccagagtgctgggattataggcgtgagccaccgcacccagcccagcctttatcagttattatgagtgaatatcatgtgagagttacctctggtttgatcagtttcaggaaaatgccagtgaagggaaggcccctgcagaagacgtctttaagaagcccctgcctcctactgtgaagaaggaagagagtccccctccagtaagaccaacattgatcccctggacctagggctggggctggggatggttccgagtagaagaggaagcgcaaaggctgatgccttcctctggtgttggtcttttacctcactatgtctcccgaataaggattcccatttcttttgagtacaagcatgagataaagttttctgtctgctaatgggggtattactggagaaccagaggcagttatctggactctttctctctgccctgtgccattcttaccagacgagatgcctagccctttttatcatcttgttcttgtcagttctctaaatcaccaaggaaacccgttttctcagcctcaatctttcctgccttttggcatcacacaagaatctcttagatatggagtgcatgcgtggtcatttttttatagtttctgcctgttcagagtgaatgatgctaatattggtgcccattttttagatgccttcaagcagtagtctcaacctaatcaccagtgattctgattgaatgcaggtatataacaatagtgaccatgcattatttatttattttgagtgatcatagaccaatgattatgcatcattatttaacagttcttataaggtacccttttcctgctccgcattattaattcagctcattgtggcatctgtcttaaccatgctttgcctttaccttacatgtgagctggatctgtctacccaagtgcctattaatgcagttgcttttagtttacttcctaaatcctctttgctagagtcttaatgaaagtcatcttttcttccctccatgagttacagtaatttggaggtatttatctcttcctctttgtaatttgtaaccttttactattttctatgtttattttcctttctcttccttctcctcacattctgttgctagagtcacttctaaaggaatctttcttgtttattcttaatgaacaaggagcaaagccaagctctggccatgttgctttcatctgggaaatgagcagcatggctagtgagtttattttgaacccaattcaatgaaatgagatgcccatatcagaatatcaaaaaaaatggaccccaaaatataggttgaatttggtattgatccctggccttctccttccagcctaaagtggtaaacccactgatcggcctcttgggtgaatatggaggagacagtgactatgaggaggaagaagaggaggaacagacccctcccccacagccccgcacagcacagccccagaagcgagaggagcaaaccaagaaggagaatgaagaagacaaactcactgactggaataaactggcttgtctgctttgcagaaggcagtttcccaataaagaagttctgatcaaacaccagcagctgtcagacctgcacaaggtattaggggaaggagctatgccctttcaaactgttgactcttggccgggctttgtggctcatgcctgtaatcctagcactttgggaggccgaggcgggtggattgcctgggctcagaagtacaagaccagtctgggcaacatggtgaaaccccctttgtactaaaatacaaaaaattagccaggtgtggtgttgtgtgcctgtagtcccagccactcgggaggctgaggcaggagaattgctagaacctgggaggcagaggttgcagtgagccgagatcgtgccactgcactccagcctgggtaacagagcaagactccatctcttaaaaaacaaaacaaaacaaaactgttgactcatattattgatggggattatggggaataaaaaagattatttaggccgggcctagtggtttacacctgtaatcccagcactttgggaggccaaggcacctaggtagatcacttgagatcaggagtttgagaccagcttggccaacatggtgaaactgtctctactaaaaatacaaaaattacctggatgtggtggcgcatgcctgtaatcccaactacttgggaggttgaggcaggagaatcgcttgaacctgggaggcaaaggttgcagtgaaccgagatcacaccactgcactccagcctgggtgacagaccaagactctatctcaaaaaaaaaaaaaaaaaaaaaaaaaagccgcagcagcttatacaatccttcctcagtgtatatcagccccagttcctatcattaaaacagtccaattcaagaatgaattgctctggattaaggttatgcctaccctcaaagaacttccatgtataggccgaagccaagcattatgactgtggctagggtgccaaatatggaggatgggtaggaagagaaagggttgtggaataggacattacttgctgggtttctcatcttagctgtgtcattaacgttacagttggacctcagataagccccttttcttctttggtccttgtaacttcatctgattctatccagctctgacagtgtgcagttttcaccataggtgagtcaaattctgccatttcttcatgtagtgaatattgttatgagccacagcacaacatctatacttgggatgttaaaccgacatacattggtcttcccctgtagtattcccatttatatgaactgaccaaggatccaaattatggacaaataaagtccctaaatggactcacattctcagagcaatttgtttcacaccccttctctagtagatgttgcaagagcaggtgatggaactagattcagactttctctgaatacagagctcaaagttttatttagctaaaagctgagaagttctgcttttggtaataggtacactacttttcccagccatctctgtggaggctttgcaaagataggactctgaaaagctcctgataatccctggaacagactacctcccatgtcctttgacctgaagttgtgagttgtcagactgacacattgaaatttcacccatctgatgtaaatactaataaatggctaaagagataaaaagtaatcgtcaggaaagaggagccacaggtctggtgaattcacaaactgaactggtcataggacagtggaaagtagactgtagtacttttcctttccttaaggtcgtctgctacaaagaaccaccacttcatgtaagagctgctttggactccttaagtttcatacatatgtctgagggcttgtgtagtagagccatgcgtgaggaatttgcaactctcagagcagtctcttggaaccctggggctcctttccatgtttctctgggggctgaaagagtgactcatgtctgggaatggtatgtatggcagagtatgtgggcatttggttttcttcactggtgtgcccacatcctctgtcccatgattttcaacttagataaagagatagatatttgtttcccacatcttggagataagtaaaatgatattcctcttatgccataccacataactaatctgcatgacaagaccagttagggattgttggttgcaggatacagtgatcatttagtagatctgatcaatcaaaagagctacaatccaaaagcaactattgggaaaggcctagaagcatctctaggaccattgtttcttagacctatactcatagaattgcctctcttctcagcaaaacctggaaatccaccggaagataaaacagtctgagcaggagctagcctatctggaaaggagagaacgagaggtaaactttggtgacctattactcccttgacctcagctctttttgctttctgatatagacttcataggctgtgctgatccctccttataagaagatggagaacaaaagcagcctcaaaagatagtgcatacatttgccaaattatataatacaatcaaaataggtgctttttattatttgtaagtttatacttcaatgaagttgatatcttttttaaaaggtggtgttagggtctctaggtagataacactcctctttcctgcttagcttttaaattagttgagttaatgaacaagtgttgaatagcgctgctgaaatagcatcttttactattaaaggctaagctggaggaagtagcttagtgtcagagtcaaatggacttgctacctcaaccacacagttagggtgaattacccagtcataggcttcactggcctctctcatgatggttaagaacccacctatgggtcaggcacggtggctcacgcctataatcccagtactttgggaggctgagacgggcggatcacttgagctcacaagtttgaaaccagcctgggcgacatggcgaaatcctatctctacaaaaaatataaaaattaggtggacatggggtgtgtgcctgtagtcccagctacttgagaggctgagggaggatcgcatgagctgggaggcagaggttgcagtgagctgagtttgtgccactgcgctccagcctgggtcatagagccagaccttgtctcaaaaaaaaaaaaaaaaaaggaagccacctgtggagagccaggcacagtggcacatgcatgtaatcccagcagtttaggaggctgaggtgggagaattgcttgagcccaagagttccaggctgcagtgagctatgatcacagccctgtactccagcctgggtcacagagtaagtccctgtctcaaaaccaaacaaaagaatccacctatggaggactgttagagatagtgaattcacaaactgaactggccataggacagtggaaagtagattgtagtatttttcctttccttagagttgtctactacaaagaaccacctctccatgtaagagctgctttggactccttaagttttatattatatgcccgagggcttgtatagtggagggcttgtgtactttcccctgcttctcagaaggggaaaagacagcggaaccaagcgtgccaacttattctttccaaatgtttaagttaggaagtcactgctttctctagaagaacgtgtaaaggagtgagagattccaggagttaccaagtgagctactttcactttaaaagaaataacaaggccgggtgcggtggctcacacctgtaatcccagcactttgggaggccgaggctggtggatcatgaggtcaggagttcgagactagcctgactaacatagtgaaaccccgtctctactaaaaatagaaaaattagctgggcattgtggcactcacctgtagtcccagctacttgggaggctgaggcaggagaatcgcttgaacctgggaggcggaggttgcagtgagctgagatcacgccagtgtactccagcctgggcaacagagtgagactctgtctcaagaaaaaaataataataataacagcaatggggtagaatttccccactccccaattccctcaggtggcaatctcaggtctgctcttctgcttaccaacagggaaagtttaaaggaagaggaaatgatcgcagggaaaagctccagtcttttgactctccagaaaggaaacggattaagtactccagggaaactgacaggtaagccaggaactcttcattcagcctaggcctcaagcctaatgataaaaccacctcctccttcaactgtactgctgttttctgtctcagggagatgatattatgagtagattctgtctgaactgctaaaacatgaggtctatgccagcctttttactatctgtctttatacggggagtgtacatggaaggttggctggcagcttcgccttcccaaagccagggctggagtagccatgatcgggaaccctttctgtcttcatcagtaatactgcaccctctttacgggcctgataagaatgtcacactcttgggctttttctctagggaacctccattctcacacataggtgctaaataaatggttggctgctgatggagatgtatgatatctagcttcctatacttgttttcagtcagctagttcccaagttgtaagcccagagttatatagaatttgttgataacccactgtttacaggtgtcaagtgcaagaaatactcaggtggacaagacatagattatccttgactgaacacagaatagacaagacttaggtgatggtgcgtctcatagggcagacacagaaatcagtggggaagggaagggcatttcagggaatttcatataccagggatataagagcttatgatgtgtttgaggagttgcaaatagtttgatggtcctgaacactgcaggtatattgttgagtgacagtagataagcctggtccaaaagatgcaggccagttcatgaagtttaaacaccttgaacaccttgctaaggctttatcttaaaggcagtggacggtcatggaataattttaagcagggtattgacttagctttgcattttggagagattactaatcatgtggaagatgagtttgtagagagactaatgcattatgcaaattctatagtaattcaagtgaaagatcatgattgcctgagtgaaggtgatgagtctagaaaggagagtggcctataatcccaacacagagaggctgaggaaggaggatctcttgagcctaggagttccaggccagcctaggcaacatagggagaagggagaccctgcctctatttaaaaaaagaaaagaaaaggagtgtggcttagagagaggtgtcagatctgccagtctttgtgatcacctggggaaagggagaagtcactgatggtgttcaggtctctggtctctggatagctaggaggagaagggacagtaaagtccttgaaaaggaaaaatgggggccaggcgtggtggcttacgcctgtaatcccagcactttgggaggccgaggcgggtggatcacaaggtcaggagttcgagaccagcctggccaagatggtgaaaccccttctctactaaaaatataacaattagctgggcgctgtggcaggcgcctgtaatcccagctactcaggaggctggggcagaagaatcgctcaaacctgggaggcagaggttgcagtgagctgagatcatgccactgcactctagcctgggtgacagagcaagactctgtctcaaaaaaaaaaaaaaaaaaaaaagaaaaggaaaggaaaaatggggccaggtgtggtggctcacacctgtaatcccagcactttgggaggctgaggcaggtggatcacttaaggtcaggagttcgagaccagcctggccaacatggtgaaaccctgtctctaccaaaaatataaaaaaattagccaggcgtggtggtgggtacctgtaatcccagctactcgggagactggggcaggagaatcgcttgaacatgggaggtggaggttgcagtgagccaagattgcaccactgtactctagcctgggtaatagagcgagactccaaatcaaaaaaaaaaaagaaaagaaaagaaaaggaaaagtgggtaacaagtggatgcatgagcagaaggaaagggagataattgacagagcaaggcccttgaggaggctggacaggttttggggctctggcattccagcttatttgatccaacccacaataagagaagtatttttgtatcatggcccaataataaagtgtgtgtgtgcacaactgaaaaagttttcatctaaaatactttcttaccaggtacagtgaaccctgatatttttattcaagtctagtctctcttcatttttatgagttgttacagtgggaccatttagtgtgacattccattgggtcattctctgcaatttgaaatacagtggattaggactaggtgaaggagtcagccatcaggaggaaggacaccttggccttgagtcttctgggacaaggcttaggtggggtgcggaaagagacccttctttattctcagcaccctttataccacattctcctggctcttctcctttccagtcaccttttctgctcctcttccttttctggataaatccaggtgttctctaggactcttctctcagtgcttctttggtcttgctgctctaccctcttgacctgggctttctaaggtacccatggcctcaaccaccaccacagtctaacaagtccaaatctcctgtattattatttcagagtagcagcatcatagcatcactgtctacatggtctgatccatcctcctcctttatcccctgtgtccaattagtgaccaaatccctaattaagtcttgccccctgtcttagtctgttttatgataccataactgaataccacagactgggtaatttataatgaacagaaatttatttggctcatgcttctggaggctgggaggtccaagattgaggagctgcatctggtgagggccttcttgctgtgtcacctcatggtggaaagtaaaagaacaagagagcttaggcaaaagagggggttgggagaaagaaaccagactaatcattttatcaggagaacccactcctgcaataacagcattaatccatttgtgagggcagagctctcatgacctaatcacttcctgaagtttcacctctcaatactgttgcattggggattatgtttccaacatatgtactttgagggacacatttaaaccacagcatctcccattctattccacctccacactggactcctactcccagtctttgctcccactgttcttcagtccattctctaccctgccaccaaaatgacttttgtaaagagaaatctactcttataacttgtctttttacaaaccgtataccttgcctacagggaggcctgagctccaacttttgccagaaggatgaggttcagagacatgatttagcttaataagttcaaggttttttacagtctgaccccatgcagccttttttttttttccttttgttttgagacagtctcattctgtcgcccaggctggagtgcaatggcacgatcttggctcactgcaacctccgcctcccaggttcaagcgattctcctgcctcagcctccccagtagctgggactatgggctaatgtttgtatttttagtagagaggggtttcacctgttggtcagggtggtctcgaactcctgacctcaggtgatccacccgccttggcctcccaaagtgctgggattacaggcgtgagtcactgcacccggccaccaagcagccttacctttgtcagtttctactactactctcttggacaaattgtcttttgtgtctccttgcttgtgtcctccttttctcttacacaaactccttatttcgagatccaattcagatgtatcttcctgttgaaattcctgtcatttttggtgatgccccttcagagttttcgttccttctactgcatttcttttttttttttgaaacagagtttcactcttgttgcccaggctggagtgcaatggcgcgatatcagctaaccacaacctccacctcctgggttcaagcgattctcctgcctcagcctcccgagtagctaggattacaggcatgcgccaccacacccggctaattttgtatttttagtagagacagggtttctccatgttggtcaggctggtcacgaactcccaacctcaggtgatctgcccacctcagcctcccaaagtgattccttctactgtatttctatagcagacatctactgttgctacatccatggttgagctctcttcaatgttctataagcatctcttgacataatgtttgagacctttcttgtgaacagggccatatcttagtagtctgtgtacccagcaacaaaacatagctatcaggcactcagaggtactgttaaatatacttacttaataagaggcagatatgaatcaagaggacagagattttatattaggcttataagcaggtcttcatcaaaatgatggtgtcaggttgggcatggtggctcatgcctgtaatccagcactttgggaggccaaggcatgcggattacctgaggtcaggagtttgagagcagcctggccaacacagtgaaactctgtctctactgaaaaaaaaaaaaattaaaaattagccaggtgtggtggcgggcacctgcaatcccagctaatcgggaggctgaggcaggagaatcgcctgaacccaggaggcagaggttgcagtaagctgagttcgagccattgcactccagcctgggcaaaaagagtgaaactccgtctcaaaaaaaaaaaaaaaggaagtgatggtgtctgcttcttttgcagtgatcgtaaacttgttgataaagaagatatcgacactagcagcaaaggaggctgtgtccaacaggctactggctggaggaaagggacaggcctgggatatggccatcctggattggcttcatcagaggaggtaaaatggtttccatcttttggggggtgacatgaacctggaatgtaattaactttcactttctggcctagagtgatgtctttgccattttgctgggctttctctactgctgggataggacatgagagttgaacactttagccttgaatactgggttatagcttggcaggctgggccctttgcagtttggagttaggaagagaaggaaggagttggaatggatttcatcatacttttacatggagtaaatagtagagcagtatctgaggcagtttgagactgaagaatcatttgggcaaaagaaccagggaatcagcaatgaaaggtacagaggcatctctgagagggactgtcagcggaagtctttggtggctaaaatttaaggagcatgttgttctggttcccatgaaggactttgcccctcatatttcaagagcctctagaaaaggtgataagaggaaacattacccattttgtgttggcttgcttctcctctgaaaatgccaaccataagagattggcttatttctctcctaccgagtttctcatatctctggtattaaagcctgtatcttgcaatcatagcatcaccacccaccttaattcatcttgggtatttgtttaataatgaaagattcttttctttttttttttttgagacagagtcttgctctgtcgcccaggctggaatgcagtggtgcgatctcagctcactgcaacctcctcctcccaggttcaagcaattctcccaccccaacctcctgagtagctgggattacaggtgcataccaccatacccagctaatttttgtgtttttagtagagacagagttttgccatgttggccaggctggtctcgaactcctggcctcaagtgatccgcccacctcagcctcccaaagtgttgggattacaggcgtgagccactgtgcccggccaaaagattctttaaaaaaattatcctgccagggtccgggcgcagtggcttatgcttgtaatcccagcactttgggaggccgaggtgggtggatcacaaggtcaggagttcgagaccagcctgaccaatatgatgaaacccctgtctctactaaaaatacaaaaattagctgggtgcagtggcgcgcgcctgtaatcacagctactcaggaggctgaggcagaagaatcgcttgtaccggggaggcagaggttgcagtgagccaagatcttgatcgtgccactgcactccagcctgggtgacagagcgagactctgtctcaaaaaaaaaattattctgccaggtgtggtggctcacatctgtaatcccaacactttgggaggccaaggtgggcggatcacttgaggccaggagttcgagaccagcctggccaacatggcgaaaccctgtctctactaaaaatacaaaaattagccgggcgtggtggcaggcgcctgtagtcccagctactcagaggctgaggcacaagaattgcttgaaccggggaggcagacttgcagtgagcccagatcgcaccactgcactctagcccgggcgacagagcatgactccatctaaaaaaaaaaaaaaaattatcctatatactgcttcttactagtccagaaatgcctgtggtcaaagaccagcgctgaggctaattaatctatagggcccacttcatagtttgtctttgttttacaggctgaaggccggatgaggggccccagtgttggagcctcaggaagaaccagcaaaagacagtccaacgagacttaccgagatgctgttcgaagagtcatgtttgctcgatataaagaactcgattaagaaaggagacaagttccatgggatacaacctccctcttgttttgtttgtctctccttttcttttgttactgttcttgctgctagaacttttttaaataaactttttttcaatgtgattatctttttgttatttttttttcccagagatgggtgggagtggggctactggtaggagagagagagtgctccctgtctctactaaaaatataaaaattagccgggcatggtggtgggcgcctgtaatcccagctactggggaggcttaggcaggagaatcacttccaggaggtggagattgcagtgagctgagattgcgccactgtacttcaagcctgggcaacaagagcaagactccatctcaaaataaaataaaataaaataaaataaaataaaagggctatataaggccaggtacggtaggtggctcactcctgtaatcccagcactttgggaggccaaggaaggcagatcacttgaggtcaggagttcgagaccagcctggccaacatggtgaaaccctgtctctactaaaaatacaaaaattagctgggcatggtggtgcattcccaactactcaggaagccaaggcaggagaattgcttaagcctgggaggaggttgcagcgagccgagattatgtcactgcactccatcctgggtgacagagcaagaaaaaagaggactatataacctataagcatgtttttgttttgttttaaattttgctctatttctttggctatgagagcctattataacttttaaaaatcctggcctggcatggtggcttacacctaaaatcccagcactttcagaggctgaggtgagaggatcatttgagcccaggaggttgaggctgcagtgagtgcagtgatcacaccactgcactctaacctgggcaatggagtgagaccctgtctcagaaaaataaaattcctcagggttacatatcacagtactaaaaatttcactttgcacatgtctcaagggaagaatgtttcttaggaagagaactgagaccaccatttggatagcataaggcaggtcagatcatctttatcagaactatttagctgtagtgtcgtggtgagaaagcagcaataggtaatctgtaaacaagtggttgtggctatgttctaataaaactttattcacaaagacagaattggcctgtgagttttagtttgccaaccccttgcctaagggaatggtttgtatacagaaggctggaccaaggagggctgaaatatactctgttaaaggtgggtgtggcagagggtttgggagagatggggagtgaggagtgggagaggttagggagaatatgctaagaagaaaacatgaacaggaatagtaaatctgaatttatttgccatgctgtgtccagatctaatttttctctttaataagtctttattcctccaaaagggaaaacaaacaaaatcaggagcacattagcttagaaactgagagccccatgttctgggccttgctactactagtgctgcattactacataagatgggccatttgaatctatcagcactagacaagtgcactttaaaaacccttctgatctaacgatggtctgcagattcatctgtgaagtaactcattacttcctgtctgagtaggtcaaaattctttttggaagctggtctagttttgtcctgaactggccagaccaggttttccttctaaccctatgtcacctgactagacctgtcatgagctatggaacacattaaatgcttcactaatgaagttgttaactcaacataggcagcatccaattattaagtgttggtatatgttttgaaagcttagtctacttgtcactggggattatagcaagactgatgttggcctctgcccatataactcagtccactgggaaaaatggacattgagcaattactgacagaatgagaccctcaagggagaaatacggtatgctatggagacagcatgacatagacttgttttttggtttttttgagacagagtcttgctctgtcgccaggctggagtgcggtggcacaatcttggctcactgcaacctctgccttccaggttcaagcgattcttctgcctcagcctcccgagtagctgggactacaggtgcatgccaccacacctgctaatttttgtattttcagtagagacagggtttcaccatgttgtccaagatggtctcgatcacttgaccctgtgatccgcccaccttggcctcccaaagtgctgggattacaggcatgagccaccatgcctggcctttttttttctttttttgagatgcacttttcactcttgttgcccaggccggagtgcaatggcctgatcttggctcactgcaacctccacctcccatgttcaagcaattgtcttgcctcagcctccctagtagctgggattacaggtgcccaccaccatgtgtgactaatttttgtatttttagtagagatggggtttcaccatgttgaccaggctggtctcgaacttctgagctcagggtgatccgcccaccttggcatcctaaagtgctgagattacatcttccctgaagtaagtgtttaagctcagatgtagtttggcccatggcctaggttggtttgttcttcctagtttaacttttcctttgtagtggagattttgcttttggaaataaggtctgaaattttttttttttttttttaactttaacttctgggatacatgggcagaacgtggaggttcgttacgtaggtatacatgtacatgtgcgtggtggtttgctgcaactatcaaccaattatctggggtttttttctttgtttgtttgtttgagacggagtcttgctctgttgccaggctggagtgcaatggcgggatctcggctcactgcaacctccacttcccgggttcaagtgattcccctgcctcagcctctgaagtagctgggactagaggcacacaccaccacgctccgctcattttttgtattttagtagagacggggtttcaccatgttggccaggatggtctcgatctcctgagctcatgatccacctgcctcggcctcccaaagtgctgggattacaggcgtgagccaccacgcctggcatcaactaggttttaagccccgcatgcattagatatttgtcctaatcctctccctccccttgtccctgtgtgtgttcccctccctgtgtccatgtgttctcattgttcaactcccacttatgagtgagaacatgcaaggtctgaaattttttttcctttttctttctttttgagatggagtctctctctgttgcccaggctggagtgcatggcgcgatctcagctcactgcatcctctgcctcccaggttcaagagattctcctgcctcagcctcccgagtagctggaattgcaggcgtctgtcagcatgcccagctaacttttgtatttttggtagagggggggtttcaccatgttggtcaggctggtctcaaactcctgacctcaggtgatccacctgccttggcctcccattgtgctgggatttacaggcgtgagccactgtgcccggccaacgtctgaatttattatattattttatttatttatttatttttcccaggcttgagtgcagtggcacgatctcagctcactgcaagctccgcctcccgagttcatgccattctcctgcctcagcctcccaagtagctgggactacaggcgcccgccaccatgcctggataattttttgtatttttactagagatggggtttcaccatgttagccaggatggtctcgatctcctgacctcgtgatccacctacctctgcctcctaaagtgctgggattacaggcgtgagccaccgcacccggccatgaaatttttaatacactttgttttttgtgttttttttttttttgagacagactccctctgtgttatccaggctggagtgcagtggcaagatcacgactgactgcaacctccacctcctgggttcaagcaattttcctgcctcagcctcctgagtagctccgactacaggcacatgccactacgccgcgctaagttttgtatttttttagtagagactgggtttcaccatgttggccaggctggtcttgaactcctgacctcaaatgatctgcctgcctgggcctcctaaagtgctgacattacaggcctgagccaccatgcctagccttaatatacttttaaaagcagtaccagctgggcttggtggctcacacctgtaaccccagcactttgggaggcccaagcggtggatcacgggaggtcgggagttcgagaccagcctgatcaacatggagaaaccccatctccactaaaaatacaaaatttgccaggcatggtggcgcatgtctgtaatcccagctactcgggaagctgaggcaggagaatcgcttgaacacaggaggtggaggtcgccttgagccgagattgcaccattgcactccagcctgggcaacgagcaaaactccatctcaaaaaaaaaaaaaaagcacctgatagcttttttttttttctttttgaaacggagtcttgctctgtcgctcaggctggagtgcagtggcacgatctctgctcactgcaagctccgcctcctgggttcactccattctcctgcctcagcctccccagtagctgggactacaggcacctgccaccatgcccggctaattttttttttttattttttagtagaggtggggtttcactgtgttggccaggatggtctcaatctcctgacctcgtgatccacccacctcggcctcccaaagtgctgggattacaggcgtgagccaccgtgcccagcctttttttttttttgagacagtctcgctctgcttgctctgtcacccaggctggagtgcagtggggccatctcggctcactgcaacctctgcctcccaggttcaagcaattcttgtggctcagcctcctgagtagctgggactacagtcacgcaccaccatgcctggctaatttttgtatttttagtagagacggggtttcaccatgttagccaggctggtttcgaactcctgatctcaagtgatctgcccacctcggcctcccaaagtgctgggattacaggcatgagccaccacgcccaggcctgagagcaataatttaagcctactcttagaataaccctgtatggcagatgcacctgaatgtgtgttcccaactagggaatctgggagtgaccaactagagcttagttccttacctataataaacatcttagcccctagtctgtcacatggaacacgggacatacaggagattgaggccctgagttttggggcaaatgaagtttgctaggtggaggtcattatggagagagtattattaagtgaatatgctatatacgctgcatgatgtttgcaggcggttgcggttttcctgcccagcccactggcactgggccatgcggatatgttttcctgttatccagccgtcaccagtggaccatttctttcttttttttttttttttttgagacagagtctcactctgtcgcccaggctgaagtgcagtggcgcgatcttggctcgctgcaacctccttccctcgggttcaagcgattctcctgcctcagcctcacgagtagctgggattataggcacctgccacggcacccagctaacttttgtatttttaatagagacggggtttcaccatcttggccaggctagtcttgaactcctgacgtcgtgatccacctgcctcggcctcccaaagtgctgggattacgggtgtgagccaccacgtctggccaccactggaccatttctgtacgtaaggtggttctcctttccagcccactgccactgggctcttttctctgtatgtaagcccctaatataaggttggagataaagtattcacggtttttgtcatttaaagtaataaaacctcacatttcatttgctggctctaggtctcttcttcagcctcttgaacctggttccttcccttgttgacgttaatagggtttcagcacaacacttgggtactgattaaagtaagaatgggggtgaaaactgtcaccctgtgatgtccctgggaagttccctgaggcttttgatgccggagcagagatcttcagtaattttcttcactactttatccctagggcctggcacagggcctaatgataatggcacaggtactcaataaatgaataaataatgctgagctcatagatttatagaaaatacttgtcggattgaattttgattatatctcttccttagttcatcaaagcccatctttgacaaaagaagtcatttggtttcttggtataggcaagaattctttcatacaattttttcttctttatcttctagagcaatagatcccagcctggaaccaaaacatgtgaaccagtctcttcttttgccaagtggtaggagatttttttaaaaaaacatgatcatgatttcattaaagaggggaactttttttttcacattcagaaactagaaaagacaatctttttttttttttttttttttttaattgatcattcttgggtgtttctcgcagagggggatttggcagggtcacaggacaattagtggagggaaggtcagcagataaacaagtgaacaaaggtctctggttttcctaggcagaggaccctgcggccttccgcagtgtttgtgtccctgggtacttgagattagggagtggtgatgactcttaatgagcatgctgccttcaagcatctgtttaacaaagcacatcttgcaccgcccttaatccattcaaccctgagtggatacagcacatgtttcagagagcacagggttgggggtaaggtcaccgatcaacaggatcccaaggcagaagaatttttcttagtacagaacaaaatgaaaagtctcccatgtctacctctttctacacagacacggcaaccatccgatttctcaatcttttccccacctttcccccctttctattctacaaaaccgccattgtcatcatggcccggtctcaatgagctgttgggtacacctcccagacagggtggtggccgggcagaggggctcctcacttcccagtaggcgcggccgggcagaggcgcccctcacctcccggacggggcggctggccggacggggggctgaccccccccacctccctcccggacggggcggctggccgggcagaggggctcctcacttcccagtaggggcggccgggcagaggcgcccctcacttcccggaaggggcggctggccaggcggggggctgactcccccacctccctccctcccggacggggcggctggccgggcggggggctgacccctccacctccctcccggacaggggcggctggccgggcagaggagctcctcacttcccagtaggggcggccgggcagaggcgcccctcacctcccggaccgggcggctggccgggcggggggctgaccccccccacctccctcccggacggggcggctggccgggcagaggggctcctcacttcccagtaggggcggccgggcagaggcgcccctcacctcccggacggggcggctggccgggcggggggctgacccccccacctccctcccggacggggcggctggccgggcggggggctgacccccccacctccctcccggacggggcggctggccgggcggggggctgacccccccacctccctcccggagggagcggctggccgggcagagaggctcctcacttcccagtaggggcggccgggcagaggcgcccctcatctgccggacggggcggctggccgggcggggggctgacccccccacctccctcccggacggggcggctggccgggcggggggctgaaccccccacctccctcccggacgaggtggctgccgggaggagacgctcctcacttcccagacggggtggctgctgggcggaggggctcctcacttctcagacggggcggctgcctggcggaggggctcctcacttctcagacggggcggttgccaggcagagggtctcctcacttctcagacggggcggccgggcagagacgctcctcacatcccggacgggcggcagggcagaggtgctccccacatctcagacgatgggcggccgggcagagacgctcctcacttcccagatgtgatggcggccgggaagaggcgctcctcacttcctagatgggatggcggccgggcagagacgctcctcactttccagactgggcagccaggcagaggggctcctcacatcccagacgatgggcggccaggcggagacgctcctcacttcccagacggggtggcggccgggcagaggctgcaatctcggcactttgggaggccaaggcaggctgctgggaggtggaggttgtagcgagccgagatcatgccactgcactccagcctgggcaccattgagcactgagtgaacgagactccgtctgcaatcccggcacctcgggaggccgaggctggcggatcactcacggttaggagctggagaccagcccggccaacacagcgaatccccgtctccaccaaaaaaatacgaaaaccagtcaggcgtggcggtgcgcacctgcaatcgcaggcactcggcaagctgaggcaggagaatcaggcagggaggttgcagtgagccgagatggcagcagtactgtccagcttcggctcggcatcagagggagaccgtggaaagagagagagagggagaccgtggggagagggagagggagagggctagaaaagacaatcttaaaggactatcccttattgaacatatgtggctttatttaaaacaaagagcaactcactctgatgtctttctttttcttacatcagctaccagacaggcctttggcagcagagctctggagctcaacaggccaatgtctaaaagaagatcagctaccagagataatttggaggatggcacttacctatggatgaaatccatctttttttgccagggacctcttcaagtttaagaattattttgcaggctgggcatggtggctcacgcttgtaatcccagcactttgggaggttgaggcaggaggatcgcttgaactcaggagttcgagaccagccagggcaacatggtgaaactccatctctaccccaaaaatacaaaaaattagttgggcatggtggtgcacacctgtggtctcagctactcaggaggctgaggtgggaggatctcttgacctggataggtcgaggttgcaatgaaccgagatcatgacattgcactccaacctgggtgacagagtaagaccccgtctcaaaaaaaaaaaagattattttgaggtttgtgaatagctatatagcttttatgactggtggtaagcccagctcagcaagcacctcaggaatatccaaaggtgcttgttgaactgctttggggacaaggcaggcaacggctagtggctatgaagtctagtgagttctagattcttggcatctgcatcatccattgtagggtttgcagtgatgtcatcaatgttaacttttaaatttcattaatgcatgtactcttttctgatattttgcatatatgcttccccataaattgtatatatttcctctctaaatacacacacaccacatatattatatttctaccttttcgtctatatatgtattgtgtatatacctatatatagatatatacactgacatccctccacttattcttgaaagatttgttttccagagagagaagaaaatggtataggcacagttttctgtaactgatgtataactttctgtaactaatggtataggcacagttttcaatttgtatgacctgaaaaatcagttctggctgggtgcggtggctcatgcctgtaatcctagcactttgggaggctgaggcaggtggatcacctgaggtcaggagttcgaaaccagcctggtcaacatggtgaaaccccatctctactaaaaatacaaaaattagctgggtgtggtggcgggtgcctgtaatcccagctgtttgggaggctgaggcaggagaatcacttgaacctgggaggcagagtttgcagtgagttgaaactgtgccattgcactccagcctgggcaacaggagcaaaactccatctcaaacaaacaaacaaacaaaaatgtttgcaaagcatctagggcaataatatagcatctagtaaagcgatcaactaatgttcctcattttaatttattttttatttttatttttttttgagatagagtcttgctgtgttgcacaagctggagtgcggtagagcaatctcggctcactgcaacctccgcctcttgggttcaagcgattctcctacctcagcctcccaagtagctgggattataggtgtgcgccaccacacccagctaatttttgtatttttagtagagacggggtttagccatgttggccaggctggtctcgaactcctgagctcagctgatccacctgcctcggcctcccacagtgcttggattacaggcatgagccatcatgcctggcccctcctttttatttatttatttattattattattattattattattattattattattattattattttgagactgagtcttgctctgtcacccaggctggagtgcagtggcacgatctcagctcactgcaacctctgcctccctggttcaagtgattctcctgcctcagcctccctagtagctggaactacaggtgcatgccaccatgcccggctaatttttgtatttttagtagagacgcggtttcaccatattggtcaggctggtcttgagctcctgacctcgtgatccacttgcctcggcctcccaaagtgctgggattacaggcgtgagccactgcgtccagccttttttttttttttttttgaaacagagtctcactctgttgcccaggctggagtgcagtggcgcaatctcggctcactgcaagctccgcctcccgggttcacaccattctcctgcctcagccgcccaagtagctgggactacaggcgcccgccaccatgcccagctaatttttttgtatttttagtagagacgggatttcaccgtgttagccaggatggtctcgatctcctgaccttgtgatccgcccgccttggcctcccaaagtgctgggattacaggagtgagccaccgcgcccagcaccggcctcctttttattttttagcgacagtttctcgcattgtccccaggctggagtgctgtgacgagatcacagctcactgcagcctcgacctcttgggcccaagcgaacctctcacctcagctcctgagtagctgggacaagaggtgcacgccaccatgctcagttaattttattttttgtagagataggatctcactgtgtttcccaggctggtctcgaactcctggcctcaagcgatcctcctgcctcggcctcccaaaatgctggcttgtgagtgagccaccacttcacgcacggtctccttttgaagtagaattagacaatgttttacaccgtgccagtgaaagcaaactgtactctctacggcgctagtagcaaaagcaaagaattattaacatgcctaataggagccctaaaaactaatccaggtctgcaaaagccgatcgacaactctgtagtgatttagaagagaattgcaagacattaacacagagcgtcctaagtgacaggatggtctggcgaccacatttcccggcagccctcgcacagccaggccgcttcgaggattggacttctccgcaggaggcgggtgacagggggaggggataagcgtgaggtactgtgggtaggagacggccgtcggcggaggcgccattttgtgtagccgccgaaccttgttggaggttctggggcgcagaaccgctactgctgcttcggtctctccttggggtaagtgcggcggctgtctgtaacgacggtaggttcttgccatttgggctggcccccaagcctcccttgtcagctgccggaggcgactgatcagctccagccggttctgtagaggggctaaattaccccaggcgttggagggccgcgcccttccttgttgccagctctgtcagtttccagagggtgtccagccagctcagccttgggcctgcttctttctggctgtgactttgccccttgtggatacacgtcccctaatcttcagcccaacggagcagtggagccgtcgcctgtccctcgggcactccttgggagctccctggcagtctctggccgccatcccccgctcaactgcaactgaatcgccctctccgaaaagctgttcggtgatcgcccatctgcgggtttggaacctcttgggaggcgggaggggcatgtgcggggagggcaggccggacgctggagtcggtcgagcaggccgtgacgccgccatctcggccgcgagaccccacggaggtgggtgccggcaccgcccgggagacaaggggcggcaccagtgaatatgccccgggacttgtttccccccagtggttctttttcatttattaatttcaacaaatcgttgagcattcgctctagactaggcttccagagactactggaactgatttttcggacctcgcgctcatcgaacgcggtccagcagtgtgatgtcttattaccaacggggggcggggggccgggctgttcactactcagtggtttgtagtcataagaactggctcaagacgtggtggttattgttacctaggaattaggtcgtttctagctttgctcttgtcttatgcgatacgttattaatgtagtagatttcagtcagctcagtatcccagcttctacgaggttttacatttttcatcagaagtgtttgaatttcatgttgctccttgtattaatgaagacacttggattaatgttttaacggtcaactatcccacggagttgctttgatacaaaaccaaggagctgattgtagctctgccctttttgctttgtaattctaaggtaggagcagggaaggagtcttctgcttgctccgtattatgattctgttaaatctggaatctaatattttaaaatatgcttaatcttccggttttgctcattgttaacaaaatgttagcacgattttaacgttgacagtttgtccccaccacttccccaccttagataatcactgtcaatgatttgaaggtttgatgaaatcccagcctcagtagtatccaagctatggagctgctgacttaagtgatctctgagatttatagcaattaatctctcttgtctcctagaaaaaataaaatttgaaccttttggagctgtgtgctaaatcttcagtgggacaatgggttcagacaaaaggtaagttactacagtacgtggctttgatctcaacatttcagtggggactgaactccttgtttaaaatagtttatcaaactaatatatgagtgttttgcgccaggcattgctaacgaacacctttatgatcctgttgtcacaaactacagtctagtgagagaattaaagtactgtgtgaacatgctgtgataaagtgtagggtgctcttagaacacataggaagtatgtctttttcttgttcacagccaggaaagcttcctggagaaaatattctctggaaggaagctgaaggataagaaagaattttaggcaaagaagggcagggtagagtgggtcactgaaggttccctgtgtggacagcaacctttgcagaatccaggagatcatacagtctggcacttagcacagttcctggctgtggtaagcaatcaatgaatgccatttcttgttattgttccctgaatagcaagatgatccagacttagagagctgagaagcttgggactgtgtgttacatgaagaaagaaagagccaaagaattagtggaaaattaagatgagagcatttggctattgtgtcacctatgggtacatgctctcagaccatttgatttaaacacacacccttattcagccatctgcctttttagtattgaggtcagtccctgtggtagatcacattgacaggctgagggaccttaggagatgttcatgtcacatggtattttaatgctgtgtcagcagtctgtggttctaaatagcttactaaattaacatttacccctttggggtgtctcagtcccatatttcctttgattctttttattaaatttgtatattctaaatgaagcccttataaacctttcctttgccttatgattgcacagcagttttatgaatctggtaaacagtttacaaaaggtgtattttatctgtggtcaaataggtttaagcctcttgttattaggttttcccatgaagcccagtgctgccctttagccaaaaataaaccagatgttataagaagagtgttctcttaaggggtgctagttttgggtaactatccagttgtatctgacagacaactaagttgcctgatggggaaaaaaaagactaacttagttcatccaggtttttggtccattttccagtaggcatgatacccttgagagtagatgagccagggatgtacttaatttcaccctttaaaattgggtgaaattcgagtaactgctttcttcctgtttttggtcactaagatctgaatcagggatgaagggataatatgtagactctaggcttgacaaaatgcaaaaataaacttggacaacatgactctttcttagaaatattcaacccaaatgtttatttcagatttagcatacattcctgagaattatcattacatttagggatgtaggtattttcccagtggttatcttagtaaactggaatttggtaatactttttaacactttaaactatttggattatcttataaactgatctgtgggccgtgtgtatttttaactatgtcttttaaaggtacaaaatgtgactgactttagaatgaaaattattttccctggcagagtgagtagaacagagcgtagtggaagatacggttccatcatagacagggatgaccgtgatgagcgtgaatcccgaagcaggcggagggactcagattacaaaagatctagtgatgatcggaggggtgatagatatgatgactaccgagactatgacagtccagaggtgagtgaccagcggctgtataaccccccaaaacactctgagccttatagtaatagaaataacagccaggcagccaggtccagtggccccttcccataatcctatcactttgggaggccaaggcggccagatcacttgaggtcaggagtttaagaccagtctggccaacatagtaaaacccgtctctactaaaaatacaaaaattagctgagtggggtggtgggcgcctgtaatcccagctacttgggagactgaggtaagagaatcacttgaaacctgggaggcggaggttgcagtgagctgagattgtatcagtgctctccagcatgggtgacaaagcaagactccatctcaaaaaaaaaaaaaaaagaaaagaaataatggccagggtttacatagggatcaccatgtacttttgagcacttgacttcatgaattcatttaggtctcagtacaacctgataaggtaggtgttattcccattttaaagatgaaacaatggggttatgataacatattagttctgtgttttgaaatgaatgataaatataagttgttggccaggcacagtggctcacacctgtaatcccaacaatttgggaggccgaggcaggaggatcccttgagcccaggagttagaggccagcctgggcaccatagggagaccctgtctttaaaataataataatgaaaaataataaatataagttgttgttttggtcatcttgatatatcttttttttttttttttttttttttttttgagacagctttttagtcttgtcacccaggctggagtgcagtggtgcgacctcagctactcaggaggctgaggtacgagaattgcttgagcctgggaggcagtggttgcagtgagctgagatcatgccattgcactccagcatggacgacagagggagactctgtctcaaaaaaaaaaaaaaccagaaggccggcacggtggcttacgcctgtaatcccagcactttgggaggccgaggcgggcggatcatgaggtcagaagattgagaccatcctggctaacatggtgaaaccctgtctctactaaaaatacaaaaaattagctgggcgtggtggcaagtgcctatagtcccaactactcgggaggctgaaggaggagaattgcttgaacccaggaggcagaggttgcagtgagcagagatcatcgcaccactgcactccagtctgggcaataagagtgaaactgtctcaaaaaaaaaaaaaaagaaaacacagcaggctgggtgtgcctataatcccagcactttgggaggccatagcaggagggtcatttgaggccaggagttcagaccagcctgggtaacatagtgagacccctgtctcaaaaaaaaaaaattgcagtgaacattaccatggagtgcttgtgtaatctctgtacacttcctgctaaggataatttctaggagtggagggtctgtttcaaagagtacagggtgatgttaattgtgattttgtttattgtaactcagagagagcgtgaaagaaggaacagtgaccgatccgaagatggctaccattcagatggtgactatggtgagcacgactataggcatgacatcagtgacgagagggagagcaagaccatcatgctgcgcggccttcccatcaccatcacagagagcgatgtaaggggaaatgacagttataaccagcagtcagtaggcacaatgaactttgagcttctaccattattttctcatgctattgttttatcttaagccaatagaggttgagtatcccttatccaaaatgcttgggaccagaactgttttgatatttttttttaatatttgcatttacataagtttaaacatttgcatttacataagtctaaacatgaaattcatttgtattttgtatatgtcttatacatgccaaaggtaattttatacaacactttaaataattttttttttttttttttaagacagagtcttgctctgtcacccaggctggagtgcagtggtacaacctcggctcactgcaagctctgcctcccgggttcacgccattctcctgcctcagcctcctgagtagctgggactacaggcgcccgccaccgcacccggctaacttttttcgtatttttagtagagacggggtttcactgtggtctccatctcctgccacccgcctcggcctcccaaagtgctgggattacaggcgtgagccaccttgcccggccaacactttaaataattttatacacaaaacaatgtgtgctttgtttttttgtttgtgatatttttgtttctgttttttacaggcagggtctcattgtcacccagtctggagtatagcaatgcaatcatagctcactgcagcctcaaactcctgggctcaagtgatctttttacttcagtagctggcaggtgcatgccaccacacccagctaatttattttttgtagagccaggctgggctaagtatgttgcctggactaaaaggtttgactgccctcttgtctgtgacctttcaaataaggtcaggggtggaattttccacttgttgtgtcatgttagtgctcagaaaatttcagattttggagcatttcaaatttttggattagggttgctcaacctgtatctatctcagctagtgaaatatttttctgtctttagggaaaagttcactgaactaggttcagaagtaagttaccattttggccaggcgcggtggctcatgcctgtaatcccaggcactttgggaggtcgaggcgggtggatcacttgaggtcaggaatttgagaccagcctggccaacatggtgaaaccctgtctctactaaaaatacaagaattagctaggtgtggtggtgcatacctgtagtcccagctacttggggaggtgctgagacaggagaatggcttgaacctgggaggcggagtttacaatgagccaagatcacgccattgcactccagcctgggtgacagaacaagaccctgtctcaaaaacaaaaagaagtaaattaccatatttaggctttgaagctcaatgtatgagttttctaaatgtctttaaccacagggagcaggtcttctgtcttcattagctcctagaagataatcaatatatttttattgaattagttacttattagatgaggatgattggtaaatacctaattttctttataatctggccacccttttatttgttgaaaattgaactacccatttgaaacctcagaaaagcttgttaaaaaggacggctcattcagactggccaattagagtcttagtgtacttggcactgcctgatttccagcagcatctctggtcctcacccttccttccagccacaccctactttccacatcctggactttggacatgtccattgctctactgttgtgcctttttctgcttggagacgcctgtatgtaaagcctgatctatcgggcagagcttcttcttcgttattctcttcctaaggcactgtattcatgacttttgtgtagcacctttactgtagccatcaacacacatgtctcatctctaccacaagatctctgaaaataggcctctgtgtgaactagtcacctctgtgtccccaacccttgaacacagtatgttactcagccagtgctcttggtaaaaatgaatgtgaggttttaaaacagcagtgtgccagtatttgttttcttggagtaatcaaagtaatattctgactaatgtttagttgaattttggataaagctcaaaataagcattggattcccgtagctttgggtttctaaaccctggaagtaatgaatgtgacaaatgtgagacaggatattagagttaatagtgggtaatcattccattatttgtgatccactgcacatctgctacactgtacatgttagatgctacagtgacacagagctatggatcttgcctcaaaaaagcttatggatgagtagctaaggtcagcagataatggtgacaatgcagaatagaaaggggtcagaggccgagtatggtaactcatgcctgtaatcccagcacttcgggaggccaaggtgaaaagagtgcttgagcccaggagttcaagtccaacctggacaacatggtaagacgcatctctccaaaaaaaaaaaaaaatagccagtcttaatggcgcttgtctgtggtcccagttacttgggagactgaggcaggaagatcacttgagcctaggaggtcaagggtacagtgagttgtgttcacgccactgcactccagcctgagcgacagagcaagaccctgtctcaaaaagagggtcatgtcggaaaaggtcctattgaaagaggtctgcctaagagctcttgaaggttatttaaaggaaattgttactagtggagggtaaggaatcttctatttttatttttgtgagacagggccttactctgtcgcataggctggagtgcaatcgcgtgattgtggctcacagcagcctccaacttttggggctcaggcaatccaccagcctcagcctcccaagtagctgggattacaggcatgtgtcaccactccgagctaatttttttttttatcgtttgtttttttttttgtagagacaaggtctctctttattgcctagactggtcttgaactcttgtcttcaatcaatcctcccgcctgggtctcccaaagtgctaggattataggcgtggaaaactaagggaatggtgtggtagatgggcccttcaggcggaggggtatcacatgagcagggaatagaaaggtactgaatctagataaggcctagcaatcggcttgatttggctggagtcagaggcttttggcaggagagggatgagtggcaaagtgctattgtggctaggggctagagttctcaaaagtctagctaagcctaaaagaatattactgagggttggccaggtgcggtggctcacgcctgtaatcccagcactttaggattctgaggcaggcggatcacaaggtcaggagatcgagaccatcctggctagcacggtgaaaccctgtctctactaaaactacaaaaaaattagccagccgtggtggcgggcgcctgtagtcccagttactcaggaggctgaggcaggagaatggcatgaatctgagaggcggagcttgcagtgagccgagatcgtgccattgcactccagcctgggcgacagagcaagactgtctcaaaaaaaaaaaaaaagaaactgctacaagtattgatttgagtgttagaaattttaatgagtggttgaattcacaggtgtgatacctgaggataatgaggattggctgtgtgtagtcttgcagccgttgcacctagttatggaaagtagaggccagtgagaatcttgtttccacaaatttcaccctgttttttttttcatggtagtattcatgcctgatattattgatgaagagactagtatatttttgtggccttttggaaaaaggagttggtctgacattggaacaagcctaccagccagaatactttattctagccccaattaatgtttgatttattaggagcctaagaatgtgatgaactttgaaaatttttaccaataatttaactgtaagaaaagtatgatccattaaaaatgtttacctggcctggtgcggtggctcacgcctgtaatcccagcactttgggaggccaaggtgggtggattacctgagcccaagagatggagaccagcctgggcaacatggtgaaacccctctctactaaaatataaaatattagctgggtgtggcgacatgcgcctgtagtcccagctactcttgaggctgaggcagaattgcttgaacccaggaggcggaggttgcagtgagccgagatcatgccattgctctccagcctgggcaacagagtgagactccatctcaaaaaaatttaaaaaaaagtttatcatcaggctcttcattttttggctgttgatttttttccttattttgagagtaggcctcaaagagcaggaaggctattcttgattaggcgtacttcagggcacagtgacgcatccactgcctcttttaaatctcatctgagtccttatttttatttttttatttttttaaagatagggttgcactttgtcacccaggctggagtgcagtggtgcaatagcccattgtaacctcgaactcctgggcttaaacagtcctcccacctcagcctcccaggtaactaggactacaggtgtataccatcatgcttgggtaatttttattttattttattatttttttttgagacggagtctcactcttgcccaggctggagtgcagtggcgcgatctcggctcactgcaacctccgcctcccggggtcaagcgattctcttgcctcagcctcccaagtagctaggactacaggcacgtgccaccacgtctggctgattttttgtatttttagtagagacgggatttcactgtgttagccaggatggtctccatctcttgacctcgtgatccacctgccttggccccccaaagtgctggaattacaggcgtgagccactatgcgaggcctaatttttaaaatttttgtatacagatggggtcttactgtgttccccaggctggtctcacactcctgtgctcaagcgctcatcttgcctcatcttcccaaagcgctaggattataggcttgagccactgtactatcctgcagaacaaaggacagggagattagactaaaggatggaggcttgagacatcataccacaagcaaggatgtgtatcataacagaaattaattgcggccaggcattgtggctcactcctgtaatcctagcactttgggaggccaaggtggccggatcgcttgagcccaggagttccagaccagcctgggcaacgtggcaaaactctgtctctacaaaaaatacaaaaattaaccaggtgtggtggtgtgcatttgtagtcccagctacttaggaggctgaggtgggaggatcacttgagtccaggaaggcagaggttgcagtgagctgagatcacaccagtgcacttcagcctgggtgtcagagctaggccctgtctcaaaaaaaaaaaaggaaaaattaattacacctgagggaaattcccatgcaacatttaatgaatgccttcagtgctgttataatgcattaatttctatgagaaatgttctctcttttttgtgccttttaggaaaattgcattttggtgatagaagataaaaacttggctaattaggccaggcatggtgggtcatgcatgtaatgatatgggaggctggcatatcacttgaggccaggagttcgagactagcctgtccaacacagtgaaaccccgtctctactaaaaatacaaaaattagctggatgtggtggtggatgcctgtaatcccagctacctgggaggctgaggcagaagaatcgcttgaatccaggaggtggaggttgaagtgagccgagatcacgtcactgtactccagcctgggtgacagagcgagactccgtctcaaaaaaaaaaaaaaatcagtcacgcatggtggtgcacacctataatcccagctactcgggaggctgaggcaggagaattgcttgaacccaggaggtggtggttgcagtgagctgagatcatgccactgcactccagcctgggcaatcaagtgagtgagagacagagactcccatcttaaaaaaaaaaaaaacttggctaattaaacagttgatgtaattcctattccatggggaatagtgtgtggcaaaagctttaactgtaaataatgtaaaaccctgtgcagattcgagaaatgatggagtccttcgaaggccctcagcctgcggatgtgaggctgatgaagagga

SEQ ID NO: 357 - DNA, 836180 bp, Homo sapiens
cagcgagcgagggtggcggggaaggggggcgggggggaggaggagggaggagggaaaagagcggttagggggggcgccgggcgtgtgtcactcgctctctccctctgtgtatagaggatgtgctgaatggtgcgctttgaggcggcggcggcggaggagcagaatccgccgcgactggcagcctcggctgaccggctcggcttctcttcgccttccgaggctcctcatccaccgcgggctccagacctcgcgtcccgcccggggcatggccgggcgctgcgcccccgcgcgctctgcctgctgagcggcgccggagggaggtgcggaggccgggaggccggggaggccggcggggagcagagtcgagcgcctccggagcagagaaaggagcccgcgccccgcgccccgcgccccgcgcacggtccccagtccctgccgcgctcgcccgggccgcccggagcccagatgagcccagatggccggggctcaacccggagtgcacgccttgcaactcaagcccgtgtgcgtgtccgacagcctcaagaagggcaccaaattcgtcaagtgggatgatgtaagtattggggcggcccgagtcggggcgctggctcgggcaccgggcagggcgggcgtcgtgggggtggggcaaggggcgcgttatgcaatgggcgcactgggagcgggcaggggcagcctcgggcgcacaggttggcatctgccaaagcggatgtccaagggcagaagctttgcgcgcgctcctgtttcatcgggcttcagtagttgccatcctttctgggtctggcaggcgccccctgagggtcttacatcttttgggccagtggagagggaggggcaagctttgcctggtgacaggtcctgagagttcggaaagtagggagtgtgaagttgggaccaactggaaagcgcctggtgtgaacaaatcgcgtccctctccgcctgcggacgcaccccctattacctcttttgcccgatttcaagaaggaaggacctgaagttcaaaacactttagtgattgcgaaccctcttggcgcttttgtgggagccaaggcggcggaggacacaacggtccagccaacaggtggtcgttgatgccaaacttcagcgcctggctccggagtgagggtccctgaaaagggctgcggggacacatctggggagggcgtgaacagaatgggggcccttgaggggtcctggagggctcatgggcctgcaggcaagtggggagggctgacttttgagaactgagctgattggagtcttctgcctgaaatagacaggttgagagtttgccccacgatttacctgcaccgtttgccaggtagggcagagcctagcccagcgccggggtctctaatgctttacgagcggcccagaccccaggacttcaaatgacttccccttcccctctaccccagttgtcttcaaaacacgtaaattagttatccagctgaaaacatgcgaatcttcggatggagaacattatggtatcagttttatgtcctgggtgtcattctaaaggttcgataagaaaaacctactgaaataaacccgagttgccaggctctaagcaaatttaagtccaaatgactaatacatctcttaatcagaaggaattataggagaatgaggcgttcttcttgccgaaaagattttccacctagtaaattatagcctgttatcctctagggtatttttctttaatcttcttaagccattttccagtgtctgaaaacaatttaaatattccaggtagtgaatccaattacttagctgagtgcgtctgtgtctatattttgtccagctggaagcgcaaacggaacttggagtatgaaccacagcttccttgaaagctcgtgccaattattaaatgctgtaggcaaggatgtaaacatacatctttttaccatgggcttcacacttttcttctttctgttccagtctaattgtactgaatgtttctgtaaatggaatagaatctaaacaataaattcagacgcagattaaatgctttgtgtcagggaaaaaaaagacaaagaaaatgcagttcagcaataaacaagacggtcttgcccattttgagatccttgaatagagaggtgatgtgatgatggatttactgagaaagagagtgaagggcagaggaaagagaaagagactttgcagaatttagaaaagggagtttcagcgtaagctctggatttgtatacagtgatgattctaaactgtattttaaataattctctataatttcttgtttgggagagaatagccaacatcacattgagaatgaaagtattctatgaaaacacattttggtatatccaggtagatgactttcattatgtgcatttctgtaacacatatttcttgctcacctattactgccaatcctagactggattctggggtggtgaaaaaagtagacaaaatccctgctgttacggaccttacatgctaggtggaggagacaaaaatcatcaaaaacaccaatgagagagagattgggtgatgcattgagggtaatagagaggacgttagtgaaataccaaccaaagaagaagttgaaaagagctccttctgagcattgcagcagtgagtttccaaggaagccctcctgaaagaaaggacatagtcactaaggagaagaccagaagaatttcaggtcttttttaaaaaaaaaaaaaaaacctagactgcactcaggagtcaagttatctggaatataatgagctatcttgcaggctctttggttctctgggtcttcatgctgatcagtggactacaagggacccagcctttcttaaggttgcctttctcttccccaggcatcccttttctactcttctcagctcgtatttgcccttccagaatcaagccagttcaagttatctggctatttatattgtaccttagtgagacagtgtgttgaagacaaaaaagaaccagatcttgaatcaaaggcctgagtttacctcctagttctttcaccagtaagctgcatgactttaggcaaatcacttagcttctctgtatttttgctgcttcttgtgtaaaagcgtggtaatgttacaggacattcaaaaatgatgaatttggggctgtttaggatgtgaagaaattatctcttgttcctgaagtgattaaagcagtataatcactggtcttgttgtcttgaccaccatatggaatggaagatgtcacccagaggttgcagtgccatgcataatttgctggccacctaccaagtcacagtgaggctgtggatgctctaagggtggtagtcgaaagctttaacataggcactaaacaatcacaacagacagcaggggggtaatagatcctggagataccctgttgtaccagggccaggcgttaatatttttgctgcttggtcatggggaggtctgggagtccccagggtctgtggatgggtgggtaggtagctggagtttttttgactatttcagtattttaaaactcatggtgtatattgtctgaacatcaaggctatacctgtccttctgaacttggcatgaagataaaggactgacctaatgatatttaaaaaattcaacctcatgtctttgcttttgttttgcatttgtctgttagcaggctctggtggtaggaggtgggtgtaaaggactatgggtatttgtgggagaattctggtgaggtagacagtggaaggagagttactttcttgatctaagctagggagcttgggagattgtgagagaagctcctctctcttctggatcttggccttggtctatattgggcaggacatggagagaaagagcaaggactgtaaactgtacaataggacccccagccactgatttggccctgttttccatgcctaagcactctgtctcactgtcgcacaacctctgagggatggaagggttttcatttatttattccttctgtttcttcattcttacctttcaaattcagatcttactgtgggcaggttgcttaacgcatcccaacttcagtttcctcaacggtaacatgcaaattgtaatatttcctaactcagaacagctgttgaggttaaataaatgaatgcatatgcattgctttgtataaagcctgacatacaggcaaccttcaataaaacatgtttttaaaagttattgtcggccgggcgcggtggctcaagcctgtaatcctagcactttgggaagccgaggcgggcagatcacaagaccaggagatcgagaccatcctggctaacacggtgaaaccccctctctactaaaaatacaaaaaattagccgggcgtggtggcgggcgcctgtagtcccagctgctcgggaggctgaggcaggagaatggcgtgaacctgggaggcggagcttgcagtgagccgagatcgcgccactgcactccagcctgggcgacagagcaagactctgtctcaaaaaaaaaaaaaaagttattgtccctcaaaaataagatggacgtgaattttatcaaggtgattagcaggtgttctatggctcttttattctactagtggaaaaattcagaccttacttccattccctttaatgtgtgttttgattttatactttataatttggagaaaaatcaggtttctcaccttcttttaaaaatccaggtgtttcacggaaaataagtacgtaatttagagcaggatccattctctacagcaagtcagtttacaaataatccaaaagtttatttttacttaaattccatataaaatatatttatgtatatatgtgtatataatttaacattgcacgttctgtcttacaagcatattctaacatggaaaaataattgctagactaagttgtctgagaagtctgatgaaactcagaagtttggatttgcgttaatgccatctggatttgaatcaagtaactccctcctttaccacacctccaacccccacagctaaaacaggtaatttaagaaatactagtatattgcacacttcccagcatcctacacaaaagcttagaacttttgcattatgtggaatctgctgttccagtttccaaaatgatgacaagtaaatgatgacaagatgacactcacaagattaatgagagagcagaggggaaaagggtttgcgaggtgggaatttagtagcgttcactttggaaaggttatgggaaacagggaggaaacttctctgagttggtagctggctgatgtggatggagcaactacaaagtgcaaggtggattttagaatggaaggctagcagatgccctctaaggagccacttaaatttgcccagttatgtccatttttcttgtccaaagagctttgagaatttctcattggcagtcaataattactgtaatctaagtgtaagagcataactcttttgcaagcaaatcaataaaactacttgaaactttttaaaaaatcagtgtaacatgcgtacaacaaaacacacaaatcctgtgtccagctggatccattttcacaaagtgaacattgccatgtcatcagtaccagatcaagaaacagcatcacttgccccagaattcctgagtgctctcttccagtccctacgtccccttctaagggtaacccttatcttgacttctaactttatagtttggttttgcttgtttttaatctaataagctatttttactttgaatgaaaactttaaaaaaaacctcttcagcctaaaacatttttattattgctgaactgatcctcttgaacaacagcaacaaaagtgacttacagtcagtttagatggccattgattgggttcttgtctgtcccaagtctgggaagtatagcaggtatagtaaatgccctgaaggagcaaacagttcaacaaaaccctagtaatttacagaggaaatgtaatgccttcaggctgttattggcatggcaaagctgactagtacagtactgttgctggaatataattttctctcataggttttctctcttatcttgcttaacactaatatttccccacctatggtgaatgaggataatttgcagtggctattagtttcatttgaaagtttagcctatcagtaaatagcttcaagttatatttatctgcaatggtatataaatggaatgggaacattttacttttttatgtgggatttggtaaactgtaaatgtttccttatcagaattgtttcatgttatcatgaacaagaatcgccagcagaaaatggaaggggattgctggtgaattgttgactaacgctatgggtctccacttaaataacaaacccctggtaactgaaatcattggtcttcttgttactggagctaataattaggttcatgcaacctttcagatcatatcataaattccaaatgctcaggcatatttcacagtcttttccatctaatcttttccctttctgttctatgtctgatccccctaagcagagccttgtgcccctatgtgtaagtaggcaaaggaaatatagacatatttctgaggtcatttacatatatgaccataaaaaagccattgatttttgtaactaactaactgaaataggatataaaggaactaactaattggaatagattataaaggatgcttatgttctttaagagtctctctggttttcctctgatctctttaagagctaatgttcgattttattatcattaccatgtgttaattctcaaaatttttatttcaatttgtattccaaaaatggtttgcatgtacctattaattgaggttgactaaatctatgcatttatcaagaaactaaattattataaattgagtaacaaactattatataaaattggaaaaaagttatttttatttatactaaaattattttatttatattaaaacagaaataaaagcatcctacatctgtcttttatttcaagggtttttttttttttttttttttttgagacagagtcttgctctgtcacccaggctagagtgcagtggcaccatctcggctcactgccaacctctgcagccgggttcaagctattctcgtgcctcagcctccggagtatctgggattacaggcacatgccaccatgcccagctaatttatttttatttttatttttagtagagacgggggttttgccatgttggccaggctggtctggaactcctgacctcgggtaatctgcccacctcggcctcccaaagtgctaggattacaggtgtgagccaccgcacccggccttcaagggctttttttgtttacaatatttggttaatgttctgtttctttttactgaattgacgtttaatgtacaagatcacagaaagtggattagttagtaaagaaaacatttacctgaagtagtcacatggatatcaatatatagcattgatatctagaagattaagatattattttgccattaaaaaaaacattttttttggaagttgtctatgaaatagttaagagtaagggaaatttaatttaattttaatccattttatagaagaagccatacaagctcatgaagctggaaaaccatagagcgaatcagcaattgatctggtcaaaaaatgttaaagatgccaatcatgatcctccccaggtgtgctgtgttggatatggttgaatctcacatagcatcgattcctacatcctcttagtaggacttcttataatacaaaatctggacttctaaagctacatttaccagactcctttttgacgaacattcttcttgaaaattaatatttccaccaaataaattcatgcatatgagatatggagggcagaaacattaaaggggccaatttcctgcatcctttgggttgtttctacagatacgtgagaagctaaaagaggtgggactttctgtaatagttcttcagtgtctctgagaggcagtggtgacagtggccactccctgttggcagcttacacttctttggcttcaacaaagctggtgttttgtttggaccccgggagttccttcttgatttctcacctttctgaatgtggtagatacaatagctctccccaagggtctgtgctgctatgttctgagatcattcatggagagccaacctaaagcctgctcctccaacccttccagtttttctgtcaagtgcttactttatattaagtccctttatcttcaaaattcaagagaaatttctgtttctcgcaccaaatcctggctgatatggccttttgcggttctaggatttcacagctttcagtcctaaatataataatcatctaagtatcctacatagttttctccttcagtactactgttgagtaaaatgaagttttgctgtaatatttcctctggaattcaaaatccagactaagtcctaatagcaggcattcatgcttatatagcagccctgcttacccctgttcagtcattaagaccacctcgggtggtaggaaaaagagcaagcgtttgtcttttgcatttcacgtagaagcaaatcgaggctagtgattgtgatttgtcgaagggcacataactaagtagatctggaataggaatttaaaactacgtcttctggccaaattcagtgtcctttccagtctaccatgatgtccccgaacagggtccttttagtaacaacaacaacaacaaaaaactttttatttttttatttttttttttagacggagttttgctctttttgcccaggctggagtgcaatggcgcaatctcggctcaccgcaacctctgcctccccggttcaagcgattttcctgcctcagcctcctgagtagctgagattacaggcttgtgccaccacgcacagctaattttgtagttttagtagagatagggtttctccatgttggtcaggctggtctcaaactcctgatgtcatgatccacccgcctcagcctcccaaagtgctgggattatagatgtgagccaccgaacgtggccaacaaaaagcttttaatagagtctaaatgaatacaagtttgaagagattgatagacttttccaaagaatctctgttatttttaggattcatacatatgaagcttagatccctgcaaactcagtttttgagctattgtcttcaaaatagctctttttcatggtgtatgtacagtccgtttttgtctacactgtgcaagatgtgtgagcattggaaaacctcattgctgctttgagacaaaaagggcaggccagccgcagtggctcacgcctgtaatcccagcatattgggaagccaaggcaggtggatcacttgaggtcaggagttcaagaccagcctggccaatatgatgaaaccccgtctctactagaatacaaaaattagctgggtgtggtggtgcacacctgtaatcccgaccactcgagaggctgaggcagaagaatcacttaaacccaggaggcaggcagaggtttcagtgagccaagatcgcgccactgcattccagcctgggcgacagagcgatactccgaaaaaaaaaaaaaaaaaaaggagggggcaatgtatgctctatagtctttaaagatattctacatcagtcagtcagcgtggaaacatgcatgtggaaagacaggtattcaggtatggtgttaaaggtctttttttcattgtcgagtaagtgacatttctgcattcagcaagactctttatatctgttactccaccttttcttcttctcgacatacgtgtaaatgttgtcttttgctgattcctatttaggcttgtcccatggcctctcatagaaatcatggaccatggaagaacaagaatatggtagacatgaaggaaatgtagagggtgagttgcctgctctcaagcacgatgcagaatgcaagacagtgtcaactgagaggccagatctatattacttgtgcagggaggtagataggccttgtttatattacaactagagcaggacttctggagggctatagctttataattatcattattatttttttccctaggggagagcataggcctggcactgggaggtgctgatgctcaggggatatttgtggaatgaaggaactgtctggtgtttgtctggctcacagtgggttcacacaggggagtgtgcagccttgaggcagacctggagggcagtcatgctcctatgagaccttcgtgacctttgaggtgttgtgttacattggttggaacaccttgctccttgtccttccattccatctgaaatctcctagggtcctaagggactctgtgaccttcttaaatgggatttctccatgtgtgtttgagaaggaaactatttattggcaatgcagagctcactgctgttacagtgctgatttcatttaaggtccaaatatgtcttaagattgagtgtatactacactgcaattcaatattggttgaaggtgatgatgcttaatgtatttatttctcatattctaaattttaccattagttcctattttctgaaaaatatgctcacccatacacccaaatattgcaatgaaaagcccttaaagaaattcagaagcgttgggagtgacagaacaaaagatgcatggttgtgaaaacatcctatcacgataatgattcacaaagagaaaaaagaatacttgtgctttattgctaaagtgagaaaagtaacaagacatagttctaaatctgatttataatgaacttccacctacactattctttgtgtacagaggcaatggaagtccctggaacaatgcttttaatttcctcctttctccactcctcgtttaatgtacttgggccacctccattattccagctgccctcctgcccctgagaaatacctcaccttctgcatttatattttggagctcgaccttcctggcatctctgaatcctgacttcattattatctgacaccactcccctttcttttaacagtgtctatatgagtttcccctcagttgaagctttcctaagaacatagcaatatgcctttactagtaaaaatcccaacctcaaaaccaacacaatgttccccagtcccttttcctcctttagttaccgtcttcttcttcatctccttccctctactatgcaagtgtaacttatagtcactgtctccctgtccttacctcctacctacttcttctcagccttccaaagtctttttctgccctcaccactactttgaaatttctttatcatggctgtgggcaacatggctcccagcaaccccaactgatgtttttcagaatcttccttgtttttatttgctgcagtaccttccaccccttcatccattcattcaccagtcatactttaaaaatgtactgatgtctcttttaagcattgtgctagtgttgtggattgatgatgattaatgatttcatgcctgcccttattgcggagacagatgctaagcaaatagaggtacaattattttcattataactgctatgaaggaaaaaaagtacaagtgagtataggaagcatggaaggtttccctggaaaattctatttatgacaagtgggatttaggccagcatgagtagaagaatgtgtcaggtggagggaacagcaggtgtgggtattccaaagagccaaggaacacaagattttgaaggagagaagcagaattagcacaggagagtgtggctcagataatgtggttggatggcaagggcctgcatatatactgcgtaggtccttgcaggattttagacgtataaagtcaaccagaaaccattaaaaccatgttttcaaccctggcaccattgacatttggtcccagtagttttttgttgtggagtctggcctgtgtattatacgatatttagcagtatccctcgctctagatactgggtgtcagttgcaaagcctcccagtagtgacaaccaaaattgtctccagacatagccaaaagtcccctggggtgcaaaattgctcccagttgagaaccactgatgaaaatgataaatgatatactatgcttttaaaagtatccggccagttcactgccctccccgccaccccaaaggccaataagtacatgaaaagatgtttaacatcattagtcattggagaaatgcaaattaaaaaacacattgaggtgccactgcatacccaccagagctatatgttactgaaattattggtttttctcatctgatgcccccactaagccaggagcacctcggttgatttgggatctgggctttaatttggttctctcgtggattatctgaaggatcttgcacgacacttgaagaacaattcttccaacatttccctacattgtgttaaaagggatttttctgcttgttctgtaggaagccagtatcttcacattgcttctctccactgttttgcaccctctactctggaccttcttcatctcttctgcttttctttattttgggaaatttcagagtagagacactcctggaggaaaagtctcatcaatgctgatacacgtggatgttttactccaatgatcttaattcctcacctggcatccaagactacgtttataatgttttcatttcatagtcagggctgtattgctcatgtttagtttgacaagcatcacatctgattttctgtgacccttagaactctttgcccgttgcatagctgttttccccccagtgtctctatttgctgtatttggccctgctgcttcctgatgcaagtcttgggcaatccctgtggaacatcgcttgttacttttcctgttgactctgtggtatcgattagtttagacgtgcatgcctctattcatgtgtgttctcttgtaataccataaaaacatgagaatcgctgtggagtgagaattgtggtcaaccttggccaggagactttctgacagtggtgctgaggaatgtgccatgggtctgtggactggcccttgacatgagccttgaggtttagggttatgctttgtagtagtttactaagacttccatagcaaaggaccatagcctgggtggattacacaacggaaatttattttctcacagtttgggaggaagtgggagataaaggtgtcagcagggttgcttcctgctgagggccgtgagggaaggatgtgtgccaggcctctcgtcttggctggtagatggcctgcttctccctgcatcttcacatcattttccttctgtacatgcctgtgtccagatgttctcttcttataaggacaccagtcatactggattagggcccactctaaggcctccttttaacttaatcatatctgtaaagaccctatctctaaataagatcacactttgaggtactggggattaggacttcaacatgtgagttgttggggaggaggccacgataaacctggtgacatacctccgcctggtaaagcgtagctcagagggtagcaacatgacagctctagttagatattgaagaactgacacttagagaagaagttagatttattttgtactatttaaatgttaaaaattaaatggtagctgcatatgtggataaaaccataaactgccttgctggaattgtgtgacaagagcactgagattgctttgtgagaaatctccctgttaaagagtgtccctgtgaaggtttggagttgccctgcctaacagaaatatagcgtgagccacacaggacacttgtaaatgttctagtagcctcattaaaacaagtaaaaaagaaacagatggaattaatacgaatactatatttaatttaatccactgtaggcattttgacatgtaatcaatgtcagaaatcattagtgagctattttctattcctgtttccattcttagtctttgaaatcttgcagcacatcttagtctcagcagtcgcatttcaagtgctcagtagtcacaagggagccacagcagctcctgtactggacagcaccagtatagggcatccattctcaacaggggccatgtcgcttccaaggaaacgaaaagtggttttggggaacaaaagaaatcttcttactgtttttgttttttttgttttttttttttttggtataaggcacagttatacatacagcatataaacagatattcagcctatctgcaatattgaagtgtcatgggggatgattagaaaaataaaaacctaaaaagcctcccttgcagggcaataatggaaaaagttgagaagcactgttatagagtgcgtacttgaaggtttaatttccagtgcttcccataccagcttaactggctttccttgaggaagtcacttagcccaagccttggtctaggtatctgtaaaatgggaataataatagtgtctacctcttaagttattgtaagtattaaaggagaaaagccacgtgaagttcaccacagtgattggctcagagcaaatgttgagaatgtatcagttactattcagtcagggatttttataaaaaggtatactggtattagaagtgagtttggattagtggtgcctttgtcatttcgtctcagtttctttagtatttattattgacttatatcagtgcattgatgagcaaatcattgtaatgttaatgttgattccagtgactcttttttttcttgctgaattgtttctcattcttcaggatttcgaggttttgttaaggtcttttgctttgccccttgattgtttttgatttggcttaaagactctttagagattcatgtaaattactaaataacatcttcttaattactatattaatcttcactatttatgatataggaatgacagtaaaacgtattatatcaaataaagagcagcaagtagaaatttactgaacattatctgctattactaacttaagacaagtatgtttattggttttcttttttacagacaaacatttatcagaaaaaatacaactttaagtaaattagagttgaattcttagaagcaatatactcacaagatatggtttgcctgcattctaaggtcacaggtgttcttggaggtaaacatcatcctattcctgacccaaagcctcacctattgtaggcctacatccgtggttttgtaagtgtggcccctggaccaacagcatcagcatcaccatgagcttcttagaagtccagattttcagactccgtcccagagctactaaatgagggactctggagaaagagcccagcaatctgtgtttttacaagatctctcagtgaacttgatgcataggcaagtttaaaaaccacaatcttatgaaatacacacatgttatagatgttgatggagaggtaaaggattaaaatatagaccatctgagagctgtcttcatcattctacagtcaaaggtcccaagagtcgcaacccatctgcagctcctttgtcaatgaaggatggtcatatatttcaagtttcaaacctgggtatatgttctgacaattaagaatatttgggatctgggttgagtggctactttggtatggggagaatatagatactagcagctatgtgggaggtgggaaaacaagcaggtggaattgaaaatagacattcatatatttctgggtcagatcctactttgcatggcaagaatgccaagttccagctgatcttggaatgttagaggtgattatgaaggaagcgggcagggagccgagataaatgatcacttaacagaggaactgtggccggaagagtggggtcaagaaaacattgaacaaagaagggttaattttgaaggaggggaaggaataagctagaaatggaagtatctgaaacaaactaggcagcatagaacagtgttcctaaatataaattttgaaaagttttttttttttttttttgagacggcgtctcgctctgtcacccaggctggagtgcagtggtgcgatctcagctcactgcaagctctgcctcccgggttcatgccattctcctgcctcagcctcctttagaagttttattctgctcacttaaatatttgattgtatgggatccttgcagggaatcgccaccaagattttgattagaattttgtcagatgctctgataagaaaagaaactgacctgaaaaagataagttacacctacagtttattctaaagtcctctagaagtgggaatgtgtgctgtgtgcagcctgtcaaaacttttattttggcaacttctagaagtaacaaaacaggactgaaaatattgctatgatttattggaaacattggtgtgagctgttatgcatgcaatctcatgaaagaagcctaaactattttaaaaattagtctttcattataatatcgtttatttccaaatgtctttttttgacatttagaagtaattgggaaattttaaaattctagctgaagttccttgcaacagcacggtccttgtaaaagatatttttcaaactgcatgttaaggatgtatatatggaatatcagcataaaacagaatggcagttcctcaaaaaatgaaacatagtactatcatatgatccagtaattccacttctgggtatatactgaaaccaaggactcagatagatatttgtgcccctatgttcataacagcattattcacaatagccaaaaggtggaaacaacctagatattcatcagtggatgaatggataaacaagacatggcatatacataaatggaacattattcagctttaaacaggaaggagatatgacacatgctccatgaatgaagttttaggactttatgccaaataaaataagccaaacacaaaaggacaaatattatacaattttacttatataactacttagaatactccaattatttaattacctggagtagtcaaattcatggatacagagagtaagactggtggttgccaggttataggggcaagagggaatgaggagttagtgtttaatgcatgtggcatttcaatttgggaagatttaaagttctaaagatggatggtgctgatggcagcacagcaaggtgaatgcatgtaataccactgaaaggcatattagaaaagagtaaatgttatgttctgtatattttactgcagtaacacagaatatcctgataaacttacatttagtattttgatacatctgtttttaattataatccactataataataatgaacatttttatgtggcaaacatgcccagatgctttaccccaaattatcctagctatttctcacagcaaccttctgagttaggtattatgattattcccttcttttttcagttgtgtaaagctatgcactgagatgggacaggcaggaatttgaacccagagaacattttccagaaccaggctcttacaataaaacttaatatgtagattaaaatcattcatactgctctgcccattaggaagaaaaaagtcccaaatgccaaaattatctctgcaagttctaattttcattacaagttcttttaataagctagatgatatgacacactatggttatgtgtatgaaaaaattgaaaaaactggcaatttatgtctctctaaaaaatgcaattcctgcaaaggcctgagtgtttcagtataaaaatccatatccagtggcatgtattttcttgtgcagatggtatgtctttctgaaaattgctaagagaaaagaacacatattttagaaatgtttaatattataattacaatgtatccaagttttgctttatactatgcatgctttaaactcagaagactatttacctatgatgttttattttagcatgtaaaattgaaatttgcaacaagtttgtatatatctttctgaatatgtagaagatggccttatttactgttaccttggaaacagtgatgctcaaatactatgttttactctattacaattaaaaatcattttatggaacaaatgtaatttaaaatactattcttaagcatggattttagttaatattaatcataaaaataagtaatgatgtttagtgttaaaattatttgaaaagctaaatatagatttttaatagaaaacataccttaatcaataaatcataatgctttttcctttacaagttatgtataagtcttctgattattaggaaagaacctcagttacataatggataattccatgaagttaaaaatgccatgtctaatttcttttgaaatttttcttaataattgactactttggagaatctgtacaattattacttcttaaataactcctggatagatttttctacagtgatatatgttgatattcatgtttcttcttacatttctaggactcaactattgttactccaattattttgaggactgaccctcagggatttttcttttactggacagatcaaaacaaggtaagaaatgaggtatgcctttcttacatttttcagtcgtttactactttgaaaagtatttatgtatcttatctatagaagaacatccatttcacagatcttttgcagtttatttaaaggttctacttttaaagaatatctaaggtattcttaggacttaggacgtttcaaagtcactagtttgaaatattagatttgctaaattctagagcaattggtatttttggttctgtttatattatgtgttaggataagaacagggaaatttgaattacatttggtgtagcacataattagtcagcgttactgatttaagtccccacccataaaggatgaagaaaaatgatgagaaaataacttttgacccaatagccttaccccttggcttttctttctctctcttttcccctgtgctgttcattaaggactctctcagaatcagcaggaatttggccctgataatttgttgatgtcagaaaaccaagaataaaattcctttagcctattccttcagttgtcaggaatttcttactaaattagctttctgcccacaatagcatgaatttattatctcatttgttatgaagccaattgatgattctgtactgaattattaaaaagtagaatatctgctgatcataagatttatttggagtttaatgggcagttagatgagaacactcatggaaagtggttattatttcaagcatcgttgccacagtcctacacttgaacctcagaggccacagaatatagaatgtttttgttctctaagttttgatatatggagaaatgggatagggtttactgagaatgctaaatacatactgaaaacaatagaatagtaatagtataccattaaaacagctggaacctccacagttacggatgaaggaggaacaaattgttagctctttcaaaactctacattagtttcttatatccaaagttcctggagttgcctgtcagctttgccttctgtctctgaggcaagctcaattatacctgtgtctggtcccagggccactcctgaatgagcctgtttacacatcattcaaaaggtgaatttcagtcttgttgtcctggaattagactctaaatcagtgtgccctggaaccatgtgtggctgtagaagtggaggtaaaccacagaccctacgctaatgtcaaaaattgtatgagtaagatttcctacttaacgctcacatttattattgggtgtgttaatcgctttggcttagacattctgtttggtttcctgctgttatgtgtaaaacaatggcttgcaagaggttttgttttttgggtgtttttttcttctcctaaaggatatttttagaactgttgaaactatattcatgaacgatgtacttataatgcctagagcatttctaaacgttgggtatttgtacgagagaccaaactgtcagtttgatttttcaacttgtagatcaagcttctataaaagcaacagaagatattctgggatttttaaataattcatggcaactcagttaagctcccctctagaccaatcatcaatatttatttccttaataaagaaaaagggtttaggaccaaaggctctttgttgcatttctgttgtgaacccagtattttgacccatgcttattttcaaaggtaggaaaatttgttttcattttttacacaaacttttaaatcttggttgcaatgctgtttatgaccaagcgaaacagataatgtggtagcaattccttttatcatgttattgcttttcttttcatggatattactcttacagttctagccaagagatagaaatagtaaattttacttttcactttctaaatgccaaagtcatctctcagtcatttatcagaatttggaggctcatttcttagtgatcatatatcttagaatccaaaagatgagaggatttaagaaaaaaaaattaaacttaccatgctttcaagtttgtcattttctttctggcttgaagcccagccctggaaccagtaagagtgattcatccacttttaggagatggacgactccaagtgatgaattagagtaaatgtgtgctagaagaaatggtgcatgcaaataaaagatggcatgccaagcttttagtggggatttttttgcataagatcatttgaaggtacatgaatgaatggtacattcatgatgctacttagagggccactttttaaaaaatattttttatctggcaattagttttaggaatctgccacatgtaccatagagataatctctcagaaaacaaaaaaaaaatgtgatacctttaagtttatcccttgattttatacactgtgttttccattggttgggaagcttgcattggtatttattgtaatatgcctctcttcttcctttgggcttcttccaatatattccctctttggtccacgaagcttataccaaagcacttggattagcaatcatctgaggcctagtctgctcagaggtgagcagaaatccctagcagaggggattttacaagtgttttttatttttcttttttatagcattggaggtaaatggccacattttatgatgttctatgcatgtccgtctcttgtcatggctacatcagatcttgtatcagagccacttatttcaagccactggctttcccctctgtagacaatgacatgctaccttccaaaacccctcctttgatttgtcaccacagaaatgataggtgacaaagaagacagcacagatgatgaatttaggaattaaaaactaaagctagcgagtcatttttaggtagcagaaatgtgctttagtgaaacactgacaggatgtttggagttggtggaagcagataaatatgaatatcatttttagggataaatgttcatgctttgtaccagctctggacttattttaataattcttttcactgtattgttggctctgtaaatcttattgaataaaatgagcaaaaatgagtttctgaatatgactattttaagcagagtggtttttcttgtgtaagtgtaggtgatgtgaagaggatgaatttatctgtaagtcatgggtgagaagggagtcctgcacagcctgagtacttgagaggtggcctacattaggctataacttttctttggatccgtgccatgtgaacactagaaaccaacacaggaagtgttagctgtgaaaaccatgtgaactataagaatctgctccaccggttttgaaagaaaggctaaagaagaaaaaagtgtcaatgttaaagagctaaccaaaacctatcctgctagaatatgaaaaaaattagacctttgccttgcaacctgatgccctgcttctgtgccaaggttggtgtaaaaataaaactagtcaccactagttcagatccaagaagttcaatatagttcagtaaacccttccttgtcttcataaaactggagcttgggggaagggaaaaggaacacatcattaaatttgaaaaggaatgggaggaagaacacacggtttgcatgaagaactcccattactttcttttttgttacaaattttatttgtttttaatattgtggataatatacaaatatctttttatctgtaaaatagtaaagcaatgtaactatctttaaactgcactctcccattgactccaatcctagttctctattcagagtcaactaatagtaatagcttcatggtttcttcctaggtctcttttaaataaatttgtgcatgtgtaactatggaaatatttcattttgttttgcttatgtccatttttatactaagtcacatcatattaaccattctacaatttcctttttaccatatagtgtgtctcagagaacttttcaagttagtacatgtgtgtctatatcattccgttaaattggcctatcttagggaatttttcatgttagtacatgtgtatgtatcacattctttcatattgctctatcgtatgttaaacaattgattaccacattttatttaagaatacagaagttctcactggtggattcttggtgtttgtctctaatttggggttacaaagaatcctataatatggagtaatagtcagctgtgtgtagccctctctgggaatatgggtcagggattccctaaggtaaatgctcagaagtgcgattgctgatttaaggctatacctatcctaaattataatgaatggctgtaccattttataaccctacctgtcttatatgagtggaactgttttcttaagcccaaccaacagtaataggaaatattttaatttttgcctaactgatgcaactgttatatcaccttgttttaatctgtcgttgcctgatttgctagtaaactgtgtatattatcatacatttattgatcatttcagtttttccttacatggattgcctatttatatctcttgcccttgtgtggacagttctctgtgtattctagatgtactcctttagctgttataaatgttgcaattacactcttcctgtctgtggtttgtctttgactttcttaacatctaatttatgggtaacaaaagatgacttgaagctttaagttttcatgtagttacattccaactacctccccactttttgcttcctttaagatatttctgattccttctcatcaccgttattaatctaggtttttaatccatatgtaatgtattatgaggactggtgtaaggtggagctctaacttcaatttcttcatatcactcgtagagctgacatttcactacctggtttggatggcccaaagatctgttatgttttaatgcctgtggactgctgggttctgatttcctacttcattcttatctcatttattttctgcctttcttactttgtggttcaaaattgtaattctttttgtttacccgtgatcctatattagagatttaaatttatacctgcatatttagtcatttctggagacttagggcaagaaagattggttctaccattcatgccatctgccatcttgttctgccctgtgaatttgcatgagacaccattctggatgtttgtacagagtgatgattcagtttccattaatggcaaccatagatagtcttctcttatgataaccttaaatttctacagagttcaaaagcaaagtttaaaagttaaatatttacataagtcacagtaacatttttcagcatgagtccagagttcaaaaatattttgaatgatgcatcataaatgtcaacaagaaaatctagtgatttcctattaaaaatagtctggcttccataaagaactactgggtaccacacatttcattaatgatttttagcagtggggctttctctttgggatatgcttctctagggtatcccaaaattgtcaactttgacccttcttgtgtatagtaaatgggataggtcattcaagagtccactgagtgattaaatgcaatgatgtagttataaatttagaagataagtgctatttattttatttggtagctttctctaaaagttgaaacaataacttacattatctgggaaaaaaaccagcaaaattcacgtgaggattgctttgtgagggctgggattgttccttggcctggagcagtgtgtcagtcattgttgactaagcagcagcatctggggactaagtcctttccttcaccttccttgaatttccttcaccagtattgatgatattaatagctaaaacagacacagtgccatacccacaccctcttcctcaccactcctgagaacataagccgggctccagtggctggccagtgcctgcattcttttgctttgtctggctactagaactcatgttgctacccatgcagctgcccagaagttcctggcaattcacactcaccctcaccaatgggattcagtggataaataccacagctccctcacctcttgggtgggataacttaaaggtgcattctttatattatatcccagaactctctagtgggattaagcccagttacccacagtggcaactggcttgaaaatgttccccttatgggcttccttcccttcctgtctcacttctccactcctgattgtgttctaaaaccacctctaaaataaactacttttactagaatccttatctaggaactgcttaatgcagatgcatagtgcttaacaacttaatatagatgcccccaaatgaagggttttaaaatgattccttggttaagagagattggaacatattaagtgaacacttttatttgaagccaagtctgattttcctaaaacagtcctaatttgggaagcccaaagctggttgaggaaaccagctttgaagctgtgacagatgtggtttgtcacagtctggctctgctgtgtatttaatgagtcaccctcagtgaatctctttaaaaatcaaagccttggtttcattatctataaggtgggtattactctcttagtgttgttgtgaacattcaatgtgtaaaatgaatgacttagcataacacctgctactttgtaaactctccatcctttgtggtggcttttattattgctacataataaacaatgactctctgaccaaacaattgtccataagtattagagaccacaaaaatgtgctgttttgaaaaccaagtgaccatttatttatgtatatctttttattccttttttcttcttcaaggcaacactgacttgttttctatttagactctgctgtggtcttttgatctgaaacattgaagcttaggtctgtttgggcaaataagatgtttatttatgtatttcataatgttgtgggaacagagccatggaaggcaaaagaaggatttattgtttaaaagactttccctctggggataatttgctaataaatagtccatcataggtgaaagtttcttggacccttggaaatttgaagcatcgtatggaacaacttttaagatgatttagaggactttgataggagaaaattgtattattcacaagaaaaattggacacaatcatggttgcctatgcctttttcctaagatagtcactttaggattgtgacaactacatgggcatcaggccactcctcttcctccctactgaccaagaccttagagattaaacttttagtgtttttgaggatagtttagccactaagccaaggttcagattgctgaggaacaaatctatcctcaccatatcaacttccaggttaagtttttccatttttattaacattaccttcttttcacttctgtgactcctcagagattttgcaccagtgaactctggctagcatagaatagacatgtcatgatgccttagcttatgtagacacaacatacaaataaatgttattagaatggaatcatttacaagttcttcttagaggatgtgatgtatgatttttttggtagaatttctaattgaagtgtagccttttaaagtatattttaaaattaggctagtcattttgagatggtttcattgcagcttctttggaatcatttttagagtagaaatgcattagtataatttttatgtcacaatcaccacacttcattatgggcataacaacagcaatgcttgttttaatatattgtaaccagagtttagaaacatgtaataccacgaaaattcattactcctaatataatttaattacaaaattgttccttggtttcataagttgcatatatttagctcttcccactactttaggagaaattaaattggatactttccatgctatgaagctattataatggaatatttgtactttttgatgccaaaaaatggttcgagccattggattggcagaatatgtgaaggaaatgcattctgcatattgttcataattttacttcctgttacggagaaaattcctttgactttgttacaaatagaatccccgggtacttggtattgatataatgccatgctcttttgtttgaattacaaatgttgtaggtagagtaggcatttttggttgttctgtagttcattttcttgccaactcaagattgttgatggtactgatggagacattattgtattagtccattttcatgctgctgataagacatacctgagactgggcagtttacaaaagaaagaggtctcacccacaacatacgggaaatcaagctgagatttgggtagggacacagccaaaccatatcattctgcccctggagcttcccaaatctcatgtcctaatatttcaaaacaaatcatgcctttccaacagtcccccaaagtcttaactcatttcagcattaactcaaaagtccacagtcccaagtctaatccgagataaagcaattcccttctgcctatgagcctgtaaaatcgaaagctagttactttctagatacaatggaggtataggcattgggtaaatagagccattccaaatgggagaaattggccaaaacaaaggggctacaggcctcatgcaagtccaaaatctagcagggtagtcaaatcttaaagctccaaaatgatctcctttgactccgtgtctcacatccaggtcacactgatgcaagagatgggctcccatggccttgggcaactccgcccctgtggctttgcagggtacagcccccttcctggctgctttcatgggctggcattgagtgtctgtggcttttccaggggcatggtgcaagttgtaggtggatctaccattctagagtctggaggatggtggccttcttctcacagctccactaggcagtgccccagttgggactgggggctccaaccccacatttcccttctgcactgccctagccgagactctccatgagagcaccaccccagcagcaagcttctgcctggacatccaggtgtttccatacatcctctgaaatctaggcagaggttcccaaacctcaattcttgacttctgtgcacccacagactcaacaccatgtggaagctgtcaaggcttggtgcttgcactttctgaagccatggcccatgttctatattggcccctttcagacacagctagagtggcagggatgtagggcaccaagtccctaggctacacacagcacagggacccttgttccaacccacaaaaccattttttcctcctaggcctctgggcctatgatgggaggggctgccatgaagacatctgacatgccctggagccattttccccattgtcttgaggattaacatttggcttcttgttacttatgcaaatttctgcagccggcttgaacttctcctcagaaaatgggatttccttttctattgcattgtcaggctgcaaattttctgaacttttatgccctgtttcccttataaaactgaatatctttaacggtacccaagccacctcttgaatgctttgctggttagaaatttcttccaccaggccgggcgtggtggctcatgcctgcaatcccagcactttgggaggctgagttgggtggatcacctgaggttgggagttcggaaccagcctgaccaacatggagaaaccccatctctactaaaaacacaaaattagccaggcagggtggcacatgcctgtaatcccagctacctgggaaggctgaggcaggtgaatcacttgaacctgggaagtggaggttgcagtgagccaagatcgtgccattgtactccagcctgggcaacaagagtgaaactccatctcaaaaaaaaaaaaaaaaaaaagaaaaaaagaaatttcttccaccagataccctaaatcatctctctctagttcaaagttctctaaatctccagggcaggggaaaaatgctgccagtctctttgctaaaacataacaagagtgtcctttgctccagttcccaatgagttcctcatctccatctgagaccacctcagcctggaccttattgttcatatcattatcagcatttttgtcaaagccattcaacaagtctctaggaagttccaaacttttccacattttcctgtctccttctgagccttccaaactgttctaacctctgctttttacccagttccaaagttgcttccccatttttgggtatcttttcagcaacaccacactactggtacaatttactgtattaggccgttttcatgccactgataaagacatacccaagactggacaatttataaaagaaagaggtataataggattacagttccacgtggctggggaggcctcacaatcatagtggaaggtgagaggcacgtctcacatggtgtcagccaagagaaaagggcttctacgggaaactcccatttttaaaaccattagatcttgtgagacttattcactatcatgagaacagcagaggaaagacctgcccccatgattccattacctcccaccaggtccctcctacaacacgggggaattcaagatgagatttgggtggggacacagccaaacctatcacttgtcaagctctttctatatttaatcagcaagacaagtctctttttgtcttttgggaaaataaatttagattgatagttggattatttaaacatttatcacacacacacaaaatattaaaataaataatataattactttcttccactttaaaatattttaaatttactttaagtaatttaaaaggcaaaaatgcaaactttgaacaactgacttattaggacgttggtacctattataaataagtttctcaaatctagcaaagtatgtaatattcactaatttactttgcacatacctttttatcgttgttatcattatccttgttatccttagcatcaccaacagcaaacacatatatgctgttttatccttgccagacacaattctaataatatatagtctgtatatttatagcatatacatatttttatacatatatttatatagtatatgtagcataggtatacttatagtctataatagtatgtatatagtgcatatatgctacatatatacatacatagtgtgtctatatgccgtgctacatatatacatacatagtgtgtgtatacttacacatatatatagtgtgtgttaacagacctatgcaatttcgtcatttccataatcctatgaatgacagtgctactattatctacatttaaaagtgagtaaactgaagtgtgaacagaggttatgtcatgatccctggttgtacagttggttaatggcagagtcaggaatagaaacaacagtggcagtgcagtctggctctatgttctggctcttaactttttgctgtttaaagaacctgtttaatatgtaaagttaagtttgcctgcaggatttttttccttggatttgtttgaaaaagaaacctcagtaggcctagtacatttgctaggaacagacaaactgtatgaagaaggtattctcaagttgggctgcacaatgaaatcacagggggagcctcaaaggacgctgctgcctgggcttcctgtctccagagaatctgacttaattggtctggggtgtggtcagaacattggactttttttttttttttgaaagctcctcatttgattctaatgtacagccaaggtgaacacagatagaaagcaagctgaccttacaaattaattcagtaaacttcctgaaaggatgtgctcactttgcctttcctgcctgtgacgtggcctactttctactcagaagtaacactccacatgagcaactacaggccctaccagattctgaattatttgactatgactggataatattccttacactgtgcttagtaaggcaataaattactaggatttttttagaattagtctcaatatctaaggttgaatcaaaatagtttttttattatattctgtcgatgaaaatttttttaactttccattccctgaatgttacaggtattagctgtttgttttatcgttaccaaacatgtcctcagaattcaagtcctgtttattaaccttatatttgtgttttttgagacccttgtttagatcacagtactgtgtaaattccatacttaattaaattagctgcacccttgaatgagtgaatgtggttttaagaatgaccttatataactattttattttatagctaatttttcatttctgggatacaaaggcagatgttatcttattaaattgtagcattatgtcatttcttatcaatttgtaggaatccttccttaactgagacatacactcaactgggcaaaccagagagagctagataatttcaggtgtgataggaagtttgcctttcatcacctctacatgatacatttcagaatagtaaaattcacatttctcctgttagaatgtttggttttttattctgcttctatagggaatggggattgtggtaatgatttttcatgagatttctccctggcattgtgcaaaactccacttaggaacagtggtctgaaaattatattgcatcacggcaaacaatgcacctgtgtgaaatgaatgcttaagtgaaaagttttatgggacagagctagttgctatgctaagaaactaatgactgtgctggtatacataatggattctatttttagatgaacacttggtcctatagcatggcttcattatgcaagaggacagaagtttcagcgttatattgtgaatattgagacattaacatatcagagtatatgccttcttagatactaaagtgactttttcatatattttaaccctgacatagttcataactagaggaaaaaagtaaagaacaaaaacagaatttcaaaataatttcaggtttctggtgtttgtaggttgagtttttccaacagttgactgcaaggaaaggattcaagttcaagtggtttatttgggaggtgaccccagaaagtgtgggcagggccatggggaagtgagataggcaagggaagacagccattaaagggtgcactatcaaataagttaccatggtgtacaagtgaagctccgtcccattggagagccctgggagacagtgcagagaggagagggagcagtggtatacccaccagttcctaataatcagtgactgggggcagctctctcaggggttattttctcagctcttctgccagcctctcctggagactgaggggcttccaggccagtgggccctaggctttgagaaatccctcagacatagatgcagctggaagctgtccgttggcatacatgaaaacacatgggcaccaccagcagcaaccactctggtggctttaatttctggtaagtcagacttttaaaatctatatcgcagtgtgcaaactggagcctgcacccattcacgaacagttcttgcttggcctgtgcaaataattaaatacataaacatgagttgccagcatttaaaaatctgcaggttcatatacagatctggatttctcaaaaaatcagaaggcatggaaatgccggccgacatacccccatggccacatttggctggggcagtgcagcagctgcctgctttagacagggtgtgtggtatgcaatctgccacatttcccaccaggctagcctacctaatttacatgaacttttaagctcatttagatgtttgagtataaatatcgggcctctatggtaacatcctatactggaagcttcaataagctaatgattgcaaagcttcatatggaatgaggttaattctgtcacagtgggcctattggagtgctgtggcataaagactagatttttacagtggaaaaatggctgaagatcagcatatccaggtcttgctcgtaatggccataagcaaagcaattatgctccaatcccaattcttctctgtgatgtatggatctaaagtgtaggagccctgaggtccctctctgacttaaaaggctattattccaaagtgactttcaggtgtcattttgctaggtaagatttataaatatgagtccttggcaaaggattttcgtgtcgaattgggccattaatctagggaaaataagaatggtggactccaggacaccaggcagaatgacttcccttggttcccttggttgaatgaatgggattaacttcacccccagatcaaggcagtgagcattgactggtttagccaaccaatgtagtccacccttttctcaccgtagagctgtgctgtctcatacagtagcctctagactcatgtcactgtttacagttaagttttaattaattaaaattaaattaaaaattcagtttctcaatcccactacctacctttcaggtgctcactagccacctgtgtccaggtgccatttccatcattgcagaatatgttattggacatcactgcacagagcttggatcaggaatggctcttcagagccaatgcaaagtttcttgcaataagaagcttccttgaacttgtggggaaagaaactttccttctttttctggattatgtgctgcaaggatgtaatatctggactcacttttgttatcttgttcccatgaaagaagatattggagtagctcagatgccactttgggagctcaaaggggaagctagccctgcagaagacaagccagtgaagaaccaagtccttaatgatgtcatttgagataccagatcagtccatttcagttccatgaatgaatcaatccccttcataggctatgccagtttaagatagagtgtttgtccctttgcagttagaattactgactgacacattggacaatcatttatttgaaggaaggcagagactcaggtgttaaggatccagctaacatctggcccataaacttgaaagagaaataaaagcgggaatagaatgtgttaactctgtcagtggctatcattccctgtacaagacattattgttagttttgtatagttttctaatctgggctttaacatttcaaggataattttagtggcttctagccatcatgaggaaagaacatgtcttgagaaacatggggaaaattgaaaactgtacagagaatataagtttttggcaatgttgtatgttaacctaatagccttaatggtaccatgataatttctgggtaaggaaagtagaacttattaataaactgttgtgctgcagacattgtgccaaggtaccttatgtggacaaactatcacatgaattcatgaattgattgatttttttccattttgcattgaggaaactgaggctatggagagggtgatttttaccctggaagactctctctaaccctgccaatttagaatgaaaccctctcttctgttcttctggaataccttgtgccttcctttaccttagcactattaatgctatgttgattctgtctgactctttttcctttcccagtggatgatgaaggccttgaattcggggactttacctcatttgtttggcattttgaatacactgctaacatacagtcactgctcaatcgatgtgtgtcaaatgaatgagacttacaaaggctgtgcatcttgtctaaggttacaggttactaaatggtggaaagccagatctgtcaggtccaaagccaatgacctttcagtagttcattcattaaaaccctctccttcttgtttaaatctccagctgtcttactcttagcagtttatgtgacctctgcctcctggagaagagagaaaacacagtattccctgccaccagacctaatagcacactttcatttacagctgctttcctctgtctccctcttcctttcccagcccatcctttccactttgaccctggaccctagcttctcaatgatttcatactaaaattgatcccttccctttcttatgttgtcaatatttcccctgtaaccagatctgtacatcaatattaaacatgacatgcttacccatcttaaaagaaaaccctatatcccctcttgaccctcactggctacttcctttctttctcgctttcactcatagcaagcttcttcaaagacctgcctatgctctccccattattctcacctttcaccaacttttcaatacatatcaacctggattctgtacccactactcctccaaattagtctttcttaacccatcaatgaccttcacattttaaaacatgctggccatcttgagctctgtggtgcttgattatttttatataattttacattgttgataaccccattttcctcgaaacactttcttttcttgactttctttttctcctacctcttcctacctctccagccacatgttcgcaatctactttactggctgtaagttgcagtccttctctactcacatgttagggaatctcacctgcacttaaaacttattttaccatctggatacattggctcccaatttcatatcaccttccaataccctgttcctgagataccggaaagcaaacatttccaagattggtatcatgttcttcctcccttaaatcctgacctggtcctggtgccttattaaaggtaccacccttcacagagtggcacagtcctgaaccctgaaagtcttccttaacaccttcttttccaccttccctccaagttcttggcccctttccttttgtgctccgtccacaatagccgccttctgtttccctagacacggcatatttctttctgctgaaatttttcacaatacttttcctctgcttggaacacatgttttctccccatggattagcccctcccctgcttcaccacacttctcacagttgtaatcaaatgttttttacatagttatgtaatatctagctcccgtattaggtttttgactcaatgagagcagagtccagaggtgtccttgtccgtgtttaagacctggctctcttaatggggaaagtaacttgtagcattcgccaatttccatggtgtaaatactgtagtgtctgatttcgagatatggatacttcatcactgaacacagatttggaaagtgaagggtacagttggctctcataagcttacaagctttccccagctcacccccagggcagatgcttgtctgtcttattgactgctgtattttcatgagttagggcagtgcttggcacattgtaggaactccaagactattagttggaggagtgactgcagtgtttttattaccattggaaatatagtaaaaagtgctgatgtttcagagaaaaatgaaataattttttaaattttagaattggacccagcctgaaagtttatcatatgccatccctttgtttttcttcattagaattgagggtcaggaagtgagatctgccacaatcacatagctacctggtaaatgagcccaggttaaaatgcacatcttttaattaccgaccaacactccttctactgtagtgcattatcacttctaaaaggaaagtaatttctttccactagtgatttagttcagattgcattattagatagtgacgtagttgaatgtataattaaatctgctttacaaaagaaaaagcagtattttatcatttctttttaaattatgagttgtctcttaagagggatttctcttttatctttttcttctttaatattctgatgtacttatttatagaacaaagacattagtcagcttttgtggtgtagcaaaccaccccaaaacttatgccttaaaacaacaaccatttttttgaggtcacccttctttgggttaacaatctggtgcaggctctgggggatcatttttctggtctcaggtgggctccttctggcttctgcagctactcatgggttggatgtgtggctctgctgatatggctggcctctcctgtctgaggcttcagctaggatggctaggctgacttgtatctgtcccatgtggtctctcatcttccaacaggctagtccagcttgctctggtagttcactggcagagttctgaaacagggtggaagctgcaaagccctagaagcagaattgccatactggcacttctgccacattttctatgccaaagcaaatcattcataggttggggaaatagatgccacctattgatgacaagatctgaaaagtcacactgcaaagaggcatggttacagtgagaagaataatttgtgactgtttttgaattacatacaaaaaagtaatttcttcttcaaattagtagaagattgtctctctgatgggatagaactgactgatagcttcctcatccttctgaaatattaaggcaatatgaagtaccccacctggacaattgtgttaattatatatgcccaatattagagcacttacgctgcagtgaggtgggtgtctctcaccataccctagacttggaggtccctgataggtgttctgaaagaagatccctgtaaggttatagggaagtaaagccgcatcccaacatggtgcacagacagcagcctcctagcaacatctcttaaagcagatggtgttttcagacatattgaggaatgaggtgggttgggagcagttgcaacaagatagggaaaccttaagtcatctttgaggatactagtttgttgtgctattttttttcttcctaaatgatttggaagtgatttttctgtgcctgatgtagtcttttttttttttccctttctttgtatcctgtgttgggaaatggaaataattcaaaatctgtaaaaacactgggaaaatggaaattaaactttgggattctttactgcagaaaaatgatgatgggaaatgttcttcagtagagaggtagaaatcatttcagaccgcttctcctagccggggcccacaacatgcatttttctgggatgaaaacacatgagtttgaccaaggaaaagtttggtagattttgtcaatgaagcatgaaaagggatcagtctttactctgagctcatcttttttttttagctgagtgtgctcttggaagatgcaggcatcagtgtatttatatctgggtcaacagggcatgcggtgaaggggaaggaaggccattacctagtgaatgtatattgggtggggagccactgaggttaaaaaattcagcctactgccatctctttactttgggctgtatggaagttgttcatgacctccataattgttcttttgtaggataccctgtatcagattatagactctgaaatccaactcccagggttcaaaacctgccttgaacactatgtatctctgaggaagacatttaactcattctgagcttccattttctcttctacaaactagaaataataaataggaatcccatgaggattaaatgagataacacatctgaaacacttggcacaacacacatgctgataggtgcttcacaactgctactgatttttaggataaattttagtaaattttaatatatattgtgtgaatctgaactaggacaggtattcggatacttctgattcatattctgagtctttttgcacccaattggttgaaacatcagggcccccaaggaatgccagtgtctcaggttgcagataatactgccaagttgcagataaatccctgattggacaactatctaagagttagtagatccactcagactcccaggaacttggagtgcagttttcgatgcctgaattcagagaggacagggtgcgtggtgcatgtggcctagtctacaattgcttctggcctattgaatcttaggaatggaaggctgaaggggagaagatagtttgtcatcaaaactaaggttctggacaaatttggagggctcagttgctgggctggccctggagaatgagactgaattctcgaccctttgaaaacaggtgccatgtttgatttctttttgtgtcagcaatgcatcttctattaaaagaatggcattagggtctcagtcaagatggcctgaggcattcagttaagggtacactgatatattcctcctgctggtcagtgtcaagattctgctcctgttctctttcatccctgtgtacccatcttagatatttttgagtgcccatgatgtgctctttgttgtagtatctgagatctctagttggggaaacctaccaaagtaataaactattctatccattgttaggacaaataggaaaatcttactgactctaggagaaaatagcaggtatttctttctttctttttttttaaatagactatttcaaatcctaaagtagttttacttgatatttacagagcacatgtcataaactctatttaaaaacagaggtaaaaagggggaagcactgaaaaatataactcgagtaatcagtttcattcaaaatgtaagtgggagaatcagaatagaaaataatatgatttgcagatttattttaaatcagatctaaatttttagatttgcaaggtctgagtgaaaaaaaagagtgtcattgcttagaacttcttaggaaaacaaatcaataaatctgtaggaaataggctgtgtgctgaaccttatttggtttctgctttttgaccgagaagaagcatattatattgaaagggtatatacttggtacatagaaggaaggcgacctttaatctctgactttatataaacataaaaaccgtgaatagaaaagactgagcctaggaagaaataaaaaaggagccctgaatctatgaggctgagccatatgaaacagccataattgtaggccaaaaatggccaaacacaggcggtttctcataggccaacaatacagtcgttctgagagagcaacagcattacttttgcttagttgaccatctgattatgacagtttagaacctcatattgatgtggcaaacatgagttaacttctctattgttaatggatatgattttattctaatttagatctgatttaaaataaatctgcaaatcacattattttctattctgattctcccacttacattttgaatgaaactgattactccagttatattttcgagtgcttcccccttcttacctctgattttagatagagtttatgacacatgctctgtaaatatcaagtgaagttattttagtatatggtgcaacattttataaataacaagaaagagtatgctactttcaacaatatcatgtttaatatacataaaatatataagcatgtaaaatatatgtaacatatatacttaaaatgcatatacattatatacatttaactaagtacaaatataaatgttgcctaagaggtaagcttcaaattggaatttgagggaaataagcttcaaattcatttctcatatattcatcattttatttgttcatatgttatgttttttgttgttgttgtatgggagaggtactgatttaggttacttcttttgtagtagaggatggtagttaaaaatacatactctgaaccccatctgcctgggtttgaatcccagctctatcccttgtgagctgtgtgattttgagtaagtgacttaaactttctgcacctcagttttaatatatatgaaaaaaggataatattagtactcccttaaggttgtgttagggattacatgaattaatataatgtgtttggatcagtgcttatgttggaagcactaggtaagtgtttattattattacttctcattgtagtctcctttatgaaacgtgtgtgcatagcctgtctggaggatgactttttgtcttttaaagagagaagctgtactacttctactgtaccagaaattcatctgagagcaggttactttctcattgtaaagtccatgcaagccagataaacctatagggtagcacttccttaattagtttacaatttctgaggataggttggtgggagtaaactgcctctgagtgttcacttctctgggaactgtcccgtctgttgttgcgtatcatatgttctagtgcattttttttcagttatgtcctttcccacaaagcagtttggtgtaaccactgtaatcccagtaagctatggttggggtctatgtataggaatgtgcaccctgaaattcattcacttattcagcacaattttattgagcatctactaagtgttaggcactctctgtgtcagatatattatagataatatacaactacctaaatgcatagtaagcaagatattgtaccattgagagtagtaagagtgatgagaagagttcagggagggagtagtggtaactgttttacataggtactcaagaaaggaatctctgataagctgatctttgagcagagatttaaaggccgtgagggataagccatgtggttggttatctggaggaagaatgtcctaagcaaaagaattggtaaatgtgaaggtatgtgacttctgggatagtttgacaaacagttcaagaggccaattggctggagcatagtaaatggggattgggatcagtagtaggaggtgaggtcagagagattgctgaagacaagggcgaattatattaggtttttacaaccattgtaagggctttggcttttctctgcatgaaattcaaagatgttataaagttttaaatacagatgtgatgtgattggacttgtgttttttaaaaaaggatcactgagacttctgatctatacaagatggccagattagatattggacctgaacatttttctttgttcttcttccctaagtacaactatacatcccagacataatgtgagaggcaaccagcagaggactctgaaaggtgctaagaggaaggcagactggtttctggcatcaggaccagagaagcagcatggggcagggtatcttatgtttcccccagccagtaaaagaaggtgatcaggaccagcattttacaacctgtgacctagcaacagaaggtggttcaggaaagctccttcttttcatggagtccatccagtgtcaacagggaagcccagcaccattggcaaagggatcagtcgggaattcagttatggctagccatacatgggcagggtaaatgctcttcttcctgaccaggcctgggacttctccctctaccaagagatacaacacagggtcaccaggttgtaccagcaaaagggggcccatgcccatgacaacaagcagcctggcctgggatacctctttctccatgggtctgaaactcctctctcctgcccagagacactgagactgctgagtgacaccggtaagaggtatttcactacaacaagcgcttggcccatgaagcctatttgtctccatagacccaagatgctattctctcaccaagagacactgtagggtcagactgaaaaaaacctgtcagccctctcaggtacagggacctctggaagcccctctcatatcatctaaaccaagcagaccaaaataacacagcaaaggttctgaaaattaaaccatcggtggaatgacaacccacaaaagtagaccagaactcatgtgataaacttaaaccagggtgactacctgctaaaaggaaagatttgaatagaatttagtcttctaatatacaaaaataaaacgtccaggatacaactgaaagttgctcatcatactaagagctgagaagatcatggcttgagtcagaaaaatttagtcaacctcaagatggatcagattttggaattatcttacaagaattttaaagcagccaccataaaaaatgtttcagcagtcaaaaacaaattattttgaaacaagtgcaaaaatagaaaacttcagcaaaaaaatagaagtttttaaaaagaaccacatgtaaaggataaaactgaaaaatacaatggccaaaataaaagaacacaataggtgggttcaatagtagagtggaaatgatagaagatagtgtcagtgaattaaggacacattggcagaatgtactcaatctgaacaacagaagagataaaatagattttaaaaatgaactgagctccggggacctgtggaacaataacaaaatttctaagatttctatcactggagttgcagaagagacccaggggaattgggctgaggaatatttgaataaatcatggctgaaaatgtcccaaatttggcagaaaaacacaacctaagaatctgagcgcacctcaaacaggatacaccttagcaaatctacaccaagatacatcatgtgtaaacttctgaaaacaaaggcaaaggaaaaaaatcttcaaagcagactaagagaaatgatgcattaactacagagaagtaccaattcaaatgatagcagtttcttatccggaaacatggagaccagaaggcagtgcatctttcaatggctgaaagaaagtatctgtcaacagtgacttctgtgtccagtgaaaatatcctcctaggatttctctcagatgatgaaaactggaatttgtaagtagcagacccacccattaagattgactaatggaattttataaaacagaaaggaaagtatagaagaaggaaacttggagtatcagaaacagaaaataatggaaagagctgaaatatgtgtgcaagcaatagaccatcctatgcctcaacagtttgtaaattatatttgatggttgaaacattatgttagcatccgatactcaaggcaatgctatttaaaagtaggagtcagtaaagggacctaaatgaaagtaagatgatttccactcttcagctgaagtgtaaaatattgatacccataaaatgtaataaatcacatatgcatattgtattaggccaggtgcaagggctgatgcctctaatcccaacactttaggaggtcaatgcaggaggattgcatgaggccaggagtttgagaccagcctggccaagatagcaaattccatccctacaaaaagttaaaaataaaaataataaaataaataaaaaagatgggtgtggtgacatgcgcctgtagtcccagctactcaggaggctgaggcaggaagatgactttagcacaggaaattgagggggcagtgagctgtcactgtaccactacactccagaatgagtgacagagcaagaccccatctctaaaaaatattaaaagtaataataaaaactgcaattacttttgcaccaacctaataacaaacaaaaaccttacacttaaaaaatttataaagaaatcaagataaaatcctaaaaaatatttgactaacctccaagaaggcaagaaaaggaaaacagcagaacaaaaaccagagtaaataaatggaaaacaaataataaaaaggcagatgtaaactctaatatgtgaataaataccttaaaggtaaaagcaaagagaacctagatatagacccatacacatatgctctgctgatcttttacaaacatgcaaaattagttcaacaaggcaaaggacagtattttcaacaagtgatgatggagacattggatattcataggcaaaaaataagtaaaaataaaaaaaaaagtataaaatgaagttcaacataagcttcacacttcatataaaaatgaattcaaatagatcctagatataaatctaaaacataaaactgtaaaacttttaggaaaacacataggaaaatctttggaatatggatctaggcagagttctttgacatcaaatccatgattcataagaagaaaaattggatctcattaaaattaaaataatttctctgtgtaaaatcctaaaaagaggatgagaagacaagctacagactgagagaaagtgtttgtaaaccacatatctgccaaaggacttgtatctagaatacataaaggaccttcaaattcacaggaaaaaaaacaaaaaacaaaaaacctaaaccaaacaatccatttagaaaatgggtaaaaggtctaagtagacaatccactaaagaggatacacagatggcacataagcatatgaaaagatgtcgccttcattagccattagggaaatgcaaattaaaaccccagtgagttctcactgcacacctatcagaatggctggaattaaaatagtgacattaccaaatgctggcaagggtgtggaggaacagatcaatggtaggttaaacagtctggcagtttcttataaaactaaacatgtagttactatatgatataactattgtattatgaagcgttgatcccagaaacatgttttaaaagtatgttcacacaaaaaatctgtacacaaatattcaaagcagctttattaataatagcccaaactgaagatagaccagatgccttcagtgagcaaatggttaaataaagatggcatgtccatactgtgacatatgctactcagcaataaaaagcaatgaactattggtgtacttagcctggataagtctccagtatgctgaatggaaaaagccaatctcaaaaggtttcatactgtatgattccatttatataagagttttgcaatggcaaaattttaatgagggacaattttgtgtctgtaaagtgttaggcacaggcgtaggcagggagggaggctgctgtagttataaaagagcaacatgaggaatgcttgtggtgacgatactgttctatatcttgactgtggtgaggaatacatgaacctacagatgataaacttgtatagaattaaatacacacacatgcacacccacacacgcaagtcaaacgggggaaatctgaattagattaatagattgtatcaatatcaatgtcctggttgtgatattgtactatagttttgcaagatattaccattagggaaaattgggtaaaaggtaaaagggctccctctatattattacttacaactgcatatgaaatctgtaattatctcaataaaatttcaatgaaattaaaaggaacctccagagtagtgcctgaggactctcagtattagccttgacctcagaacatctctagacaaaagtgatagaatgaatattactttattaagagtttttcataatatattatcaccactcccttctcagtaatcagtagtataatattatgtttatagaaaaatatctcatggtatgtcaatgtttgttggtattaaaatcaaattaaaataattttacacgagagtgcaaatggctgacagatttaactcttatgtttttgtccccccaaaaaatcatatgttgaaacctaacccccacagtgatagtattaaaaggtgagtcttttgggaagtgattaggtcatgagagctctgccctcatgaatgggatttttgccctaataaaagaggcttgagagtctttttacctttccaccacatgagcattcatagaaggcaccttctgtgagaaatgggcaatcaccagacgctgaatctgccagcatcttgatcttggacttctcagccgccagaacagtgaggaatacatttctgttgataaattacccagtctaagtacggcattttgttataatagcctacctggactaagacgatgatgttaattcaaataaatatgactgctctgggagaaatgattttgggcaatatggctttattgctgctgtttctattctaggctgctactccctcctataagacacaagggcagaaatcagcaacttcaccctctgtttatgaagggtgctatgcagggcccaagtattattattattattattactatttttaaaattttactttactcatgtttgttctggtatgtgattcagctttttaaaaaacttttatttattttcaggggtatatgtgcaagttggttctatagaaaaattacaggtcccagggatttgctgtgcatattatttaatcacccaggtaataagcatagtacccaatagatagtttttcaatcctcaccctccttccactctctactgtcaggtaggtcccggtgtctattattcccttctttctggacagaaatgtgtactcaatgtttagctcccacttatacatgagaacattcgtgatgtttggttttctgttcctgcgttagttcacttagggtaatggcctccagctccatccatgttgctgcaaaggacatgatctcactcttttttatggctgcatagtattttgtggtgtatatgtaccatattttctttatccaggctactgttgatgggcatttaggttggtttcatgtctttgtttttgtgaatagtgctgcaatgaacatacatgtgcatatgtctttatgatagaattatgtatattcctttgagtatatatccaataatggggttgctgggttgaatggtagttctaaattctttgagaaatagccaaactgctttccacagtggctctgaactaatttacattcccaccagcagtgtataagtgttttttgatttttctgactggtgtgagatggtgtctcattgtggttttgattggcatttctctcatgattagtgacattcatcattttttcatgtgcttgttggtcatgtatttgtcttctgttgaaaagtctctgttcatgtcctctgcctacttttaatggggttgtttgctttttcttgttaatttaaatttgttatagattctggatattagacctttttcagtttgcaaatgttttctcatattctgcaggctgtctatttactctgttgatagtttcttgggctgtgaaggagctctttggtttaaattagatcccatttgtcaatttttgttttcgttgcaattgcttttggcatcttcgacacaaaattgttgccagggcctatgtccagagtgatatttcctgggttttcttcaggggtatttacagttttcggttttacgtttaagtctttaatccatttggagtttatttttgtatatggtttaaagaaatggtcctgtttcaatcttctgcatagggctggccagttatcctagcaccatttattgaataggcaatccattccccattgcttgttttgtcgactgtgtcgaaggtcatatggtagtaggtgtgtggctttatttctgggctctctattcggttccattggtctacgtgtctattttgtaacagtaccatgctgttttcgttactgtatagccttgtagtatagtttgaagtcaggtaatgtgatgcctccagctttgttcttttgcttaggattgctttggctattcaggctcttttttgattccatatgaattttagaatatttttttctaattctctgaagaatgtcattggcagtttgataagaatagcatcgagtttgtacgttgctttgggcagtatggccagtttatcaatattgactcttcctatccataagcgtggaatatatttctatttgtttgtatcatctctgatttctttgagcagtgttttgtaattctcaccatagagatctttcaactctctggttagctgtattcctaggtattttattctttttttgtggctactgtgaatgggattgcattatttatttggctctcagcattgatattgttggtgtatagaaatgctaccgaatttcatacattgattttgtatcctgaaaatttgctgaagttgtttattagatcaaggagcttttgggcagaggcaatagggttttctaggtactaggtataaaatcatatcgtctgcaaactgagatggtttgacatcttatctttctatctgcatgtcttttatttctttctcttgcccgattgctctggctaggacttccagtactgtgtcgaataggagtggtgagaatgggcatctttgtcttgttcttgtcccagttctcaaggggaatgcgtccagcttttgcttgttcagtataatattgactgtgggtttttcatagatggctcttattattttgagatatgtgccttcaatgcctagtttgttgagggcttttttttttttttttttttttttttttttgagacggagtccctctctgtcgcccaggctggagtgcagtggcgggatctcggctcactgcaagctccgcctcccgggttcgcaccattctcctgcctcagcctcccaagtagctgggactacaggtgcccgccactacgcccggctaattttttgtatttttagtggagatggggtttcaccgttttagccaggatggtctcgatctcctgacctcgtgatccgcccgcctcggcctcccaaagtgctgggattacaggcgtgagccaccgcgcccggcctgttgagggcttttaacgtgaagtgatgctgatattttttaaaagcctgtaatcgtgtggtttttggttttagttctatttatgtgataaatcacatttactgatttgcatatgttaacccaattttgcatcccagggataaagcctatttgatcatggtggattagctttttgatgtactactgaattcagtttgctagtattttgttaaggatttttgtatctgagttcatcaaggatattggcctgaagttttccttttttattgtgtgtttgccagattttggtagcagaatgatgctggcctcacagaatgagttaggcagaagaccctcctcctcagatttttagaatagttttagtaggaatggtaccatattcccagggctatataagaaacagagttgaatttggttgaatttggaaacagagattaaggaataggccaaaagtgatgaatacaggggcatgtaatatactttcaggaatccaaagtccagttcattgaaaaaaatgtatttgtaaatttccttttaaattccaaatgaaaatttgggttaactcagaagaatatatgccatctaggataacaataaatgagcctaacagtctttaactatctggtgatatgggattgcctgaatcatggtacctctaaacattgcaacccttaaaactcatgctatgtgtgaataattaatgccacaggaaatacttatgagacattaaatttaaaaaaggaattgcatttgtcattttttcatacattcataatgtaaaagtgtgtgtgtgtgtgtgtgtgtgtgtgtgtgtatgtatgtgtgcgtgtgtgtgtaaagaagaatatgattgggaggccgagagaggcggattacctgaggtcaggagttcgagaccagcctggccaacatggcgaaaccccgtctctactaaaaatacaaaaattagccaggcgtggtggcatgcctgtaatcccagctactcgggaggctgaggcaggagaattgcttgaccctgggaggcggaggttgcagtgagccgagatcatgccactgcactccagcctggccgatagaatgagactctgtctcaaaaaaaaaaaaaaaaaaaaagaataagaaaaaaagactagaaaaatgtatgtcagaattgtaacagtgctttgctttggggaatgctaggaatgtgtgtgggatttagtttctttccaatgccattgtgcatcttcagatttctttatgatttctttaccttattgttgaaataaaaaaagcaataacaatacacaattattttttaaaaggaagaagtttaagcaaagggaaaactagcatatgacaaaatagctgaaaccagaggtagagcttataagccaatatgccaaaagaccctgcacttggcctttttagtccaagtgatctatattttagctgagtttcctagaagtatatacaaggattctcagtggtgactagaatgaacagactagctgttcaggaatctaatgcctaccatagctattaatagctaccactggctgttcgtggtggctcacacctgtaatcccagtgctttgggaggctaaggcaggaggatcacctgagtccaggagtgcaagaccatcctgagccacaaaggatgtctacaaaaataaaaataaaaaatatctgggcatggcgaatcacatctatagtcccagctacttgggttggtgaggcagaggatcacttgagcccaagagttacaggttacagtgagctatgattgtgccactgcactccagcctgagctacagagtaagatcctgtgtctaaaaagaaacaaaaaagctaccactaatactgatatttaagagatttctccagtatatacccataaagatgaaaaaccacatcttttagtgagtgacatccctgtaagacacaggggcaatagcgttcacaggaattagtctcatatcattctgagacacagatcaaaagtttttcattactagcaattctagcagatataaaaccatgtgaaccaggtgtgcagcagctttccagtgttgagtgtgaaggatgggtagctctaatattccctttcctgtggcatacctctttgcagtttgactttgtagatcctcccattgagagttggagactatttcctcaccctttaaaactaggctggggttgtgagtttctttgtctggtaaaatgtggtagaagtgatggtgtgtcatatctgagcttggtcttccagtggccttttgtgtttctcttttatcctgtggacccctacgtctgtcaagagaacaagctcagattatcctgccatcctgccagaagatgaaagatcatgtggaaaagagacgagtcatcctataccatcaagctcccatttgacttgccagttgatcacagttgattatcttttttttctttttttttttttttgagactgagtcttactctattgcccagactggagtacggtggcacgatctcggctcactgcaacctctgcctcccaagttcaagcaattcttgtgcctcagcctcctgtgtagctgggattacaggcgcccgcaaccatgcccggctaatttttgtgtttttagtagagacagtgtttcaccatgttggccaggctggtcttgaactcttaacctgaagcaatccgcccacctcagcctcccaaagtgctgggattacaggtgtgagccaccgtgcctggctgcacagttgattatcttatttgcagccactgagataaaatttgactctatatccttaactaactattagaataaccacaaatatgactcttctggttaaaaaagaactgttttttttggtatttgagcccgtgaagctgcattcagctgagctgggcccagatcagcagaaccattgatatgtcccatacacacatgagcaaagatgaggctttgctgtatgctgttgagcttttgtagttgtttgttatgtggcagtgttgcggtaatagatacatgatccatctggcttcatccttgtagagaaggagattggctatctttccttcagggttccagtcctggttcttcctttaactagctatgtggctttagcaaatattttaacatcattaagtggcatatgtaaaatggaaaaaaactaatttttgtctaactcacaaaattgctaaagtgaagtgaaatatatgtaaatgtatttattatctatacatcacaaggtaaaatttgattaatctaaaactctctgctctgtaataatgtactacatttaagtttttttccaatgcatttgatctttcagctactacataaaagaaataaacaaacataaggactattctaatgccatgccagtcacagtgttaaaataacttaggcatattttgataccccttgatatgtttatgatgaatttgaaatatactagagaagaaattttgtttagttttataagtgtggcttacagaaggagactttaaataaaataaacccaaacaagttttgatttactcatggacatgttttagttcggaatgtcaagtatgaatgtccgtctccagggatatcagggtgtgaatcagatgtgcatgtttcacaatccacaggtttccatatgtttttgaaatatagaaaaaacttcactaatttaagcttatcagcattcaaagttatcttatttgcagccactgagataaaagttaactctgtatcctaactagcttactatttgaataaccacaaatattggttaaaaaagaaccaaaaatagttatcttggtttgactgtaaactgcattcttccatcttgaaaattttgaatttttctagattttcaatatgtttttggggtaataatgatatgtaatattataaaatttgaagtaataataatgaatgaatgaaattaaataaaatggactccagataccttcacctagagacttatgctgttaattaacttttagagactacaaactcaggtatcagcctgtgcatatatacacatagaaagataatgcataaataggagtgcttttagaacaactagaatataggatgcatactaatttaattaacatcttaaatttaactttacttgaaattaagcataaaaaagaagctgaatataatctaagtggctgaactctagcaacaatttcactgcagaataagttgtttctaaaagatccctctaaagttcataagaaatgattatgaagaaattgaagtttacatcattacttatgtaactaaaaattttcctttaacctctctaattttgttatgaaagacaaagaaattagattaggtgggcttcttttttactttaccatctcagcctctgaatttgttagttatattatttttatatttttgaggcttctgccctgctaggatgctttgtggcaataatttctgaaattcttcaaacttaattttatcagattttataagaaacttagcaattcaattaaaattggaaatgcaaaaagtcttcagttgcataagaaaacccattcatgatagtagaaatgtaaattgtaaccacactgagtttccatttcttacctatcagattgtcaacatttcgaaagtttggcaatacctttattattattattattattattattattattattattatactttaagttctgggatacatgtgcagaatgtgcaggtttgttacataggtatatatgtcccatggtggtttgctgcacccatcaacccgtcatctgcattaggtatttctcctaatgctatccctcccctagccccccactccccaacaggccctggtgtgtgatgttcccctccctgtgtccacgtgttctcactgttcaacccccacttatgagtgagaacatgtggtgtttggttttctgttcctgtgtaagtttgctgagaatgatggttcccagcttcatccatgtccctgcaaaggacattaactcatccttttaatgttaaggctgtggggaaacaggctttattatgcattgctgggaggagtgtagtttagtgatatctaccaaaactacatgtgcttagcttttgacccaataatttcttttctgggcatttatctttttatatatatctgcatgtgcacaaaaatgatgtgtttacaaggttagtcagctgagctgcttataacattctaacttacaaagaacctaagtgtccatcagtaagggactggttaaataaattatggaacattcatacagtgaaatatttttcagctaatggggagcagaaggaaaaggtagagaagggaaaaagaagagatctctgtattgatttaggaagatttctaaggtatgttgatcggtaaaatgttcatgtccagaaagtgtgtgtaaagagataagattatatttgtttgtgtatatatacatatatttatttattacttattttatatatataaacactttatatataaacactttaaggaaaatgtttaccttgtgtgagaggggacaggagaggaagggcactgggagactggtaactctgtctctttaatttgtttttatttatttatcactaataattacttattacaaaaaagaatgttaaagcattaagtggattcattctgaacagcagtgctttgtctcagactcctcattcatgacttctttaatttgattgactttttggttagctagattttgccgtctagttaattttaaaggaaatgaatgaatgttctgtttcctaaattgctgcatgaatgaggatatctatcaaaattgtgtgtatcaattctcccttgaaaacctttaaaatcttttggtctcacttgttttctacctcaaaacgttgttagtagtattccagtgtcctctggaatgagattgtggcactttcaaaaagtagagtttttcaccctatacttcgcttttgtttcagtgaattttttttgaggtggaaaaggagctcactaaaatggtttatactttctgattttatcccaaagtttggatttctttttgggttatcttttaatgttgcattattttgtggattttagctttctaactttctgttatggaatatactcagggaagtgttttacatctggagagatataattcaaaattttctctatgtgattatttatacatttttcctgagtgtgtgaaataaatttaagaataatctgaagttttgtgtttgttttagttgcatataccttgaaattgatgttaattgatgttgtctttacttttactatattgtttaggttatgaattgtgtgagtattctctaatggagaagtaggctgtttcatgtctttattctatattgactgtgacataagccttgtagagaaagtttttctatgtgcagaatgtacaaaatgtcttgcaaatctctgtgagtttgcccccgtgatgcttgtttcagcatcatgactgaaacaataaaaggaggaacatcatctagtttctctatttgcctgtgataagtccagattctctgagaagcagacatcatcatgggattaaatgtgcaaaaaccttattagagagaaaacctgtgcgagtgaaaaaagggaggcagctgggggcagctgacagagccctcagactgtgatgcacatttgaccctgagtgaaggagagagggagacaaggttggttggaagtgtcctggactggcatgaagtttcaggaaacctgaaggagcatcaaagttcacagttagaggagtcccatatctcctaggaacaggcatgccttaatctctctgttggcagtagtcattgctgggagtgctagatggccccagcctaaatggggtgatggctttcagaactaagcaggctgagcaccttggtcagcagagatccctatagggattcttaccagtacatctttctaaagcttatatgggactcttcttactttacatttgttcttggatgacctcatccactactatgaggtgaattatcacctagtctcagtctgtagtcctgatcactatctttacctggcatgccaagcctattttccaattgccttctgtgtactttgctgccctgcaaaccctcagactcaacaccccatgatgaacttatgatccttcacctcccccagtcccaccctttattcctgtattagtttaccatgtctcctttcttcccctttcccatattgaaaactaggagtcacctgtagctcttcctctccttcacatcaaatatccaaccagccaccatgtcctttgcatgtatctaaagttctaaactctggtgcctcctcccatttctgttatgacagttctaatttggttcatagattcttctttagaatcacatactttaagatggagtttgccactataggtccatcgtctattttttaacagtagtgactggcaggtatctctccacttcctagagttttccttgctgatctcatcctcagccattcttctgcacttagacttgtagaaaaggtccagatctgcaatgtggatgctgttggagtgctggcattttttccttctgcttctcacacggatattatgaatgataaatttttatgatggatgagttcctgacaccagagccagcaattcctactccccatatagtaatacagaaagcatgaaaagtagataactgaatctatgagtgcataggaccactacatatttggtggtggtggtggtggtggtgttatgtgtgactgtgtacatatatgtatgttaaaactagatatgataaaaccttaccactttattgctgtatgaatcagttatttgtgtaaccaacaaccacagaatctctgtggcatgtaacagtggttgttatctctagctctctcatgcgtggcttggctgaggtttggctgatttaggctgggctcacataagcttcacgtcaagctttgtcttaggcattttctgttccaggctcaggatgtgtatgaggctctggtcttcccaacatgtgtttgttgtggggcccaggtttaagagccagcagccatgtgaagaagcttcttttcatagatggcaaaatacaagaaagcaagaccaatggcacaagtacatttgaaatctttccttgtgtactgtccactaacattcctttggccaaagcaagttacatggccaagcccaacatcaaatggtctagtgggaggggctacaaaggaagtagacacagggaaggatgaagtactgggaacaataatgcagttgaacacaattatgatgattgctttccataagaagaaaataaatagaaaaaaaattggggttggttacgtgcaaatgcctttcctgctttatgtttaagtctaattagcagaggagatgcattttcctataaaaattagaaactaaaagaggagcaatgtggattgctagacagaagtatgtttatgacattattatgtgctaattctttcttaagagtggccatcaatttataaacttccacagttcttttggaaacttcctgggaattgtctattttcgtccatgtttgtaatctctgagccatataaagagtgaagtgtattgcgacgttttcactttcaaaactattcttagccaattttgttagggtcttataaaatgtgctaaagagtcaaacgttaacatatcagctttgaatatatcaggatatagaatgtcagaagttaaacttagaattcttacagtattgtgtagcagactgctaaaattagtatatgattgatgacattgtgatttgataggtaattcaaatattttgtaagtgtttcagaggaaaatattgctataaagcaactgatttagaaattgaaatgagaaatgtcccaagaggtgaatagttgtaatatttattcaaaagtaatgttgcctatcctgctcctgataaccactatttcattctctatctctgtacatttgactgtttccttctaggattccgcatataagtgaatcatgcaatcttttttttctgtgtctgtgccagacacagaaaattatgcttatttcacttagcataatggcttccaagtattgtgttcgagatttttgctaagtgaatagctatagctgcttttgccattggagagttgggggatgggtaactatgtgagatagtggatatgataatttgtttgactatagtaactattttaatatatatatatatataaaacataatatcatgttatataccttaaatgtgcacaataaaatgtattttaaaatatggcctaaatgaacatgatgtagggtttcctttattagtattaggaaggattttaattgtgcatgtagatataagacatttccatatgaaatttatataataacaaagatattacacaaggaaaatgggtctctttcacttctacacctgaaatgtaggcggcgacacttttatctagtcatagaaaacacaatgaacttgtggttgaatgtactcaaattttctatcaaattacaaaatttgtcaaaactgtaacacatttatcatccaaattgtcttaagaaacgtgcatatgacaatgtctttaattttcagtcacccaaattttcaacagttgtattattcacagtgagattcatccaacaaatgtatatccatttcaacttggacaattttaagaactgacaactttccatgtatgatatttgtcattctcagaatcccttagaaacctcaacacttaaccatttaccatgtttcaagggaatgtttttccaggaaaaaaaatgcacaagtgtgaaaaagcaggagaaagagaagtgcagttttaatagaatgtccaagatttaaggttatgatatgaaaactaggtagcatgttcttagcaagtcttgaattaatggcaaacttatgacttcattgattttctttaccccatcccctgacatataaatatatgagaaatatagcttccataccaacacctaaagacagatttcttattcaatttctttgagaaactaaattcaatggcagatgacagcaataccagtgtactgcagaagtatgctctgcattcctgtgttttgttcatggtatacattcctaatgccctttttgtgaaacctggttaataattaagcaagtcaggatgtacgaaccacctgaaattctcggataagtagtttcttaatatctctttttgtacttgctattgaaagtatttagagttatttttgcttgattatttacaattttacactttctttataaactaatttttcctaaataccctagtgtgattttaaagtttgaaatgccttaacattctccatcagggacaagttatgttttgtagttagcggcttgatacccacatgtagctctgtgtttatgatggcagagcaaagtgaagattgcagacaattatcttgatggtcaggcctccaggtcagctggctgctgtgtttacagataaagtgagctggacattgggaagtccactggcaacttctgaaatacataatggtctaaattgccttctattctcagggcccaagccacttgctagtgtaagttggctatttaagggcgagcattaactctcgtgggtcaccagggaaccatttaataagtaactagaggcctggagatgttcacgtattcctctaaatgccctggttttgttactggtgcagttcactcaaggtcattctgcagcttcaaatatttaatgtcctttctcaagtgaatgaccgggtccggtggagaagctggctgatttgttatttgtagtcagccagtacatagtaagctaatcaagttcataataattatattctggcaagaaaaagctgattaacagatgtagtaggagtttagagaggctgaaataaatccgagttatgataaaacaacctcattagagaagagtatatacatgcataaggattttgagctgaatacctttatggtttttttgtaacttttacttttgacataatttcttattttttattttttattttttaatttttatgggtacatagtaggtttatatatttatggggtacatgacatgttttgatacgggcatacaatgcgtaatgatcacatcatggagaactgggtattcatcctctgaagcatttatcctttgtagtgatataatttcaaacttacaaacaatttgtaagatcaagacaatgaacaactatacatccttcacacaaattcactgattgtttctcatttttttccatctgctacctcattatatctaccaagatatcaatccacttaatttttttttcctgaaccatttcacggtaagttgcagacaggatagcccttcaccttaaataattcagtgcatatactccaagaacaagaacattttttacgtgaccacagtgcataattatcaaaatcataatggtgcatactactatccagttgtggtgtatgattttaatatgttatatagagagaaacaaaaatgaaaatgaatgactactattccaaaatgcgaacgtgtgagttgcattgggacagattagtatgctctgtaaaggggaaattaagctgacttaattatttaagtcatgtattaagctaaatttcaattatgaaattactggatgatccaaatacatattagatgagggtcagtcacttattcaataactcatttgcctattttagtcaatgctcaggtgtcttgtttttcctaatgacttccaaaggtgatgattactggcacttactcaagcctaactttcacataccacttgtaaagcaggtttgaataaaagatgcaaggaaggttgacttcaatattcagccataactggacctcttggtgtgttggatttctggttttcagtatataattcagtataaatatagttaggatacaataaaaggctgatcaaatatgtctaaaggagagagtcagtatagtaacataagtaatatagacaaggcatactatttgaattttggattttaaaaaatgtcatccttttattcagactttctaatggtgcactattgcagtgataattagcaaggttaaaagcctcttcctgaagactttagggagatgcttgccattagaataatctgtttatacctatctcatgtttgtttttacagcctgtgtttcaaagaatagtattaagtctgatggattttcttgcccgagaagctaatttaaaaaaatcgtattcactaggtgaactgcagactgctaaaaggtgggactaagatgaacactaaagaacaacataaaggacagatatcactcacctgtgaggatttggttagcgatgtgggaggagagccttcctgagtatcttaacatcagtgcttctctgaaggcattggtagattttttttttttttaagaatgcaacatcatctgcaacctgaagtcagttctggaggcaggatgtacctcatccctaagccagttatggaggcaagactgtactcatatcactgtactcacatcatttacaaggagtaaatgctacataagtggcaccagtgtaagtatctaaggattcaggggatggggagatatcttagagacaaatagagcagacttaaggaattggataggtagaaaggagggaagagaataagaaatgatgtaaataaaaatatataactgcagagaagcagataactgttgaggagtggccaaatatggaggggggctaatgtgtgtgtcagggatttccagtttccagttctcatgaaacaggatgggggctaaaggagtggtctctaccatccagttagtagaacaggatgtacataatgagtggatacctttcaaatattcaattacattcaaaattttgctaaaacatttgttcatgcacatcttgccatagtgaagtccagcccaggaatttctgcctttgcatatgaaatgggatataaccagagactgacaaagaacattcaggataaagagaactattaacttgacacgtattttgtaggagatgctgtgggaaaataggcacattcacatattgctggtgggagtgtaaatcattacactacctataggagggcaacttgatgataactatcaaaattacaaatatgccctttgccctgaaagtccagcttctgtaatgtatcttacggaattacttctgtacgatgcataaaaagcagaatattaaatcccaaaccaaatatttgaaaatggaaactggtcaaataaaccctgccagccatagaatactatgcagctgtaaaagaaaaaatttttaaaaaaaaaggagaagaaaaagaggaggaggagaaagatgtgctctatgggttgatttggaaatatcccctagaaagaaggcaagaataatcacatttgcatatatttgcataaaggaactagaaggagatataaaaaacagaataaaagtgttttgtagtgggtggaaactggtagatggagacaagggtgggtgtgaaagtcttcactctgtaaaactttttatacttcataatttctgagctgtttctgtactagttaatggaaaaaatgaaaagagaactattgtgttcttataagaatggcaaggactgctaattttctaccctaacatttattctcccaattgttttttattttaaaccagaacattgccctgtagacttaatgtttccagcttctcttgcagctaggtgtggttgaggtcaatgaggtatagtaaatgctgtgtggtatatcttggtactttttaaatggatctgttaagctatgagggtctttctgccttgctttcttctttccaatatagatgtgatgttcagaagctcagcagacatcttggcaatgaggggaccttgatattggaaaccatgtgctaagaggacagagaaagacagacccatgagtcccgggtgatactatggtgccaacatactggctgcttcttggtttctcttatatccaagaaagaaagctctaccctgtgtacatcacacttattttgatctttatggtgttgattaggcattggagtctaatccagtatttgccccaaatgtagaatactgtttttctttaagatcttttctttgcaaactttgcttgggccctctaagcttgtgactttacttcaaatccagttccactttgggttgatataattatggcatgtgaaaagtgtttctggagaatcatgagatgtgactattatctggtaaagtgtgttgcagtccaaagtgccaatggtggaaaaactcccgtaagtgcaccctgtcatttttctttttaatttaggtgtacagctgaatttttaatatttcatatgcagttaaattaaccatacttcttgtgtcaaaataaatatgcagaatctcaatcatggacttaaagatgcagaaacacattgattttaggaaaagtacatgtctcttttattaccacacatataattctggtaaaaattatgatgaataatagagaaaaaatatggaaacatggatgaaatttgttttatagatttgcaggatgcttgctaacatggtggtagggagggctgatgtattttcagtctgacatctgttaatgtgactataataaataaactgtatttactaagtaaacattcaacttttctctcaaaaagatttggtagtaaaagaatatgtcattgtctcattgctggaagcctcatactttttcatattggatggggaagggaattccattagtggtagcacaagtccatctgtcttacattagacatttgtctaaaccaactttgctcactgaaaagcagtgtaataacaccactgaagagagttcttaatagactgaggaagcaaacaaattcaactggtgtttcataatatctaaatttttagacctgagatcatttctttggattcccttctacagattttaatttgcatgcctgatttagcagcctctttccctgctttaagtagaaagtagaaataatattttaaaactaatttttacatctttttttgcattatggagatgggctttcctgtgtgctattagtagaaaatcttttaggaaaataaggaagaaaccatgcagagggacataatttttcaaaaaaggctcagaagatatagcagtttgtctttatgtttttcaagttaagattctcctatagatatattaaacctaatccccaatgagagggtatttggatttggggccactgaggggtgattagggcatgggggcagagccctcataaatgggattagtgcccttggaaaataggcccaagagaactcccttgcccatcagccaggtgaagacacagcaaaaagatggctttctatgaaccagaaaatggccctcatgtagtgtgtctgcatcctcttcatccaacttcccctaacatcttacatgaccatagtccaatttttaaaagcagaaaattaacattggtacaatactgttaagtaaacgagagacctaattcaaacattacccatttggcaactgatggattttttattctagaatcaactcaattttcccacagtgaatttaattgttgtgacgttatttagtcttctgaaatctgtgacagttccttagtctttccttgtctttcacatccttggcacttttaaaaagtattggtcagttactttatgcaatgtctctcagtcttgatttgtatgatgttttctcatgattatattgaggttctgcatttgtattagtcgattctcacactggtgtgaagaaatacctgagactgggtaatttataaagaaaagaggtttaattggctcacagttctgcttggctggggaggcctctggaaacttacaatcatggtgcaaggtacctcttcacagggtggcaggagcgagaatgagagcagagtgaagtggggaaaatctccttttaaaactacaaaatctcatgagaactcactatcaaaagaacagcatgggggaacccgccccatcattcaattgtctccacctggcccctcccttgacacatggggattatgacaactcaaggtgagatctggatggggacacagaaccaaaccatatcagcattcttggcaaaaataccacagaagtgatgctgtgcctttcccagcacattctatcagacagaaaatgatattttgaaataccatttggcagttggctctttgaccaatttgcctctaattcaaactctgtatcattattgagcaagcatttagtagcttgaaattgtagctgcatattctccattttgctcacaagtgtatcacatttagaaagaaagatgggattacttttatcaactaatctggtgtttttttctacctctgtagaaatggaaaataaaagctcaacatctgattattgtaggtgttcttactagctgggttaggaaaagggataaagatacatgtgctgcagtgcgtttatagaggcaggtgatggtcaagtattctttgatggtcaagtactccttctgtctaacagcctcaaacaagctccttttctttatatatatatataaaatatatatatttttaattatactttaagttctagggtacatgtgcacaacgtgcaggtttgttacatacgtatacatgtgccatgttggtgtgctgcacccattaacttttcatttacattaggtatatctcctaatgctatccctaccccctcccccaaccccacaacaggccccagtgtgtgatgtcccccttcctgtgtccaagtgttctcattgttcaattcccacctgtgagtgagaacatgcggtgtttggttttttgtccttgagatagtttgctgagaatgatggtttccagcttcatccatgtccctacaaaggacatgaactcatcattttttacggctgcatagtattctatggtgtatatgtgccacattttcttaatcctgtctatcattgttggacatttgggttggttccaagtctttgctattgtgagtagtgccgcaataaacataagtgtacatgtgtctttatagcagcatgatttatattcctttgggtatatacccagtaatgggatggctgggtcaaatggtatttctagttctagatccctgaggaatcgccacactgtcttccacaatgtttgaaccagtcccaccaacagtgtaaaagtgttcctatttctccatatcctctccagcacctgttgtttcctgactttttaatgattgccattctaactggtgtgagatggtatctcattgtggttttgatttgcatttctctgatggccagtgatgatgagcattttttcatgtgtctgttggctgcataaatgtcttcttttgagaggtgtctgttcatatcctttgcccacttgttgatggggttgttttttttcttgtaaatttgtttgagttcattgtagattctggatattagccctttgtcagatgagtagattgcaaaaattttctgccattctgtaggttgcctgttcactctgatagtagtttcttttgctgtgcagaaactctttagtttcattagatcccatttgtcaattttggcttttgttgccattgcttttggtgttttagacatgaagttcttgcccatgcctatgtcctgcatggtattgcctaggttttcttctagggtttttatggttttaggtctaacatttaaatctttaatccatcttgaattaatttttgtttaaggtgtaaggaagggatccagtttcagctttctacatatgcctagccagttttcccagcactatttgttaaatagggaatcttttccccatttcttgtttttgtcaggtttgtcaaagatcagatagttatagatgtgtagtattatttctgagggctctgttctgttccattggtctatatctctattttggtaagagtaccatgctgttttggttactgtagccttgtagtatagtttgaagtcaggtagtgtgatgcctccagctttgttcttttggcttaagattgacttgacaatgcgggctcttttttcgttccatatgaactttaaagtagttttttccaattctgtgaagaaagtcattggtagcttgatggggatggcattgaatctataaattaccttgggcagtatggccattttcacaatattgattcttcctatccatgagcgtggaatgttcttccatttgtttgtgtcctcttttatttcgctgagcagtggtttgtagttctccttgaagaagtccttcacatcccttgtaagttggattcctagctattttctgtagaacctcttctccattcaaggttgcagaagtctgtgacaaccaaggaaaagagacagcaatggggctctcttacctgtgcctaggaagaatcttacctagtatcttcttctgctaggaagagagaacagatgtataggatgaagtatctcaccttttgggatctttttttaaaataatctcagaccatgtaaactccagccatcaagggaaatgtgctgattcccacagaccgtatttcttttcttttttttatattgcctcagaaagagaatgcatggaactgctgctgcttcaaactagatatctgacactagtgctaatggctggtttctcagctaatccacctgtccttcacttctgaagaactgaatgatagtctttgtatttccaactacaattacaaattacatgaagcaagaacaaatttttagttttatgattatgtggtaagcatttcaataaagctccacaaatgatggaaagtgtgaaggagagaaagagggagagagagaaagacacacacacagacagacagacagacacacacacacacacacacggacccattacccattatctggacagaaacatcttaatttgcgggaacattaaaaattttttttctatgtggctatacataattatttataaatctacaattttatttaccaaaagtgtgtgtgtgtgtatagtgtatacttgcttttaataatagatatattttccttgacaatgaacattgagcaaatattatcatttttaaaggctggacagtagccccttctgtggatgatctgtacctgatttaaaaggtctcacattgatggaaatttcgccattgtcggcagcgctgtagtggacatccttgcatgttgattgtgcattctactcagatgtttccctttgggtaaaagcctagaattggaattattaagtcaagtatataaaaaattgagtcttattgcatatagttaaattgtctctcagaataaaactgctccaatttcaacttccaccatgaatgtatgaatgtgcctattgccatgaatgtttgccgaaataaatctttggcaatatcaaaatatatccatgtagcctctattttatttctttattttgaagttgagcctccttgcctaagttatttttcctattatttcaaccttatttggtgatttgttgcttatattttaattagtttgtatgtgagattcttaatgattttatatattaaggatcttaatgatttttcagtaactgcaaataatttttctagtttataacttatcttttaactttatttgcttaaaatattacttctgaaataattaaaaataaactacataatgaagatctttgtacgtactaatatttaatatgtgataatgcaacaagtatttgtgaatattgtaataggtaatatcttaagcatttacaaatgttaacttattttatcctcataaaattatttaaggtgtatcctgatactaagtcgattctacagtgagcatacttaggcacagagaggttgaatatactgcctaagtttacataggaccaagtggagaaactgaattcaaagccaggcaattacctttagagttcttgttcttgccactgcattttataattggttaaaaaaatatttatttattccggatattaattcattgtcactcatttgcattactaatatcttctccctcttggaagtctctcttttaattttgtttatgctatattttgatatacacaagtatgtcatagccattatatgattataataatgtgatcagccttatcaatatttttcttcctgggtattgtttttgcagcatactagaaaatccattgttactcttatgccatgaaataggccttaatattttcttccaaaaatcttgaattttcatttttaacattcagagctttaatctacctggagtcaatttctatgtttggtatgataggaactgaattatacctcttttgttatagaaaatgtgtaccatcagcaatatttatcaatgtaactaactttattaagtccttgaacttcccattttatttctatgtgctttcaaaattttattattacagagaatgaaattgttttattgcctttcaaaattggttattcttgtgtataggaatgctattggagcttagaatattgatctagtaacccagtaaccttgcttaacaatcttttgaattttaatagtttttttctgaagatcctcttggattttctatgtagaaaattcataatctatacatcaccacacacttttccaactgttttaccattttatatttttctcatctccttgaattatcttgggcctctgataaaatactgaataaaagcagtatttatctggatccgtgtattttctctgatcttacagggaaggcttcttgtgttttaatattaagcataatatcagctttagatttgtagaagatatttcttaacagattaagatctgttcccttttatgtctgattcgctgaaggatttagaaaaattatacataggctaagttttgtcaaatgacttctctgcatataataaaataagcttttctcctctgctgcaaacttcttgctaatattttattttgcatctatatttgtaaggcaggcccacctaggattattatttctcagacttttcttgttcaatatcaagataataccacttcatagaataagttagaataattgtcttatttatttgggtttctttagttagttatttaagctttgttatgttcccagttcttctcagccatttactactagtttctgtcttgtgtgttttatttattaaaaaaggacccccctccagcaatagtataaaaataatcacctctgtttttcttatattttgaaatattgtgggtttttttaacctttaaatcttaaatagataacttagaattggcctctccatgtatgtaatcaaaatagggttatacaattcttattttaaagccagaggaaaaaaatccaaaaatttttttagcaaaaacttcaaatggattcttcatgatgacagctggggtgcccaagagaactgctattggtttcaggtttaaaataaacctgaatctctacgtaattcaacattatgatttggtacttaatgcaaaagtaagccttcaactcaacatataactggagaagaaaaatttaattccagaagctttccatctcatataggttattactctgccagagtaaggatttactttctcaagcagttggaattcccaagcatactgaagcaagttatagatagcctgaaaagcaatgtgaaaagcaatgcttcatctctgaagcaaaatttcctttcagctttacaatcaatgatgctatcagtgacatggtttttaaattctcgttgagaaaatttaaaggaaaatgttaactttttaaatgagcagacatgaagaacacagtttacctacaacatgaatgaagaagtatagagttattgcctgtgttgggttttgtagatccttcttgattcctgcttatatttaatagagatgtcagaatgaaaatgtccaacatggttaatattaatcttattcctcagccagtatattcaggaaggcagtatagttattttataatgttgttcttttgtttgtgtattttgttgttgttgttttgagacagtgtctcactctgtcgcccagactggagggcagtggtgcatctctgctcattgcaaactccgcctcctgggttcatgcaattctcatgcctcagccttgtgtggtagctggaattacaggcatgcgcaccatgcccagctaatttttgtaattttagtagtgatggggtttcccatgttggctaggctggtctccagctcctggcttcaagtgatccgcttacctccgcctcccaaagtgctggattacaggcgtcagccactgcgcacagcctataatgttttttttacagcatttatttcttggcttactttttattcctgttaatgttgatattgtaccatttggaaattcagctattttatgtgtacacacatatgtgggcactttctacttagtctgtttctacagtgatatctatctttctgtggatatttatgacagataggcagacattcaaatgcagaatacatcaaggtatttgttggactagataatatcaatatcacatggaataggtttgcttgcttgtttatttaattcaatcgcatatgttgagagtacagtgtgtgccaggcaatgcattgtgttctgggatcccacacagggataaagacctcataatggtgggaggtagatggtttgcctgcaataatcacatcagacaatatgttgactgatagtccagtgtcatcaacaatgtgtcgagggagcacagggatggaaataatttgttttgcagggacttgagggtgaatgtgggagcagagatgaggaagaacacgcagagaaagtagaatttggtctaggccttgaagagagttgtatttcatatgagggggagcgagtcaaaacactgaatcaccagggtactttgcttctttagtgaatgggaaatattatagtgcacgtggcaagtagtgagtagtgattacggagcaggaaagtttaagctggaagagctcagtcattctgggttgtatgcacacacacgcgcacacacacacacacacgtacacacacagaggcagtggcatggaggatcatttggaagctggagaaagtaaaaatcactagagttgaggatacagatgagaatctgagcaatgggagtagtctgaacaataggaacgtgggaccgacataagaaagggatggaattgatgacaaatttaatgtgggaaataaggaagaggaagaagcaaagatgatatggaagggtctagcttgtgtgaccagatggaaagtgactcattaatggaagagtattaggatggagaaattgttttatttttaaaataatttccagtgtagtgatgaaaagaaaaagttactgaattttattttgaacatactgagtttgaggagcctgcttaactatttaggtggaaatgtcactttacctaaggaaaatgagtttgggctctgaaaagagagaagtacatgtcaccaggccgggggtggggtgggggatgattgaagccaagggaggagatgtgcttgttcagggagagatgcacagacaaatcaggttcctgaaaaacagaaacatttaatgcatgatgggagggatctattgtcttgctgaagaatgataagtgagatgcagggagaaaacttggaggacactttattgaaaattaaaggacaaatgtttctggagggaagaggcaacaaaataatagatggagattttttaatacgtgccttagtgttcttgcccttgaattggtacaaccctgaagcacattgcatacagtcttccagaatcccctgcaggattcagccccagttgcccatagtgaaggacttgtactttataacacctttcattgccttccatcccttctctgtctcacttctcaacttccctcttggtgccttctggggtcacctcaggataacctacttgcaaccaaatccttgcatcaggatctacttctgggagacaaaatacctaagacaaaatagaattttggtttctttcttcctaagaatggactggaatgggttagaaggaagatgaactgtggaaagagagagctaagaatgacagggtggggaaataattgaatacgtagtccggtgtcatgagcaatgtgtcaagggagcagagggatggaaataatttgttaaattattaacaactaaataattggagttggaggattaggggcttttcctctctggagaaacacaggaaaagattggagtgaaggcacataatgttagtggtgtgatcattcttgatcattcatcctgtcatttctcatagaaggagacagaattgtttactgaactcaggcatcttcataagcaccctaggtgatatagtttggatgtttgtcctgggctccaatctcgggttgaattgtaatccccagtgctggagatggggcctggtggaaagtgtttggctcatgggggcagatccctcatggcttggtgttgtctttgtggcacctccttccacccaaccttgctcccaccatgtgagatgctggcttccccttttgctttccaccatgattgaaagctccctgaggcttccccagaagccaagcagatgctggcacatgcttcgggtacggcctgcagaaccgtgagccaattaagcctcttttctttataaaatacccagtctcaggtatttctttatagcaatgcaagaacagcctaatacactgggatagtccattcattctaagtctgttgttattcaacaaatatttataaatcatatcctatgtgtcacacctatgattttctgccttaaataatagggttccctttcatcattttttttccttgccacttatttgacaatactggttgcttctgctttctgacattgaattcagttaatcttattctgcttttgccatctgtgataataagttattatcctagaaatatgttttgaatttaaactgaatatccatcttgaagttgccttaaattctttatgataaaatccatttagcataataatccgaaaagacagagtgaaaaaaacattatttaaaatagttgatttaatgttgttatgaaatataacaggactcttgaaaaggtgattaatattcttacacatgttgaaacagaacaatatgagttttttcttatctacttttcttatctggtcttctctggcttctaactttattagcattcgtatattttattaattaaaagtcttcttgatatacattctgtgaaatacttatacaaaaacaaatatcaaacctgaaattcttcaagcttctcgatccagctactgatttattgaaaacactgagaagagaaatgtatgattaaatgatgtaggatgaaatttgtccatactatactataggaagtaggaaaatcttcaggacaatcaatctggtttagtcaacaaataaattccaagaaaaaaataagacagaaggggaaacaatagtttagaacacatacagctcatcttaaacaattccaatgtatggctttcatttagattgggatttttaaaattatggcacttgtgagataatttgaatattgagtatttgatgatatttaggaattactattaatttgctttaggtattttagttatttgcaaaagagggaaactacaccgttagagatacattctgaattatttacaggtataattatatgatatctgggactggattaaagtagaataggggcatgggagaaggggttggggttggataggatgaccacgaatgaatggtttttgaggctggtttatggctttgagtgtgcattatactattaagtttacttttgtgtatattcaaaattatccatgataaaaatggaaaaaattaaattaatatataggtagatcatcctcagtgtatgaataaattatagtttattttttccaataaaaactttgttatgtaatagcatggtttcttaaattcacctgttcgatagaaataaggttaaacaagttcaagaatcaactaacatcctcctacagtaagcttcattgcaaatccagttttgacctttgctcaaagaagagaatgagaaaataacacatttgtgtgtgctcttttcctgacctatgacttgtatagatgttagcacagtggctttggttttaaggtaaacattctttcagcatttctcatccttctcccattttcctgcatttctcatccttctcccaccttcttggtattttaatcatttatgtattgtgaacattttagataagatgtaaaagtcttatatagtgcccctcagttaaatttgcttagtttcagagctgtgggattcaataaaatgagacaggaattatgggtaacctcataaaggagtatgaaggcattgttatcgttgctacctttttgaaggaaatatgccctcactctgacttggaaattaatagtctttcatataataatttgataaatttagtaaaattcatttttggacctgcatctagatttgcttctgccacaactaatgtgaaatataaaataaatacttactatattttagctaacatactttttcattatttttattcctaagaatggtaaatactaagaattatctaaattgctgtgctgaatcatataaatgtatcccaagaaaatatttcaaaaaaagaaaacatgcacaaagatagtcattataaaggataacaaagtcagcagaaaaaaaaaagattgtcattatagtattttcaggactaaaacaattagacatgaatcaaatgataaaaagtttcaaaaagtaaatacataaatcatgatatttcagcaacaggaattattgaagtaccatgagaaataaatttttaaaatgcaacaatatggaaatattgagatgtaaaattagggaaaaatacaaggagaataaaaattgtgccttcactctgatataaatatgtaaaatatgttagtttatagacaaaagactgtaagaggatgttcaaaaatgaagccagatgttgcattatagtgttggtattaaggatgagttatttttcctttaaattctcttctgctgttatatgatatttataaaattttaaaagtgcagaaaacaaaaaaaattctgccatgaaaaactctaattatattgaaaataccatcctacagggaagaaagtgcaagattacttttaagttagctctaataaatacagtgaatgatttgcaatgaactgccacatattttaaagtctagtttatattatacggaacaatgcagagaatctcctctctgtccttcttaaacagaaaggaaaagtgctgttataaatcttacacccttaaagaagcatggcatcactatgaagataagcttcacctaatgtccagtacagtgctggacccaggtgggtacttaccaaacactgtggaaagtctgaagggatgctggtgagtgcctcccagaggtggtattttcttttccattgccccattttgttcctctataatattattttgcttttttaatttttttaagacacgagatcttggtctgtcacccaggctggtgtgaagtggcatgatcacaggtcactgcagcctcaaactcttgggttcaaggaattctcccacctcagactcctgagtagctgaaactagagtcatgcaccacaacgcccaactaattttttaatatttagtagagacaaggtctcactctgttgtccaggctgatctcaaatttctgggctcaagtgatcatcccatctgggccacccaaagcactgggattacaggcatgagccacctgcctggctaagttcttgtttcaataactgcctcctttctcctcctgcagcttttaaattgtagataaatattttcaggtgctaacctagagtcttactcttccatgttcatatggggtatctgcatgctgggggaaggaagaggttgaggagggaattggccttttgctgggggtttagtgcactggaaggcatttttagaacatctggagatttgcttccttttgtcagaatcccaaagactagacagatatttgaaccacaccgtagataactgttttgattttttctttttctctttttttcagagacatcataggtcctattctggggccccagtgaattgttccatagactttaagaaattcttgggctgttggatgggaaggcaaaaccatgtaactggatggagtgattcttaacttatttcttttcactctacagttaagctaaaattagaaactctgaaaagctggctgcttttaaaaggagataatggacacaacctttgagaagggctggtgatggaaggggaagggaggaggcggtcattttcccatacatcaataaaccatagacatgcttggttcattccaccactaggttattgctgctgggaagcaaatattatcctgtctcttgtttatggagtaggtttttttttcaaattaattaaagggtttatcatctcactaaacacacagatgtcttaataaaatgtagagctatgtttagtatcatggcatctgtttcctagatgtcatgtggagtgctcttggaatataaaaatatggtccctgccccaaggagtttgtatatgctttttggtgcacatacacaaacataagaaaatgggcaagtcaaattatagatgaggatgatagtgattttttttcacatttcatgagattattgaatataatttcataaaaatgagaataccctttcagataaaagtgtgcaaaatattttatttatgaatgtaaatttttccatccaaagccactgatcaattagttaagtaaaatagaaagcggaagaaatttttgttctgaatgatattaaaatttttctcagtttttgtcttggctctcttaaaagtaaagattataatcagatagtcaagatggtattaatgtgtttgtttctaaaaatgctttgcaggcagttatctttgaagaggatgattaatagtggtagagataacattaaagaaaaactggttctatggattgtacagatggtcttcaaggggtggccgtcctgaccacaggaactctggctgctattttaattaaacttgagggcagaagaaaagaaactgttttttgttttttttttctaagtaagtaagtattgaggttacacaatgtgtttaacctcggggtttgtcaacaattgtagaaaaactgaacagtttacaagaacaagccagtttgcagtttttcagttcagtaaccaaatgactttcctattgtaagtgaaagtgggaaacagcttttcttagcaaatgtagactttgttcttagaggagttagttattgtcttcaaacaattggtattgtaaaatgtgacttaggaacagaaaagaagtgtgtaatcttatggtaattttattgtgatgtgttacattgttttaaaatgttattttatttccttaaacttatttgtttttctttttttaaattataaaagtagtacttgctggttgaaaatattagatgattttcaattccggcatcataatttctgttgggaaagaagaactaaataatacagaagtatgtgaaacaaaaaggagtttctctcttcattccctgatccacccagtggtcatgcttgtgatcaatttgatatgtcactatatagaacattttattctaagtagaggcaaacatactgacatagaaaatcatcatatataacatgcacaagtgttcatcccagccctgtcctatttaagtgcttttatacactttagccacttcaattttactcactctgttacccatgctagagtgcagtggagcgatcctagctctatataacattgaactgctgggcacaagtgatcctcccaccttagctttccaagcagctaaggccacaggcttgtgccactacacctggctgatttttaactattttgtagagatggggtattattatgttgtccgggcttgtcttgcactcctggcctgagccaccgagcccaactttataaatatttttaatgtgaaaagtgtaactttactggaaatatatctcttaataagataaatgagaccatcttttcaaaaaattatttcatgtgtctggggtgaaaattattattactaaaatgaaataagcattaatatcaatagtatttctctttttctttttcataaatgtacatgctgaaaataatgctcacataaataaatgggtggtaatggaagtctgttttatagtcatgcctctccaatctttgaactcctaagttatatgccaaaaaacatcatcagtgctttgtcaccaaaagccattttattaatctgttgatggaagacttaagtaggcttacctttaaattcattaaatctgagaaattggaaacaacctgacttgtaggaggatttatttaccagcattggagtcttttactttctcaatttggggcaagggatcaaaggatcattctctgtatcagttactttttcacatagcagaatcatgtaaaacttagaaaggttcagaatattggtaatttcagtacacttttgctcatgtaattttttttaaggaaagcttttatctgaagtttatgggtattcaatccttggagttgtagttttaattcattcaattcaattcatgggaaatgttatttacatataatctaattggagaactcagccctcaatgtcagacaaactctgatttcatttcttagttcaagtgaacatgttaatatgtactgcaatgatcttcatttcatttctgaaattttgaattgagatagaagaggcacaaggcttggtgatgtgacactctgctgctgtcaaggtgtcttccaactcattcccatttgtcctcctgggactatccctcaggatggatgcatgcattctcaatagcagggataaagaggcaagattatttaatgaaaactgttagctctaccactgcctcactctataacctgtctgcactctgagcgtgtgtatgatgcagggaaaaccaaagcacctttatatgcttatggtgccttggatggaagaaacttattacatccctttgtttggtgccccagaggattctacttcctgagattatgccccttagcaagattctggttggatgagagacttggctttattttttaagggatgagaaggacaccagtttagggtggataagaaaggagcaggagtagccagcagtgccacagacatctcagacttatcagacttgggaaagttgaaaacctaccggaatttcattcacttaaaactctccacgcccatgtttctcttgaaaaatctttatgtatacttctatctctatttgcataacaccattttagaccatttacatggaagtgtttgttggctactatgagaaaaatgccagtgatgagcatttacaaattttactgaatttggacttttaggttctctacatataattacattcaaatgaagttgtagggatatagattggtctatataaatcttcagagaaaggagaggatgcagaatgatggatattgatgatgaagtaagataggaacatatagactgtgttgttttgagttgccgagattccttaaattttacttagttttgtgttttagagcagaagatgtattcatttcaatttctctttacatctattgcagttcttttgtgaattatgattggaacagattgcaaaatctcccagtgtatcagttttcctaaaataaatcattaaaagcagttcattatctataaatctttcctgggttaaaataaaaatctgctttctaggtcaatcttcattaagctattaatatccttttcatattataagccttttaatttcttttattagcaactgaaagtagctgaaatatgaatgtcattgttttgaatattaattgatgtttgaattatttttagtaattatgctccgacgtcagtgaacttcattccagcccacccagggacaaggaacttctccaatatatttatatttactgaactgtatttatatttgtatatttgtattttacttcttgtgatagatgttcctagtttctatgatttttattgcagtaaaattcaagaattgtcacaagggtgattcattagtggtacattagaaaagcctgatttttgttttgctttattttcaagcaaatcaaaacttcttcagcataaatacatgagaactcaatttcctaagtctagaacagcatttgaatttttagctcatcatagtaattgttcaattttttccagaattactatctaaccattttgtatgcattttattctaaatacaattgacatcaagaaaatacggtgggtgaaaagagccctggagtaagattctgacaggagacttcctctttctgctctgtgacctttttcaagtaaacatgtctctgagtcactttgttaccatttataaaatgaaatggtttagtcatagtgattcttcttaattgttactgagatttataattttaaaagcaatataaaattagagaaaacacaagccacgtaggcatacaaaacgcaaaagatgaaacatctctacaacttcagaccttggccaaaagcattgttcactgctgatggctgaatgatatacccttgcatgagtatgccattatttatttgcctctcgaaggacatttagagcactttgaagttccagttgcactccacatgcagagactcccaaagaacattctactacatattttagaatttacatgtgaaaatgcagaatcaaagtatgtgaacatttaaattttcaccttcgttaccatgaaagctatatcaaaagttgacattgtagattttttttttctttgcaaatctgtatgaaggaaaacaaagtttcttccttcctgagttctcttcctccactcctgtctttgtgaatggccacttcattcaagcctcttcaggtacctttgagattgcacaccatgtttccttctgagtcttcacaactctattgtctcaaagcttgatggtgacaaaaagtgtgttcactaattcatccaagaattttgggggcctggtgttaccctgaaggctaaagtggtaaacaagagcattatgtttcatagttgcttttgtgaagcttaaggtctagtggatcaagaaaaaaatgtccattagataatggcaggaatgcctgtgcttttccaaaatgcgaagggtgaatacagaaggacatgattcagtctgatggtggctggcagtgaccagggtcttcagggaaaagctcactgggaagtgatcttagctccaaaggtgagtaagaactaattatccaaagtaatgggggtaggaagtgggctgggaggaagagctttgaaatcagagacatacaaaggccctgcagcaggaggtagcagagcaagttagagttgttgaagttataaggcccagtggctgagcccagaacacaaggtgaagtttggtcaaaggtaaagccagaacaggggtcagaataaagcttgctctgttgtgcattttttgttacatctgaaatgcaataagaagccaatgaagaatttaagcaaggtggaaataagggaaatggtggtggtggtggtggtgtgtgtgtgtgtgtcttcataagagtaacatgattaagtttgcattatcacaaattgtcatgaaatataaaaagaatgcttagaatttaaaaattagatcttgcttatcttgtatgacttgtaagcagattgtaagcatgtaagcagattgttcatgattcttttggaggaagttctccccagtaatgcggttactttccagcatttagcaaggaaatacaaataacgtcattttccgacagggcagagagtcctagtctaatttagtgtcacaactagcagttctgttatactttaatccttaaatattagaccaaagcagggacaatagaaaatgtgtttacaaaccctcctgattaaggtgactaaaaagcaaaagcgaaacaaaggaggttgaggtaaagagcagtcttacacgtaagcttccagctttgggactgatttacaaaccacaactgaaatgggtattatatatatgctgatgaaagtagctatgtaacatagtttggatctgtgtcgctgcacaaatctcctgttgaactgtaatccccagtattggaggtggggcctggtggaaggtgatgggatcatggaagcggatttctcatgaatggtttagcgccatcctcttagtgctgtcctcacgacagtgattgacttctcaggagatctgcctatttaaaagtgtggcgcctggctctttctcttttgctcctgctcccaccatgcgagacccctcctccccctttgccttctgccatgattgtaaccttcctgaggcctcctcagaagcagacatctgtgttatgctttctgtaccggctgcagagccaattaaacattttctttataaattaccctgtctcaggtatttcttcatagcaatgcaagaacagcccaataccctgtgtcttcattcattaaaaggctactgaactatgcctactactgcattttgcagacttgcttttcctccatttagaactaatgtcttttatttcaagacctaatgtcacctcattcttttttcatgtgataatatcctctgatgtggcctgcgagttgcccataaggaatcgtggagtttgggatgatagttttgggggtgtgtgctattttgccttcttttttcactctcaaatataaaaaggatctaagtgctactcctgaagttatttgcggggactgtttgcactttcttgcttgaggtgtggctgtggagggcaagacagacaaaagtccaaactaaatggaaaatggtgcagttattgctgagataggtttcccaccatctaattcctttgtgtgctactggctgaaaaagtccttttccttctcagctccacagctactttttcaggacagagtctgatttacatagacaggctgaatgcagaagctgtgtgtttaccatgtgaatttgaggccactgagaagattattttgttgttctgatctcttgaccttctgaaagctcccatcagacctttctcctcccaccttccaccacactataaataaaagccaacccataagcacccactcagatgtatctgcttcttaaatttcggaatcgatttgttaatctcaaaaggccgtaaaaacctgaaaacttaagtagctaacagagaaaaaaaaaagttcaaacagattcttggaaggctttgaagctaggatgcttggggagcatctttgtagtctgttgagggattagagacggcaacatcatgtcgcctcgcaagccagaggacagctttgaattgcagccaatcagaagccatagtatgtttttggaaggtggtgggggccagttttttcccttcaaatagctgacatttcgcagcccccgtccctcttggagcacgacagccagagagtatgcaatttgtttggaattctctcacaacagtcctagtttgaggctaaggctaggttgtgaacatttagagtttttgtacgtcttgacaaatttgtgttcatcaggtgctccgtgaccatcagtattgttttggttatacagaccaagtgttctgggctcagatccaaaacttgcacaagtaaatcagcctcagaaggcagccttagagatctttgaaaagtgctgaagtagggctaaatattagacaatctgccataatttaagttttatatgtatgtatatatatttatatatatatttaattcacagcagggagcagtacacacatcgtaagagagaaatctactttatgcagagttaattggatgataccctaatttgatgatacccacatcattcagtaattcagttttgcgctttctttctttttatgcttttcatttaaaaagcctatttatatgatgttgaggagtttgttaaaattagctgatattttaggatccttttgacattttatatgattataggacatggggacatgagttcagaaaaattggaaggctctcacagttgaagaactgccatatttgggagtccttggcaaagttttatgtaaactgtatgttttttacttagggagtctttataattgaaagcacccatcatactttgtgcatggacttctattcacagaatgaatttagcaaagctattgggcaatataaaattttaggatagggaaaacatagctcaaatgctatggtcattgtggatctcagactgagtacaaggctgcaatattcactcctgaagctagaaacaaacctcaatctgaaaccatgctggaattctgtaattctcttccacaaagctaaagtagaatgtgttgtgttctgttttggtctccacagtttaaagaggacttctaaaacagaggcagagttcagagatgaatttgagtttaaaaatacgattctaagtaaagatagaaagtgggtatggttgagtagaaatagaaacctgatcgtgactcatggtgtccactcaaccaaaggtagtttcctgggaagtagaagatccttcccctcaaaaaggtcagagaaaaggccccacaaatcctcatatttaaagatatcttataagagtacacaaaaatgatatagcataagagggagaaattcagagtatttctcttgctatagatgaacataaaaatatttgacatctgcggtgcctatatagaaactcaagtacatggagctctaagtctattcattatagagcattcagaaccctgggcaaaccaaaaccaaaatagtggtgtcaacccacttctttgacatgccacaactagtggcagatacctcctattctcccccttaccagggacattctcccaaatgtgtcctcttgtgcgtggctcaccactgaggtgctttgtcactcaccttctctatatgatttcagtctgactgtgagtgggtactgtgatgaagcctttgtccacctctcctaaaccttgttttaaacccactttactgaaggtgacatttccccagttattccttattcacatctcctttgtaaaagcatctgaaaccttcacgcagaagccaaagtgtgttacagttctgagtaaagaccccattaaatatgaagattctagggctagtggatctctaaccctaggtgatctctgcaataagtgcagtgaaaccatggggtcagagcctcaggaaatggtagagttgaaggccaagatctgctgattgataacttcacagagaagaaaactcaagaagaaaccaagggactgaatgaagaagaaagaaaagagatgagatggagtaccccatctctccctgaggatggaaggagggaggacagaggaagagcagcacagaggcttccaggtggagagaaaggtgtagctgttcaataatctgatgaaagtgataggaaggaatttgtgagactgtgatatcaatgaccttggacttcttaccaaagtatgaaatgcagtgtgatttttccagtaggatgatgcatagagctgaagatcttgaggaaagttgtaaaggaatggtgctatggtttcagtatgtcctccaaagtttatgtgcattggaaatttaattcccagtgcaacaatggcttttcagaggtgattaggtcatgcatgctctgcccttatgaatgaatcaatgtcattattgcaggagtgggatagttattgcggaagtgggttcctgattaaaaggatgagtctggctcctttactctcttgttcttgctcccagtttcactcttttgcccttccaccttccatcatgggataatgcatcaagcagccccttgccagatgcaggcacttgatcttggacttcccagcctccagaactataagaaacaaaactctgtttattataaattacctagtctgtggtattttattatagcaaccacaacatggactaagacaggtgggctaactattgaactgaatttttggttcacatttattcattcatctatgcaataatattcatgctcttcattatatatccattatatgtgttaggggcatgtgcagtgaacaaggcaaatgtgttccctgttttcattggtggggaatgctcttgcaagtatggtttctaaaagggcagtgttttatcccctgggagagtgttagagatgggagtatctaaaggcgctttggctcttccctgcataatacatatgctcagagttcagataggtcatagagtgaggcagtggtagagctaacagttttcatataacaaacttgcctctttttccccaactagtaagaagcattagtacacagaaaagcgttgattctggagccagactgcctagttcaaatttcagcttccaccgcttaccagctctgtggcttcgggccagtgatttaattcctcagttacctctaatgtacactgggagtaataataatacctacttcacagagctattttgaagattaaataagttagtgtttataaaatgtcttggcacatagtaagcactctatagctattgacaaataaaaataggcccttagacaaaatctagtatgtaaaaggcaacagagagcatgaattagtcggtctcaaggaaggggcaatgctactccctagaaaatatttcagaattttgtgggcattttggttgttccatggattggggaatatggtgggaaagggccagcacattcctgcacaagtttcaaatattctagcagatatttatgcagatgcaaaaaaggcattttaaaatgatctgaactacatataattccaccttatatgtaggtgtgtcagtgttttattgagctgtgaattagaagtttcagagttttattctacactggatttccaggactgtgactgccttctaaattgagggatgatttcctttgttttgttaagaacattaccaagagttactcactatttcagaatgtcactgatacaccaatcctagcatttgaatcccaatgtaatgcacctccatcaatgtgtgacactcattgtggttctccttatttgtacaagcatctcaagacttcactgtgttttctagtgaagctgtaaccaatcactaatatattgagatgcatatgctgttagaataacttgctttccttttacatcttcatatttaaatgagagtattatattgtcttttaagaaatcgtatcagtggctagacagattgcatgatgaatacattttattttcttatacgtatttgttagtggcaatgttgggactgctgtgggtgagaacttctgctacaagcaaaggccctggggcaggtttcagttagagttatagagcctggatagttgttagaaggtgggatgctctctataagggaactactgctctccataaggaaagcatttgttaaatgggcaggaactgtaacatgagcgatttagcattgtcttagcttgccaagctctagtttgttgatgtaagatactgacagttctctttaaatctttgtaaacaaggtagaagctcatgtctttctgatagagagtagtcactacacctaaaccaacagctcggatttatgtccaaatctatttacatactcacacaattctagagttaagttcgcttgctcacacaaatgtgttatttgacccatttctcccacaaataaaagttacattattagagggatacataagaatttgaattgttatatgttaaaaacttatttcttcacattgatgcatttgatatattattatttataagtagtacatgtggcccatttaaacaacgtgagggtttcataagtgattttttctttgggttgcaaactattgacaggtggggagtcaaatttgaatatctttgtgctcttgttaactaaaacaatgcctggcatacaataagaatgcaatacatctttgataaatgaatgagcccttatttgtggggtggtggatttgggaatgtaaatggagttaaagttatacattctagattctacttcctgatctgtcacttaactgagttttgaagtttgagaaatgacttaaaatcttggtatcatcatccaaaaactgcgattggtatcacatgcccaggttatgtataacatttttaagatcaaaagagagaagacagataaaaacatttgaaatccacaaagtgctaatcaaatacaggtgtactaaattccacaaaaacaacagaatcagattagggcttattcagagagaaatgatgcattcactaggggtttagttggttgaatagtgttccctgcaaattcacatccacccagaacctcagaatgttaccttatttagaaatatattttttgaagataaaattagttaagatgaggttatattggatcagagtggacccaaaatcctatgtggcatcctgataagaagaggagatgatacatggggagtcacagagaagaaggccatataatggcggaggccgagattggggtgatacagctgcaagccagggaatgccaaggactgccaggagccacagaagctaggaagaggcaaggaaggattcttcgctggagcctagagaaggaacatggccctgctgacaacttgagcttggacttccagcttccagaactgtgagagaataaatgtctgttgttcaaagtcacccagtttgtgacagtttgttatgggggccctaggaaactaatacaagtgttcattattttttcctcttctgaagaaagggacaggatcagaggtgaaataatgcttctggaaatttgcctcgtgtcctggcatcagtacaattggccagacctttatggaaatagaagcagttagcctaaggtttaaaagtactggctttgggacacagatgagattatggtttcatcactggcaacactctgggaagttggaaatcttccacttcccacctgtaaactccaagtgatgatagccatatccagtccattagttgacttgaaggttaaatgaaatattatatgcagcttgaatatatgcatacatatatcttctcaatgttaatgattattactatagactagataacttgaggcaaccatagttcaatttcagatagctctagtttataagactgtgagccaagaacttaaaaaaagaaaggtgacggttttcattttgattcaggactcgatcacctctttgtcagagcatctgaattagcctttgtcatcatgatgatgataaccaaaactggtcaattaacttcacttggctgatttgcattctaattgcaattttttttatatatcttttaagtaactgcaacttttgggcactgtttaataaaaccaagaaattgaaagtgaggagcttgaaaaagtccttgaaccttacaatttctttacagattctatatgtttcacaataaaggcaaggttttaaatctcagttatcatgagaaggctccaggctggctctttgccagtgtgtttaattgagagatgaacacgtcagattcatctctcacacactatcactatcactgtcctctctgagctcaggctgggctcttctgtcccccatcaataaataattcttccttaggtttaaaatctcaaatagcaacctaagtgcattaacaaaatatgtattatataagaaacattcagagaagagaagttcaaggtcaaagctaaaatttacacagagtttcaatatttaaatgggtctgaaaactccatattccatagccctgtacatttacctatactcctcaaacatctctttgcataattacttatgctgaattgaagcaaaaacatcaaaatgtctggaaatttaggtttcactttccattatttttccaagaacttttagtaaatgttttcaaaacagctttaatactatatctcatcatatagaaatcatgcaatcatagaggctcatttacatgcttcttggttccatagtggttgtatgctaattacacctacatactttctgaacctgacaagacagtgtttataatttggcttcaaatgctaatatatattttaaagaaattcagatggaaaatcatctttaaaaacaccttattcacatatttaccacgatcagtgcttgttattaatttctgaagttctgagtttcacttctcttcagcctagcttcctttagcatttgccattgtacagatctgctggagaaaagttctctttattttattctgtttaaaaatgtctctacttttccttcatttctaaatgatattgttttctagatatagaattctggggtaacgtagttgtttcaatacgtttatgatatttgtcaacttattgtgcctgttgttattaatcactcaaattcatagttcatgtctaagtaatattttgtattactctagtggctttcaaaattttctctttacttttggttttcagcacttatactatgatgaatctaaacatgaatttctttgtatttattctacttggtttttgctgagtttcttcagtctgtaaattcatgtctttcaccaaatttggcaaaattttgttcatttcttcaaatatcttgtcccactctctgtcttctcttcttttgggactccaattacatgccgttagacttttttatgttgccctattttacattatttttaataattttgttcaatatttgtcttcaatattgtaatcagatgcaaataaactggctttctcaaccttaattacatcagccttctctgtgaaataaattcaatcctttattacacagtttttttttacaacagctattcaacaaatgtgtatgtcatcctttctgtaaatgtgtcatggtaatagtatttgattagctaaattatcatttcactcatgagtgattacctatgtccataggtctactgcctgtcctaaattgaacagttttgtccacttaaaacaagcaaacttccactgataggtaaatgttccaactttactgtagcttgcagcagtgcctctgttaagtggaattctatttctgccacagcatcaataagctttcctgtgtatgtcccatataaggacctggttgcatttctattatggaagccatagttgccctgctaaggagtcttgccctttcagggaatttgtgcttcagataaactgccaaaacccaggccttctttgaacatttatattgtctcacagctctatttagaacagtctgtaagatcactctgtcctgagtaagacttgaagactcatttttaccatcacattggataataccctgcaagccagccctttggaggaatcaaaattgaacaatcaagcctgaggacttgatagagtctcaactttgactttttagttttttttctctctctcaatctttttctttcttagaaaatagaaaaatgactgcttactactgattgtaatgtgtctcaacttttgaaattcagccttaaacttgttttactgtgcacatttgcttttgttgaattaagtccaggtctcttcatttcccagggcaaaaaatcttggttaaattccatgggaaaggattgtgttttgggtatgtaaacatctatccaaatacttgtagaattcaaaaagagcatacattcttaagagtgactcagttcaaacacatgcgtgcagattaaacgtcttctttaaggaagcatatagttaatagttttaaaaatgaatttccccaacctgattcaaagaactctcattcttccagaataaaatatatcttaacttcaagtgggataattggcctcacccctacagtgcttgcttggcgtctagcaattatgcactagaaagcacaaaagggatagaattaataggtaaattttagtgagatttggcatgtgtgaggttaagggaatttttcaaagttgcttataaagttgcatacagtttcaaattgttttcattttgagttattttggttaaaaacagaaaccacattttaaacaagcagtctgcttaatgtaaaataaacatgtaacttaatttgcacatttgttgggtgcttgttttggaaatcattgtggtaaaatggaaataatcacagaggcttctgagccaggtagatgtggatttgagtcctggcttactaattctgtggcatcgggtaagtttctgagctcttcttagccaccatttctttttctataaattaaaaatgatcgtatctatctttaagggtggattagagggttaacagttcagcacccacagggtttttaataagtactttgaattttgagaatagacaagacctaaacattaaagtattttgcttttgactaataacgtctagattattagtctaataacttcaggctgttcatagtgatcttgctgggttgaggcaattgagactacattttgaaatcttttgttttgtgaagtatacaccacacataaaatgcataaaccataaatgttaatgaatttaatagtaatagacacctatgtaatcatcacgcagcatatcagctttaaaaaaaatttttaaagaactttttgatggtattatagcaaagatacagaaaagtgaacaaatcataaagtttataattcaaaataattttcacaaactgaacaacctcataaccattgcctgatcaagaaataagacatttctggcaccatccccccgcccaccacgccacccctagaatctccgtgtgttctttctattcactatccatcctcaccaaggtagaatattctgacttcctctcattagatgagtttcgtctggttttgaacttcatatacacggaatcacagtgtgtactcatttatatcatggcttcttcagctcattatgcttgtggtattcattttttaaccactcattatggaaaatttcaaatgtacacaaaatatgagaaagtatagtgaaccctaatgtgtccatcacttctttaaaaccatccttaactcataaatactttgatctaaacaccgtcttaattctctgctgtccccaaggcaatggattattttccccaaacatcctatcatttcatccatgaatattttagtaagtatctcagcaagaaaaggattctttttgtcacatctacgaacttaacagtaattacatgttttcaatatcctatcttggatcagcatttctccattgtgtcataagggtttttttgttttgttttgtttcttctgttttgtttttttctgcagttggattttttacaatagggtctgaatgaagtgtgaagataccttattttaaatgcctaattgtaaattgggggagagtcccatttatataaactgagtctttgagttctttatggctcatgtgaagaaacaaacatcttgcatattttccaattaaatatgttgaggcttatagtattttagaatattagaattcgagataatcttatagtttcttgatatcttgtgtcttggcatacttggaatcccctctgtgttttgaaagtgaacttttagcttcaccgactttttcacctttggtattatagagtctactttctgctatttttgctctcttgatttacctgccaagtggcaggcacaatgggcaattttagctcagctcatctgaagaaattcatcactgagacctacaaaaattccttgaaaggaacagagaaagccaaggttgttctcactttcagttctcacttttgccagttggatgggacagtgactttaaggatataacaatacagctgacacgattaggtgtttgtttaaatgatttttcatttcaagtttatctttgtttaagctgaccacagcaaatatttgatgttaccagttaaatatcttgcagtcttttcacgtttaaaactttttcagccttaagtttctgccttcttatttgtaacctgtacaagggttttcctctctgtctcttccatcacgggatggtgtctaggcacatggtaagggccatcttgttcttgcagttgtcactggttggttgagggctcttatattgtttaatgtcaagccaggtcttctgtggttattgaaaattaagtgtcttttgcaggtcattctcacacccctgttgatgatcttcactgttgcttcgagccataagcttacctttcactgtgaactctggccccaaccccagacctacttctgtccactaatcctacagcttcccttggtacttgtgcactccctgctgctttctctccactagctgtagtgtgttggaccctgtgaggtcacctttgcctggtcacctccctcacgtttgccatttgactgtgcccaggtcatactgagcacactgccaggaggaaggttgagcttggaggacatgaatgaggagaagctgggggcctatagcaatgattttagaatcattgattcaaagttggatgctttcctcatatcttctgcatttccctgaagaagtttccaggacctctctatctcctttatattataacctcctacttccttctccatggcttgtttcagtcttccagaattgacgcaatgacttcctttaaattaacaggtaatgtgaaatagtctagttgccaaattaaagagaaatgaaaaggagcaagtaaaactaatttttttttttttttgagacgaaatctcactctgtctccctggctggagtgcagtggcgcaatctcggctcactgcaacctccaccctctgagttccagtgattctcctgcatcagcctcccgagtagctgagattacaggcacctgccactgcgtctggctaattttttgtatttttagtagagacagaggttcaccatcttggccaggctggtcttgaactcctgacctcatgatccaccctccttggcctcccaaagtgctgggattacaggcatgagccaccgcgcccggccaagtaaaaccaatttttaaaatatttttatttagcctaaaacatctgaaatgttatcatttcaacatgtaatcaatataaaaatttattgagatattttacattctccttgtcttctttttttgggaaggaatgggtacagagtctggatcccagagtgtgtatttttccctcacaatacaccttagtttggaccagccacattgcaggactagaggctaccatattggacagaatgagtctaggtcatgaatgaggaagcttctagataattttaagagaaaagcaaaaacaataaataaactcttaggatggtgcggctttgcctgtctacattagcatttcattaactccaggtgcttgtttcccactgccacttggtatgtaaaatttgtcttccactcaaccaggcagatttttgatcacagaaattaagcctctggtttcctctcaatccacccaaacacatagcatactgctgacctcacagcaggtactccagccaaccaatccctgaattaaaaactgattacaggcagctgctcgatgccttgccacttcccctctcagtgagtccattttatttgtctgacagcaaagctccaattctgtcttcacccctaccaacccacacttttacaaattgctttttagcttaatgttgaaacagccacgctttaaaaatatcatttcattatgtacaggttggcaatcaagaaagaaaaattcccataggactcaaatgaaacaaatctaaaaatttaggactgaagctcgggaatggtcaatctgattttaatgctctcaagagtccacataaaatatatgggcttagcaaactttctgggaaaacccactcaaagagatgacttattgatgcatggatgaagcaagagtgactcccagattttatccaaaaatatatctaatgatatatgaaaatgatcattctagttaaatatattctaatgatttgaacatatctaaataagttggttctatccctcataaaatctaatgacaaacttcggagacttaaaaagtgtgaaaaataaaagtcgaattctggagggtaaggcaggagaattgcttgaacctgggtgggggaggttgtagtgagctgagattgtgccattgcactccagccctggcgacagaagtgagactctgtctcaaaataaataaataaataagataagataaaataaaataataaaataaagatgaataacaatcggcccatacaatttttaccccagcaagaggatgtttggttaaatggccagcactgattattcatacaagtacccacctccccactatctcatacacccactcagtcaccaacctttatagagcacatctttttaattcccctcaaagctgcactttcctctctgttccttgccatccacctatccttctggattgctggaatggcctcctgacaagtctccttgccttctctgtgcatccccacccccgcatttgtcctccaggtcagtgtttcaaactctggtttctgttttgtttcgtttctgagactgggtccttcacccaggctggagtgcagtggcatgatcatgatcacagctcactgcagccttgacctccctggcttaagtgattctctcacctcagcctcccacagaatactggaattacagatgtgcaccaccacgccccactaatttttttttgtatttatttatttatctatttgtagagacaaggttcatgttgctcaggctgaactctccacttgtttttcagtttttaattttttaattggcatataataattgtacatatttatgaggtacatagtgagttttgatacatgtctagtgatcaaatcagggtaattagcatatctatcacctcagaagctcacaatttgttttgttgggaacattcaaaatcctgtcttatatatatttgaaaatatatacaatttttgactgcagtcatcctacattgctgtcgaacactagaactcattcctttcatctagctgtaattttgtgtcctttaacaaatccccccatgcaccctccccgctactcttctcaccctctagtagccactgttctattctacttctaagagatcaatgtttgtagcttccgtatgtgaatgagcacaagcagtatttatctttctattcctggagaagagcaggctttttcctgaatacattgctgtccaatattactataaaacataatacacatgaattattagaacaattaaatgagaaaaacccaggcatgcaaaatattaaaaaatatttaaaacattattttaaaaatttaaataattattaatttaaatagactaaaattgctctctcaacttgctctgtaagttcccatatttactctcagtttctgtacttatcttcctgtgagattttaaaacagcttggttcataattcaggtagcactgatatagatccacagtccaatactatagccagtactcacatgcagatgtttaaagttaaatttcaattagtttaacttaaattcattaaaaattcaattcctccattgcattagccacatttcaggtattcagtagccatgtatggctagtgataactatattggacatcacagatatggaacatttccatcatcgcagaaagttttattgaacagtactgctgtagacccttgctacttacagagtggtccatgagccagcagttcttacttcacatgagagcttgctagaaatgaagaatctgagctgggtgcagtggttcatacctgtaatcccagtactttgggaggccaaggcgggggtgggtcgcttgagcccaggagtttgagaccagcctgggcaacatggtgagagcccatctcataaaataaaataaaataaaataaaataaaaataaaataaaaaaaataatttagccagatatggggacacacacttgtagtcccagctacctgggaggctgaggtgggagtatcacttgagcccaggaattcaagcctgcagtgagccatgatcacatcaccacacttcagcctcggcaacagagttgcgacttggcagcaaaaaaaaaaaaaaaaaaaaaaaaaaaagaaatctgaaaaacagaaaacaaagtaggcctaaacctcttgaaacagaatgtgcaattcaataagtttcttaggtgactcctatgtactttaaaagtagaagccctactctgggatgtttctaggacaatctaaagtccaaatctgatcagactatcctactaatccttttaaattgatacataatatgtgtacatatttgggatacatgtggttatgggatacacctgatcttttggtacatgcttagaatgtgtaataatcaaatcagggtatttaggatagccataaccttcaacatttatcattttttgtgtgtgtgttggaaacatttcaaatctctcctagctattttgaaataaacaatatatacaatgtatcattgttaggtatagtcatcctactgtgctgtccaacattagaatttattccttttatctaactgtatatttgtacccaccactaatctttccatagcttgcaagaccagctctatctaaagtggtaggtattagccacatgtgtttatttcaatttcagctaattaaacttaatttacattaagtttaatgtcaattaaacttaaagtttaaaaatcatttaaagttcaaaaattattttcccagcccgccagtcacatttcaagtactcatttgtcgcatgtggctggtagctactgagttggacagtgtagatacagaacattttcttaactgcaagaagtttgattgcacattgctgatttagactctagtttaacatccagagatctcatcatctagcagaactaccccctgcctacctctcaagcccccaaaccatggtgcaccaggttggcccttgtctctaacacaatgagttacgtaatttagttcctatgcaccatcaccctcattgttcctttaccttgaccactatttttccattcccttctttccattcacctctccataatcttcaactaatctctgtgtcaaaatttacctcatggtcagctgctccagaaagcttttctagaaaccatcccatgctgcaaccctgccacaatttagattgtcccctttcatttcttaggtagaagcctatgtatgcatgtatcacatgcttttgctgttgatttattctctccatttagatcagcatttctcagcctcagcactattgacatttggggccagataagataactctttcttgggaaagtagacagctgtcttgtgagctgtaaaatgtttagtctcattcctaacctctactcactggatgtcagtaacctccccagttgtgaccatcagaaatatatctgcacattgtcaaatgttccctggggagcaaaatcaccaatgcataagaaccactaccttagacctatctgttttctaaggagagcctcttgaggtctgtgagacacttcaaaccacagcatggtacataggtcctgcacacaattggcactatgttggtatacatgctgaatgaatgattgattaggaaatctgttgtcagcaggtgtttcttctttccttgcatcctttgtttcttctttcttttattctgcttctttgcacgcattcccaagtctaagcaacacattcccaagtctaattctatttcatgagtgaacccattgaccaaacaggagagccctgtgcagggcagtcattgatcataggtgtctcccgtggccagttggtttggttggctgatccacagtagagggatagacaaaattatcaacctcttaaaatgaagactgggactgggaatgaatcagatgtaacagcctccctgtgatgctcagttttattagctattttatatatactgtatatatgtatgtaaaatagctctatcttatgtaactattttatatagcttttagctatgggtcagagtcgccaatctatcatcttttcagccagctgtcaacacatggtttcagaatttggaagaaacctaaaagattatgcattccagcagggcttggtggtgtgcgtctgtagtccctgctattcaggaggccagggtaggaaaattgcttgagcccaggagttcaaggctgtagtgcaccatcatggtgcccgtgaaaagctacagcactccagcctgtccaacatagcaagagcgcatctctttaaaaaagagagagagagagagagagagagaaaagatcatgctttcagattcctcatttttttctacatctggacactttccttaggtcctactccagccatcattagcatcttaagataaagatagaattttgaagttccatcatttataaccaatcaaatgcaaaattataagacagtgatattcttgatttgaaagctgtaaactctgatgtctgctgctctgctcttcactagtaagttccctggcactagagcaatgttataggatggtgacctagtttagctctaccgtatttctcgagccaagtagagaagaactggaagttctctgccatccaggcctgcaacagctttggagtctctcatttgctttgctcttcttctatctggaatcctttcagaagcctgatcccccacttcgtgcattctgaaagtctgggccttatagtatttgtgcttcttgctgggcaccatttctgcccagtgttacctgatatgtctttacacacctagctctaattgtcctaatattggcattctcttgttttggactggaggaaagatggttaagtcctctctcctttcttggtttagcacttcttgcaatgtttttctagatttgacctacctttaatctctgcaggcatggtccaatacccttctagcagctggcgctggcattgcaatgtgaatctgccactatgctatgggctgggctctaagtggaaatatgtatacattttttcactgcaaagaatcagctccctctctcactccaggagatggttgcctcagccctgtcacactcttggtcctaggcagctttcagcttcctctgtaactcaaccatatggccagttagatggattgagagcatgaccaccaaatcacctgggatcctacttatcacaaaaccgtgaagctttgttacagtcatttattcaatcccatcaaatatttatcaaatacctgctctgggatagctccagtggatacagtaagatgtcatattcatcaattgctggtcatctaatgggaataataatgaagcaaaaacatgattattgtacagtgagaaatggatatacaaagggatatggaacacagataagggggaaatcagagaaagacaataagaatgaatcctttttagtaacagtgtactgtgtgccaggcaaggtgcttgtaatttctatatagtttacatttctatttaaagtctcataaccacttggtgaggcagacaggcattcgaaaatagcggaaaccctctttagaaattgataacttggttaagttgattatttttttctttcctttaccttttcttgaaatataaaatgcagttaaaaaggtacactcttctaaatagtatagctcagtgagtttttacaagatgagcacatccctgtaaccagcagtctgataaccacattaagaaacaggacatttcctgcatcccagaggtcctcacatccccctaactgcaccctcctcccaccaccctgctcccttcctgaattctgctgcctctctacccaaggctaatcttctggctttaacagcatagataagctgtgcctgttttattcttacgtcaatgaaacaaactcatctactctttttgtgtgtccacattttttcactcaacgtggtgtttgtaaaattcatcccacattgttgcatgcgattgtaatcctcattgctgtataatattccattgtgtggatgttccatttattcattctactgttatgggcagttggatagtttcatttttggatcatagttcatagcattgctatgggtattctagtgttcatattttcttgcacacatgtaaaaatttctgcttggtgtgtgtcttagagtgaaactgctgagttataggcatttgtgggattgaaggtggaatgggaaagagacgtatgcaatcagctcacgagctggtgacactgctggtaaaagggagtgcctatacctagctttaatagatattgccaaatggttttccaaaatggtttaaaagtgttgagttttgaggagcatgcaggagttaaccagaaggttaaagtaataataataataacaacaacaataataaaagggagcagggtggagttacagaaatagtgttacagaaatatgcagtgtatgattgtcaaatttggttgttactggttagctgggtgcatgaatttgcaatcctgtcatgtgttcattttgcttattcttccctgaaatttccagccactaatggaatgtaacactttaccctttttgaacttcttccttctcaatgcagtaccacattaaaggtcaactgtgaaatttccacgtcctattaaatactattcctagagctggatataatatttcagaatgctacccctgttccaagacatacgcatactttagtgaacatgaaattctgtgtttgaatatccagatttctttttttgcctctattgtctttgctttgactttgtggatttggcaatggttgataaattgttttagagtagaagatcactagattagaaacagtatttaactaaaaatagacctcttggctgattatcagtgtctcaagagacagtgtgagtgaatttctgtttctttttgccatgatgctaactgtcacccggaatataatgcttactggcttaaccccttttgttttttatattatgtttagaatgtgtatgtctccttgtaagaatccaatttgaggggttcagaaacacatagtgaatatgcctgatgagtagtgatttttcaataatgatttttacatgttatgtctcctcaaagataacaacagagcaccatgttgcctaaattcatgtaacttccttctgggttaaactgtttattggacatttctgaatatatgcaccatatgtggctatctttcaaagtatgtgtctgagatattattcagagccttttccagccatttagagatatatgtggagcttagagagaataaaaatataatgtgcattatttactagtaattcacataaaatattccatttctaaagcatgttgcagaattattctactggtaaattaagattgaagttgtccttagataatagctagcagtataataaaaataccacataatagaaattgattctgaaatgtaagaatgttttattattggaaaatatatccatataattattacttctacagataaaaagaggaaagccacatgatcatactgataaggcaacaaaaagatgtgacaaaattctaataattttaaaaatctcttacaaattagaaatagtaagatgctatcacaaaccaacaacatcatacatgatagtaacattcttgagcatgtctctaaattgggagagagccaaagttattcgtgcacgtccctattattgaacactgcttaataaaatgaattaagcactataaatattagaattgtcattttataacttgcgtatgagatgactgtctaccctgaaaaaacaagatcaactaaaatgttaatcccaaggaagagttcaacacggaaattatttctaaaatacttttataaaatgagaaagttttttatgtccagtaatcaaaagttagtgaagctgacattcaaaacctcaagctcaaatataaaggacctatatttaaaaaaaatcttaaggcgtgtataggattcttgtattaaattgaaactctcaaggcaatccaaagtagttttaaataagtagaagcactatatttctggaaggaataatattttaaagatacatgttctttccaaattaaattactacaaattcagttaaagttaggaaggtgtttttcaaacttggaaaatgactcaagttaatttgaaattttttgaagaaactactaaaaaatgctgagggaattatgccaaccaaaatttcaaatatagtgtaagacaactaatatagcactctattgatatggaaatcaattcatcagtaaaacagaatagaaagttcataaatacactaattactataaaaaataacacaggcacagtgactcacacttgtaatcccagtaatttaggaggctgaggcaagaggatggcttgaggccgggagtttgaaatcagcccagataacatagtgagacccctgtctttacaaaaaattcaaaaaattagctatgggtagtggtgcctgcctgcagttctagctgctcgagaggctaaggcgggaggatcgcttgagcccaggagtttgaggttgcagtaaactataatctcacaactgcactccagcttgggtaacagaacaagaccccatctcaaaatattaattaattaattaatataaaataaaggtactaaatcaattgggtaacacaggattattcaatgagaggcagaaactacaaaaggagagtaaagacaaacttgatagcaccattatttaaaaatacttctacacaaaacaattcacaaatgccaagtccgaaccaaacaaactggaatatttttgcaaaatagatgacattttagaaactttaaatccttattctgtactagcctttataaattaaagaataatagaaatatgggtaaacgatatgaatgggaaagtaaagtcccccaaagaaagaaagaaatgcaaacacaaatagatatgagaaagttattaatttcagcaataatcaaagaaatacatactataacaataattattttcacccataaaatttcccttattttcaaaactaaaagttccagtggttgacagtggggaggttaaataccactccaaggtattttgcagataatttacattggttcagcttttctggtagcctttggcatatttatcacaagcatgaaagtcctcaagccctttaattcaaaaattttatttttaatgtattattctaaggaaattataatgaaagtaggcagacattgcaaggaaattgcttgtagtactgatcaatagtataacaaattgaaacataaactgtaagtattcagccaaaggaataaattaaataatcataatatatgtcaatagtggaatcgtaggcagacattaagaaagctgttaccaaattaaataatatataaatatgttcatgctctagtgtcaagggaaatatgcagattacaaaggaaaatgaacaataagatcttattttttaaaaagaaaaaatgcccagaagtcatatggacatgcacgaaagtaacagtggttttctctgtcttgtgtgattataaatgattttaatttacttacttgtacttgcctcacatttgcaagtgtttttctacagcaagcatatattacttttataacatcatgataaaaatcatatttcattgtattttacaatggacattttgttttctaaaatcagaaagcagaaatgaaataattataactatatcttaattcagagtttaaaggagaaatctccatttactggtttccccattactacttaattggctaatctagtttttcatttaccctgatgtagacacaaatagaatctgcaatataatcaggcaccaaccatgggattaattagctaactaattacgtaaatgggatcccagttttaacagtcatacctctgcaaaaattgtctttttctttgcaaaaacaatgaagtgtcaacttttaaaaaattaatcctgccaacttcttataaaaagattgtgtaatgtcttggggaaagatttaagatatacaagttaaagatggcctttgaaagacagacagatttgaatttaatatttgactcttttctaagaatttaaaattattctcaaagacgaaaatgaatggtctgaaactcaacgaaatcttttccatgtgagttatgcactcatggtgtccctgtaggagttagagaggtgaataaattgaacgagtaatgatttgtactcttaaacttcctggaaggagaagtggcttggagggtgttggtgggaatagccaaggtatgactgtgatttcaggtaagataatttgaggagctgacaatttacctgcgtggaagtatccagcaggcatttgggaatatgtaattggctcctgaatcagacatgtcagtgaggtgatactcatataggagtcagttacctaaaagtgacagctaaaccttatgaaggcaatgaattccaggttagtgcagagcctctgcacagttccaaacccaggggatgctcttctcattctcttatctgaagttaagctccagggcttatcattcacataaactacattatgaacaatgctgtttccatctctctatcatgccagatgtcatatactagatgaggtctctcagaagagctagacagaagtataaggactcacctttatatatacaaagtgaggaacaagacaatatgtacaaggactcatattaacatatgcaggatgaaaggggaaaaagaggtcagttaattggttttaaaaaaaagatgaaataagacaggctcaaggaaaacggaaagggggcaaaattgcgggaagtgtttggcctgtggtttcaaatgttatagacagacctgaggcaatgataactgagacaagccactgggcctaaaagtatatagaaatgggtaatcttagggatggtggagtccattgagtaaatgggtggctggggggaagacatcagaccccgagaagcagaagctaaggcctggggaggaatggaagactatggacttaagagtgtagcatcattggtcgaaagacttttatttatatttagggagactagagcatgtctttaggtagagcaaaaggaagcaggagagaggggaacactgaaatacaggaaaaagaggggatagttgagtaaacagaaagaaccctaagtgaaagcaggaggagattggagcagtataccaggaccgggatgagccctggaaaagagaaggagcacctatttctcagagctaggatgagactgaggtggacagggaactaacgccttccagaacagaaatatgtggtccgatgagtattgaatgcaacttaaaatctagttggaatgtgatggataagaagagacccaaagtcatcaacaagccttctcatgaactttcagtcattaaccttcctatatagtaaggacagaaatgatgatttaagccatcttaggcaaggcagtgctaacaatatgcttttgtaaagtcaccatccggtgtaaggaataggcaccagcttagtgatgtttgcaaataagccagtggtgggtgtggataaattagagagagtaccaaatgcagtttgaaaagtgttaagttttgtctctagtaaattgcatgtagttttaccaaatagtgcttcagtgttctctttgtgtttcctctttctggtacttaaaaaaaaaaaaaagtaaagtcagttcatgtagctgtgagataaatcttgagaaaaagagtattgaatagggtactgagtttattggttaacacttaggaaagatacgatgcttgataggagatcctttttattaaacacaaagaatagcattttattctatgccttagaattttgtgatagaattggcaacaattcagttcacaaagagccttagcactgtggccactaatgcactgtaaaatgggtttttgttgatgttgatttggaggctgtgttaaatatcttgcccacagctctaaggttttgggtacaaatctataaaactatttcacatttatgctacttccttttaagacgataggtaattcccaatgatttgcttataaatcagttatggtttacaaagcagaccaagagacattcagatttctgaaaacaaattatccatagttttctattaaacatagaactgggaaaagacttagtgattacttagactatgcctctgatttttaaaacgaattgtaattacaaccataatctatgattttttttcatgaaaaaaaacaaaagctgtgtgaatgaggtcagtaacttcctcaacacctctcagtctcccaaacaacaacacaggttaaccgttatcagtttgctgtgaaaccttccaaaattttcatgatattgacacacacacacacacacacacacacgcacacacacacacatttgcttaatatgcagtatttaatgtatgttcaatacatagcatttttttgcattttgctttttatacttagtgatgtatcttagagatttttgcatatcagtatgcctagagctacttcactatttttatttgatgcacaatatttcatcacatggatgcgccatcatttttttcactttctccttaaatggatatttggcttgttttaattttttttctgttaccaatgatgctggaatgcacacacctccttgtgcataagtattggccttctttgggatacatagggaagcgtaaatgcattttacattttaagtggcattgccaacttatccttcaagatgatagtatagcagccttttaattttagaaattaagaaggttaagaaggtaaggcacagagattttatagcttgccagatagcataacaatttaggaactagaaatcaaatatcctatttcctttatagatttctagtgtctacatcaaattttttccaaatttataaaagaagaaaataatgtatattaaactagccccatgaaattttgcttcatacttttcctattctttaccagcaaagcaaaaccagttctgattggtcatttaaatcaatgagttgaatacaaacagaagtataattgccaaattatgggttttgggaaactatggtgaacacgagattctttacttgtctgttttaggttatttttccaggttatgtgatcctgtgatcacatatctgccaacattttcatgttttgggtatttcctaatgtaattgaatttctcctggtttagaaatttatcaacagaatcatctttatttcttcccttgatgtattcccaaatgtaagaaaaatatgcatagtgagttgataaaaagaatgcaagtaatctacttgaaaaattaagcctctactttccaggaaagataattttaatggggtttgggttcattctctatgagtccttctctatcctaatgtcatgttgggtcacaattgtctgatgatcctggctaagcatttggttaacctcattttgggtcctctttctctcttcacatggaggagcacagcacttgaacgctctcgtgtttgaggacaactgggctgacatcgagtgaatttttggaaaactattatgtctttgtagtcacttaatgtcagcttgatgttgaagcaaagttctgtaggagtaaaaaaaatacaagaagtgcaatgaaatattaattaggcaccgagtagaggcaaggagctgggctaggcatttttatgtatgttatctaatctatgctcacaagacttacaacccatgttgtaagtcttgttttgtttgatttccgtatcaggaaatggaggctgagaaagagaataacacatcaactagtatacacagaggttctctagctttccctacttctttctaccacccttcctcccacctcagtagaaatcagtgaacactggagcaaagaagtcctcttggaagaagcagagttggagctaagtcccaaaaggtggctgagatttagatgattgaaggaggagggttccacatttaaagagggagagtagtctgtgtaaaggcacagatgaagacaggcatggtacacacatgctttcactgggttaatgtacaagaacagagctctgttcaactggctttgggaagtataattttggaggataaagggcattggcaagaaactcattggggtctcatgataaacagccagatattaggagtcaggagctagaaggactccctgtgtctctccagagaacttagtgtctcttctttctcccttgaccttcctgctacatgtttctgttgttgttgtttttattttttttctctctgcagaatggcttatttgctctacccagcgtgtggtcacatcagctgcagcaaagattccagctactagcatcactaggcctcagtgccagattccacgggccagatgtctatccctggtccactcagctatgatgaggataatgctttcagattcttgtttacctcagcctgggagcaggttcttttatatcatggcacaagcagctcctctaagaaggcaatgattagtatttgaaccacaaggaacaggagaagtgaggggtcaatgtggtcagacttactaaggagtacttaaaggccactgcaaaaccaggcacctgatcctctaattgagaggggaagtttgcaagggaaaggtgtttgatatatggcaagttgaaagggtggagaggctgagcgccagaggtgagctgaaaggtaatggtaacaatagaggcctagggatacattagtcgacttagagagaaaagagaggaatggcaattgctgaggatgcaagaagttaccttgaaagaaggaaaagcaggatttattgactggttataaaggcagcttttagctccagggatagggacaaggttgtgtggctttgggacataaagaaaggagaaggaggaggaacctgaatgtcaggagagacataatgcttctggtttggaaatgtcatctctggttcaattgtgctatgggaataatggccataaggctacaaatggggtgtgcagagtgaattggataagatatgaagctatgttaattggaagttaatgagatgagaagtggggaattttggagaaaaacaggaagtcagtggccagtagcctcaaatctaaatttgcatcgttacgggcatgctatctgtgggtttgtgataggatttcactcagcttccaggtggctaggtcatattatcaggtggtgaaacagttaaaaaatatcacgacctaagataaagttttggtgtttgctggagcacagtaataacagatgagttctgttcggtagggaaaactctagaagcaagcccagcacttctgtggataagactgattctggaacctactttaaagcttgtgctaggcaaatggccgatgattcccaatgcttgccttagactacaaatgcaaagaggaaaaggttaattttctaacacaaatctaaatatttccttcttgtactaataggacctagccattctgtaatgcaggcaacataggtctgaaagaatggttgtattttggccaaaccatgaacttctttttgagaccctgccagttcctggtggaagccaggaaatatatttttaggcgtctataactccggctaagggagctatgtacctcctaatggttgtcatccaatggatataaatagaacctttaaagagacaagccatatgctttgtggtgcttactttatttaactccagatctgatttacaagcactttaattcctaaaaaccactctattttgttcattaagaatatgcaatgcacataggaatgctttgtaacttggctatggaatcagagatcaagaatattttcctccccaaaacttgtgataaggtcaaatgctaaaggcctatagtaattgtttttagctgttctcttagaattgaaaacaaatgttttctaataccaccaaagtggtgtgctgttagtaatgaatctgtatggcataatttcagtttcctcataatttttatgcatgacctcaaaattaaatgtggttctctaattttttaataattgaaagaataggtttttactaattaagatcagatttatactcttttgtatcagagaatgtcatggtgaaaattaatataacaaagtcatactgacatttactttagatcagtgtaaagatatactacatgtccactggaatggcaaaaattgaatgactggcagtaccacatttggcaaagatatagataacgagaactctagtgcattgctggtagcagtgtaaattggctactaccactttggaaaactatttattaatgtttgtctgtgccctacatatatctactgtatcagtctaagataaatgatcatatgtgtccactagaagatggttacaagaataatcatacagtcgtatttgtaatagccccaaactgtgaacaataaattatttatcaacaattggatagataaacaaattgtagtatattcacaaaatagaatactgttcagcaataaaaagaatgaactattaatccatgctacaatatggataaaatttcagaaatgtcatgttaagtggaagaaataggacacaaaagagaaatatgattccttgtatatgaaattcaagaaaggcaaaactaattgaagctggtagacatcagaagagtaacccactctcttcctggggagggtttttccaggaaaggggtgcctgataattttggagatggagatgtctaagtggtgctttcatgagtgtgtacatatgcaaacactcatcccactgtgcacgaaggttagatacttccccatgtatatgctataccgcagtaaaagtatgaaatatatgttttatacctcaaaatgtttcacaacacattattttctcctttccaattccacagagaagagagaggctaagtctagtacaaaaggttggttctgggccaaactggagaggagatgatgcaatggaagtatccaggcaaatacaaagggattttaacttgtctgtgtttattgcaaaaaaggaaatttgttatattgtgaaaatagtaaaatagtgtggcttaggagaggttctattttggagggggggatgtatgacaagtaatatttttatattttatatcatatccaattagatacattgaagaagaaaaaatgtgttttaattttaagcagagtttttacttttaaaatgtttatatgtatataaatatatacccactcttgtaaatagagccttatgcatgcttgtggagcattttggtgcagtcttttttgaaaatgttttccctgtttcttctacctcttttactttacctctctattgtcacaacctatgtgtgtcctacttaatatgtaagctcatataataaggcatacttatcacataaatatgtgtgtatgggtgtatatgtgtacacccacacatactaacattcatagataagtacagctttatttgtctttgtgctataaaaatgatattatagtatgcaaacttccctgcattttgcttttattcacccagtaaaacttcatggaaattcctgtaagtcaacttgtatattatggtggcccagtagtccctgctgtagatatagcataatttacttaagcagttctttgtttataggttttggttgggcaaggtcttttgtgtactacagtgagaaagctttggcctcagaaacagcaatcagagtttgtcacttagatggtctgagcccatgtctcctcatccatcaaagggagataaatttatacttggccactcacaatacagagcaattataagaatcaaaaagactatatgtaagagtgtatgcgtttggtatgatggaaagagcattgccattgttaacaatcaaatttgtttgtgtttagtacttgctgtaggtgaggcactgttctaaggtcttttcatgtatttatttaatatttacaataacgaaatgtggtactgtgtagtattattcttttaactctttccaaatgagggaattaagaaaaaattgaaataattttcacaaaatcagcaggagacctcagattcaaatcctggattttccatttgagtgtctgtgatttttatctaccatgcaatattacttctcaaatatgatgttcaccgtaccttttattttgtacatgagcattcattggtaacatgaaatagggtggtttataggagaatgatctcattacattgccaatcataaaaaatactaaaatttaaaacacaaaagacatgcatcagatagctatttttgtgcaaaagccatcccaaaatgtagtgatttgaaattacaactacatatttaggctctgattatgtgatcatctggtaagggcttagcagcagggttcttctgttgcatctgggctcattcaagcatctatgataagctgctgagtcagctaggttgctttgctctgaagattgacttcagctatgaaaataggggcaattgagccataaagcgcttatcctccagcaggccttttcaggcttatgcacatgtaggggtatggtttcaagagagaatgtagaaacatgcaagaattcttgaggcctgttgttagaactgacacagcatggtttccaccacattttctgttaaagcaagtcacaaagtgatctcaggttcaaccacctgatgggaattactaccaggacacatagcagaaggcaaagaaagaggttgaggaataattgcagctatttcattcagtgtaggaagcaaagcaaaataaattttcttactaccttatttaattcatcccatagagcctggacactgattttttattattactatgtaagtatgtgtgtgcatatgtgtttctgctgagaataccttgtacatagtttttatcttttaatttgcaaatggctggttttcttttctcggggaatttttttctgagatgaggatttgcttcctctgaatgactaagctgaactgaatctttccactctttagagctaccctcatgctcttgaagtccttatgtctgcaatgattttaatctctatttctcaggtagccagaagacaggatattatactgtggttttccacagcagcaggtctgtttggctagataatcaaggtatcaaaactaattctttaatacagatggcttacaatacttgtgaattgcattttccaaggagcactgtcatattctcaatattaccacacttcctacacctttagcatcctctctcaatactatcagttcccaaaacctttgccctattgtgccaagaaaagacatttatcagatgagtaaactgaggcataggaaatatctatcagtttcataaagggttcatcacctgagatgcatgggtttcttatttcttggccctcagccatatgaattatccaatttgattttcagatttctctttttttctttatacagcttaaaatgacatattctctaactcattcattcaacatatcatttcttcttgaaggcctagtgacatagaaatgagggtatctttagaaatcattagaaattttaaatggttaaatgaaggagctttagaaaaccatcttaaattaggagcttagtgaatgttgctttattttttaattcacatatagtaaatgaaaacatgaatttaagaattggccaggctaagattcaaattccagtgccaccatttataaataacatgagtgaacttagacaatttaatacagcacacacacacacatacacgcaaacacacacacacacacacacacacacttttgcctaatacctggaacatagtagtaaatgctcaatatttttttactctcaaaagcaagggcagcataggaaatgaccctctcaagtcagatcaggagtggtgactaaatgacaaaggaccacttgtgcagacgtccttgtgtttcttcatcttagctttagggttttctttcaagtgtccagattgcacctatattacccttgggtaagagccaatgagataatccatacagaatgcctagggcagggtctggaaggagtaagtgctgtataaaattatccttcttcttctttcacttcctctctttcttggggctgaccagctgataaactagtcctctgtcctagattgtgttccccagaaacagaccttgaaatgaggattatgtgcaggggatttattagggaagcatctcaggagagactggcagaggagcaggccaaggaagggaaagaagacacatctgggttccatttcaggtgaagttccagcctcttcatgacctcatagagtactctggaacataaatagcacctcagagtatgtcctgcctggaggcaaggtagcttggcttttacattccttcatccatctgtcactggctatgggccctcctgggtgggctatcacctcccaagcacttccagctctccatagtgttagggcagttgcagtagcaaaagagaaatttctgaagaaggctgctacagatactgctgcagcagtatcttctgttgccatccagattaccatttccattctcagccttctgaagaaggctgcagttggaaataaagcatgtaaaagctgggaatgggagcacagaccctgcaaaagggacagaggtggcaactctggtggcagcagcagtatctgctacgtcctcttgggttttataggcaccagcaaaacacatcttttgttaaaatggtggccttctgacgggaagggcaggtctactactgaggtcaaaattcatgtgttatttttgtaagcagctactaaagcagtatcagtccagagaaacgagtctatctttgaagaccaaatacccaaaagatctgcttcaaccttccccagttaatcttttgccagaagattcacaatctgaatgtggctgtgagtatttgattagagtattagtaggtgaaggaaggtggtatgcaagaatcagctttaatattatccccgtagaagggaataattggtgattagttttcaggctatataggactattcctcctaaatgaatggataagctgagagatttacttctaaagaggtatggtcttttcattttaactcgagattttaggaaagaccaacttaaaaagaaagcaaaggaagtttcaggagatttcagaatttagaaggaattctgaaattctcttctggggaaatgaaatcctaagacttgcatggatatttctgaaaatcaaaatgaaatattttggttgcataaatcgtcaactgtagtttttaactaaggaaatgtaatttaaaaaatccaagtgttcgatttacataagaaatagagttatttaaatagaagatttccaaaacgctgttagtggtctttgacgtctttaaaaaggcatttatatttgtgaaaagatgatctattttaaggtgtaattatttctaatgtgcctcattttggggtctcttgagagattagaaattgctaataagcaattttaaatattttcgaggtaagttaataaaacacttcatcggtaattcatgacttgttatcattctcacattatccttgtgtgggtaaaggcctgtccatcattggaagtaattggaaagaaaactttgcctgaagctacatgagaactggaacccttaaatcatgaatggtggcaagattccaaaattaattatgaagactattggaatgatgtagcatcctttaactcttattgtgatcgacagaaagtatcatagatggacaactcactttccctttgctctgtgcttcctggtgattttaggtcacgtccactctgaaatctgagctgtcattaaagccatgtcttcgtgtctgtctgtctgaagcagcaaagatgagacagtctgtcgctgtgtgtgaccccagtgagccccataagcagaaggccctgagtctcaatttgtttcttttgattactggcagatcactcactgtgccatttctctgatgtgactgagcatattagctgtgccctcccctaattattcatgcttccaatgttacccattcaaaatttatgaccatgaggatggtgggttagaagcctgaggaactgaggctcaagcctgttgccagagatttactgtcattgttttaggtgcaaagtattaacaggcaggccaactcacttcaattcctgacttagtacatttagtggagaattagttgagaatgagtacattttccctgacacagctgcaaaatcaaacacacgaggagttattgaaaaactgggatttaagcttaaacctatcatttctatatctgatgggcgccatcccatatctgtgaaaatctgacattggggaagtgaaatgcaggcttaaaagaatgctttcaaggtgcatagcaaaagcaatcttactcctttagtgtttcccatttaatacttttcaatttttagttagttaattaaggagaaaatcacttaataatcacataacatagattgctactataaatacctgtattgtctatgttacaattttcgcatctattttactttattatttgtaatctgttgggttttgtgaccttgtgctccaaatgattttgcatctgtaaggtggttgggagttagatacccttcatcatatcttttgccatctttgagtggcttttttaacctttccttttaaaaaaaaatcccttaatccacagtctaataaagtaggaaaaacaatcaataaagcatacctacaaaagttccattttaaacttttagtgaacttaagtttactcatagtgcatttaatcttcctttctgtctgtcagttagcaaatatttattaagccccaacaatataacagagacattgctggctgccaggtcagggggcaagagccatgatgcatttcatcttactttgaggctgtcggtctacaaatatttattgagctcccaacaatatgccagggactttgctagctgctgtggattcagagatgaaaagacatagttccttttattcacagaatttacaggagtgatacaaacaaaacaacataggagacataagatatgtactctgattgtcttggtctgttcagactgctattacaacaataccttagactggttaatttataaacattaggaatttattgcttacagttctagaagctgggaagtccaagatcaagggcaccagcagagtcagtgtctggtagtggtctgttctcatagatgagtgcttttaaactgtgtctgcacttgtcagaagtgcaaagggacaaacaggctccctcaagtctgttttgtaaggacactaacctcatttgtgaggggatgtcctcatgacttaatcgcctcccaaaggccctacctcttaatacgatcacagtgggagttaagtttcaacataggaatttggggggaacacaaacattcaagcaacaacagtgatgatggttaggccaagaacggtgcagtcctcaaggagaaaagctttatatctgctagggagagtaaggaaagtagccttggagctgaggcttggtgcacagagaggagtttgccaggcggataagagcaggagaggtctttcaaagcaggggaaacaacatggtcaaaagcatgaagacctgccagagcttccagaatctatcagagactttgagttgttggagaatgaagtataaggcaaggagtgactgcagctgaggcatggttggatgagggtcagattacaaagaaactgtatatgctgttcaaagtggttcctatattttcttcctgctggttattagaagggcatgtgcccctttaggaggcatctgctatggttaagataatagaaaagggaattttcctacaactcagattacatagttgcgagtgagacacattcctaggtccctctccccaaaaagccttcagaattggaacagattttttgatggtgaagtttgtggtgacatcactggtttgctgctctaaaggccactggaattaggaatgcccgtggatgaaagatattttttgccatggacttaggaatctgggtgtgagtattttctcattggtgggtcaagactgacagctgccctctgcaagctctttgaaaaggtaggaagccctgaaggacctaggtgatgctattacttgatggctcaagcagatcttcacaaattcaatacatgaaagataggaagtaagacgtatgagtgatgggggagtgaggttagagtggtacatctatcatagactggatagaaaggaaagaaaagcagaggaggggaggatacacaacttggcaatgtcgagatccagccatccaaacaagcatggaagtccttggtgaagcttgactcccaaggggcattgctttgcatcaggcacctgctagtctctgtatgcaaagacagcatggctcttctagactgtaatgaatagccaccaaaatctcttggatgtgaacctgctgacttcccttgtgaaaactatgcctaaaggtcagtgaatcctgttttggagctgcttagggtcactaacaccaagaaaacttcatacttcacttttctcttatccctgcagaatgctggaatggaagaaaaaaaaaagatgaaaagtaggtcatataaattggtaatgcctaattctaatccagtgatctcatatagcattagaataaattagaatacattttgatgaaaatttccattttattaaatagttgcttcgtgcataagcagtgcagctggaccacactgtttctaagattgttttcaataaaatctcattagctcacaaggcaaattgaattctcacttgctttccccatccactgtcccttactcacccctgctgtatatagagcactgagtgtagaatttcgctagccagaccacttactatttgacagagatgtgtatgtagggaacagcattaagctatgccatgacttcctgtcatggctataattagcatcagttcaataggcttgagttaaaatggtttctgtggtgccattatagctttgttttgccttacttatatctaggtgaccacatgttcaggtttttctgggacagtccctttttatgcctgttttctcagtagaaattcttaataatgcccattctcactctctgaagtattccagtttggattaacaataatatggtctcctgtagcaaatactatgagtgttctcatagccctcagacctgagcattccagaatattcttactggcatcagcctgttgatatcatgtgcagagtgctctattgaaacgacagaaactcttggcccactcaccaagctggaattcagaggtattgacttccctaagggcatccttcagccaataactgataggaattggtggtcaaattttatttgttgttgttgtttttccttgttgatgtacagttactctagcactattcacttagaaaatttccttttcctagtccatttcattggcacccttgtcaaaaattaattgattttatatatgtcagtctatctctggactctcttctgatccattgacctacccatataccaatacgagactgacatatttatcctcaggtgactttaatttgccactaggtctgagaatcaccattttcgacaaaccatgatttattgcctggggctaaatgcatttctggtctacatgaatttgtggttttattcacagaggacaggaagaatattgagttgatatctagcagtgtctctcttcacatatatttatttattttcaacttttattttagatacagggagtacatgtgcaggtttgttacctgggaatattgcctaatgatgaggttttgggtatgaatgttcccatcacccaagaactaagcatggtacctgagtttttcaactcctggtccctttcctccctccccactctagtattccccagtttctattgttgctatctttgtgttcaccagtatccaatatttagttcccacttataagcgagaacatgcagtatttggttttctgttcctgcattaatttgctcaagataatggcctccagctgcatctatgttgctgcaaaggacatgatttcgtttcttgttatggctgtgtagtatcccacggtgtacatataccacattttctttatcaaatccacccttgacaggcacctaaattaactccgggactttgctattcacacatatattgaaagcatttatactaaacaatatgtttgttatgaatagtgctatattgtacacatttcagagaaccttttccctgctaaatcttcacgtgactcttggacacattgtctttgtgaccactggagcacattttgaagtcatctagtagacttttccagaacacatatttttcacttatatttatattgtttgaggtgctgcaaacctctttaaattgtgtacaacatttgcaattgttaggttatacccacctgggaataattactaagtctgtgctcatttttgtttaactttctgatatatttgtttcatttaagtaaacctctagaagtatccaaactaggattagtagaggtaattttgggctaatgtatcttccccaaacattgttctgttgttcaaaataaggtaattacgaagacactggtaacatgagtgactttgttaggacttgagtataaatcaggctcctctttcctgaggagtgcttaatcaagaaaaaaaaaggcttttcttcatataaaggcttatgtaatatacaggctaccaatctttggctttgtaacttcgtttgactatagtgcaacctgatatggttgacttattaggttgaattattttataccgctacgaggcactttttgtttaaaataatgtatgcctcttccagaagatccctgcacatcacacattcaaaactaactagattaccaggacatgggaaaatggtgtcatatgtcttagttgctgaaggttcactttatcttgaataataaaattacagatctacctagaattgaacttaattgcacaatattgtatttcctttgccaattaacccaatggaggtttgaagtaatatatttgaaaaatgctttgtaatctgaaaagcaccaggcacttgttaatcgttgtcattactatattggaaaaactacctgtggccacttgcaatggagaaaaaagtcttaacactgagcaaagaacagctcaacccttaggcaagtactttatcatcaaaacattttccgatgaccatgattcacagcagatgtaaactaactccagtgtttttcaaactagtggtcttgacccacgggtaggttatgacatcagtttattggttggacatcagcattttacaaaaatgaacagtgcaatagaacataacagaatatactagaaaatagtaatatcagaggtagtaaggataaatattcttttgagaagatctccatatatatacatatacacaaacacacagatacaaacactggatggaagtagaaaatgttctaattgtgactcattgctcagaaacaaaacagaacaagacaaattcaataacaatgtcattgccctaatccttatttaagatttttaaagaatgttatagttgtccttcagcttagcagttattgtattacttaaggtatgatacaaaatgttaagacttttatatatcatacgcttataattcctgagttcatagagggtctaagattttaccattaatatccttctaataaagcattgcattattgaagacaaccagttagccagttcaagtcaacacatttattaagaattaggaatgtataaaaaatataccaaggaaaataaattaagcttatataattatactttatgttaaatgacagtttaatttcttctatggggtgtaaatatttaataaattgtcgatattcaaaagaccaatacatattttaaaatattctgggggttatttttacatacatcatcatgatccccataatgacgtttcaatcagcgacgaaccacatatatgatggtggtcttataagattataatatcaaatttttcctgtaccttttatatgtttacatatacaaatactttccattgttttgcagttgcctacagagttcgatacagtaacatgctgtatagtttgtagccaaggagcaatgggctataccatatagcctgggtgtgtagtaggctacaccatctaggtttgtgtaaatacactctgcgatgtttgcacaatgaagtcaactaaggacacatttctcagaaattatccccctcattaagtgatgcatgactgtatttcctgtaatagagactgtatctgttaactattgctatataacaaccatcccaaacatagtaacttcaacaacaaccatttacttagtgccaattctatgagttagcagtttaagctggcctatcctgggtggttcttcctggcttccttgtgtgtatggtcagccattctgctaagccactctggttctgagagtcttttggctgtttgcctggggcacttcagttctcctctaccctggtcctctctaatcctcaacagactaactagcccaggcctgttcaaagggcaaagacagggctccaagacaatggaagaattgaaggcatgttgaggcctaaactggatcaagtacagtgtcactttgaccacatcctgctcgctataggaggtcacaggccagcccagatttaacaggaggggaaaataatctccaattttttgatgggagaaatggcagagtaacaaggcaaaaggtagagaaaaaaataaggaggccattaatggaggccatgaatgcagtcaacttatcagatgctcttctcctccctacccttttcattggagcaatataaagaaatccttcagtcaagtttccataaagaccctctttcctgcttctggctgagctcctactaaaaagaagattaatgtggaaattaatctaatccaggattaagagtagaagacttacttaaactgggcaattttctgtcaatttgattgtaataaatattttgcatttaagagtttactattgctaaaggaaggattgtgttttctctgggagcattgtgaatcttgtgttactgaacaaatgatttcctaaaagggtatgggtaaatggaactgtaaatcaaaccaaattttttattttgagcccgcaatttaaagggatcgttttacatgtgttctgtctccagagatacctctaaaagttctaggttttagatgaacgattccccaaagcaaccttcacctggagaacataattcctatatttagcttaatacttgggccagaaaggctaacatgtcatttacagtttacaggtaagatgaatgtaatctccttagagtagtttcatcaaccaagtctagaaaaaatcaggtactagagtgatttttacacaactgtttcttattgaacaaattacaaaattagagaaaatgaaaaagaaaattagaaaggatagacttaaatatctactcatatggtaataattttataagaaaaaaatcaaaatataacatctgtttctacctgcctggcctgtgaattttgtagtctaatataatgagagagataatattacaaaatagttaggatggctgacttcaaagacagactgcttgcgtttgaatttaagcttagttatgtgttacctgtgtgttctacattatttaatctttttacgcctcccagtagaacagggataataatggttcctacgtcacagggtgattgtgagaattccgaaagtcagtatgtgtggaatacacaggccagtgatcaatgcctggtaggcaataaatgttaactctcactgtcaacactacagttggtttctattccaaccttcatgaattttcactgatttttttcacacttgtttaaagttacatgctgtatgcctctgccaggggcctgagagacagagataaaggacaaagacactgttcccaagtagcttgaggtattggatgaataccccccgaccacacacagatgcacagatagtgatgccacttgtaaaagggatataagacttaaaggtcattcagaatgtccatgagactcgtttatttttaaggtgatttctaatatataattttgtgaagcaatatgcattttttaggctgttggctaaaatgcaatgaattacctagatttactcaagtttacactcattccacatgtttttctaaatacagaaatttctcattatgtatggcatgatttttttaaaaagaaacattatatataaagagtacgtgaagcctaagaaaagtggcacattctttactcttgtaatatgccagcatcttattctttatttggtggtttctaattgttccctaaaaatgtaccaaccataatattgactgaattatgccacaaagaaaagaaagtgattatagttctcttcatagatccttggacctcatataaagcattgattgattgtggagcctgcctggagaacaggctgtatcagtgctatagaatctttactactaacttcttagatactcttgatttggtctcattcgtgggtttacatttgctctggaagtggtgagcttagatgatagaaaaacgtttggtatgtgaatttcatacacttgaagaaatagatcttgagttcagtttttccctgcaaagtgctagaccttaaaaatctgatttgcatagactggaattcattgatttaagaagaggaatttattacagattaataataattacttctgaagagaaaatactttgaatttgggattctaatacttatttaaaattggcgataatttcactcttaccaacaaatacactaattctgtttttaaaatttcgattagtgttatttttggcttaatatgcacattgttaagccatgtgggtttttttttctgtttttaaaatttaagtatactttgcacagagtaaaaggtacctgtatgtgtctacagttgtgcgagtcttaacaattctatacattcatgtatccatcaccaaagtcaagatatacgacagttctgtcactggcaacatttccatgcattcttttgtcattaacccctttctccggtctctggcaaccacagatttgtttcctttcccaaaatataaatggaatcatacaatatgtagccttttgagtctggctcttttcatgtagcataacgccttttagatttatccatgtatcagtgattcattctttttcactgatgagtaatattttattggatggatactcacagttcccattccccacttgaaggacatttgtttctagtttttggtaattacaacaaaagccatttaattatgttcttacttgttttggaaaaaatccaataaaatggtaaaataatcactttgtgtgtataggagtagggtgtggcagggaagtctgaatccaaaggtgttactctaagtctctgctggctgggcatggtgggtagtgcctctaattagagcactttgggaggctgaggtaggcggatcacttgatgtcaagacttagagaccagcctgggcaacatgacaaaccctatctctactaaaaatataagaagtagccaggcatggtgacacactcctgtggtcccagctactggggaggctgaggtgggaggatcgcttgagccccaaaggcagaggatggtgtgatccaagatcacaccactgcactccagtctgggtaacaggatgagaccctgtctcaataaataaataatataaagtctccactaaaagcgattatctgttgtctactggtataatcaggcataccagtagatctcagactgtgttcccatttgattaccattgttttgctgcttaaatccaaaatatgccaattttaaaaataattttcagaattagtacattgcatttcatcaatcttaagttttcctctaataaatcatttgaaatacttgggtatctcacagaggatcccgtgttacctggtttggcacacaatcattacattgattttcctgaagttgaatctagtaatttttgggtgtctcacataagcatgtaactttcagactctctctccctaaaaaaggagtgtcacaagaacatattctaaatcagtctatctggatgtgaaaataggactcttcttgtgttcacagtggccaaggaataaagactactacattctttttcttttcatttcttgtttctttttttttcttttttttttcagacagtgttgcccagactggagtgtagttttgagatcatagctcactgcaccctcaaactcctagactcaagcaatcttatagcctcagcctccttatcagctgggactacaggcacacaccgtagcacccagcattttttttttttttttctgttagagacaaggtctttccatagtgcccagactggtctcaaactcctgggctcaagcaattctcccctcctgagcctcccgaaatgctgggattacaggcatgaaccactgcacatggcctaccactacatttcttaatgaaaatcacaaagtaagactgggaagcttggagaggctgagaaagctgagagtgggtcctgtggaggactttagggagagtcaggaatgttgtctgagtcctctcttacacctctagtgcagtgagatggggcctaacaggaccacttgcaggatggcctgtgaccagtgtgggagtattcttagattctgtccaaggtgctgttataagagggacaagcaaatcctagcttagataagctagaatcatctatgcctggtgctaaagagggaataaacaatgagctagagggaagcatagcatgcccatccaaagagctcctaaagaaagagctcttgtgggagcgtggttagcagtgttgttcatgtcatctataacttctatacccaaggcatgtgcattcattctcaagctgctgcgggtaccagttactagaaactcatagctgcccccattctctggccaactgccctgggctgacaggagtcccctttcccagagatgccttgtagtttatgccttccaccaatctggagactgcccatggtcagcgaccgaaaaatgcagaggtataaaagaaagcacggctgccttgcctcaagacctcacagcccttgtgttgcaatccatgctccagaggtctccaagggatcgggtggggactaaatttcatctgaaacaacatgtttgtcaagctccttctactgcccccttctgcttctcttgatcttttagagggttcttctgagagcacttcctcaaaaatcatttgcacaagaatccctgtctcaggctctacatttagggaaccaaacctgatatagggaactctgagaaacgcccccaataaaacattaagaggagagagagagagaaagagaacttcatacacttgccgcgcttagagagcatattgacatgttactactttaacaatcaggtaagaacccctctgcctccccttatctcttcactaagctcctctaagtgccaaaattcatgttagcaaggtagaaaaggagatgtctaactaagctatttagggaaacataccttaaggctattaaactctttccttcctataagattccagctttgcggttgatgtcgagccttatgaagagaagctttaacgtgaaatgaacgtgatctttccatgagccattaatggttgaccaggggatctgggagagtataactagaaaatttatggagacttttatctaggagcccaagaataaccaacccacctaatttattgaaggtgacagtggggtagagtgcatgatatctcctgagtcttgcctatttggttacctgttatcctaaaacaattgaaaggacaaaaacataataaatgctgaatcctgacaaatgaagacagaaaacttacttttcttcttaaaccaagaggataagcattgtatttagtattgagattaattctcattgaaataaagtccatcagacacacaagtctccatgtattattggtcatccagacattgagatctaatccatcacaaaagtctctatgagttagacatccaggtagccccacatacatctcagacagggcactcttagctgctttcttcttgatggcagctggggattattccttcccttcattttttgtttttatgtgcgtttttgtttgtttgtttgtttgtttttgagacagagtcttgctctgtcagagtcttgccaggctggagtgcagtggcatgatctcagctaactcactgcaacctccacctcctgagtttaaggatttgcctgtttctcctgcctcagactcacaaatatctgggacaacaggcacatgccaccacgccaggctactttttttttttattgtattttcagtagagacggggtttcaccatgttggtcaggctggtctcgaactcctgacctcaggtgatccacctgccttggcctcccaaagtgctaggattacaggtgtaagccattgcacccggcctttcttcccttcttaacacaaggaaatacccaaatattagagggatgcagcagtggggaatgtataatccatggtgtctttgtttcgtgagaaccccaatgaagaaagagaaacagggagacatagtttagagcatgccgctcagcagaatttagaattgccttcagtcactggaagagtctaggtgtacctggctatttgaaatatatgaatacccagcttcattatctgaatgttttatgctccccaaaatttgagctctcttttcgtacaggctgctataacaaaatatcatagacggagtggcttaaacaacagacagttatttctcaccattccagaggctgggaagtctaagatgaaagtgccaacagatttggttcctggtgaggacctgctttctgacttgcagctgccttcttgctgtgtgttcaactgaccttccttttgtttgtgtatgagggagaaagagaatgagagagagagagaaagattcgtcttcctctttttacaagggctctaactccatcatgagggtccccctctgatgacctaatctaaacctaattacctcacaaaggccccacctctaaatataatcacattggggattaagggcttcaacaaatgaatttgggggaacacataaacattcctaatgcaggacaggcaacatttcagctctgccactgactgcccaaataatcctggacaacttacttaacctctctaagcctcagttttgtcatctgttagatgggaatgaatgagttaatatctatagtaccaaaaaaaaattgtgtctggcacagagtaagtgttcagtaactggtaactgttgattattagcctgggttaaactctggagtagttaagaaatgaggcaatttctcattactagaagaaaaatcaaaatgactgtattaaaaaggagatgctgagcatatcatcaataaaagttttaattggttcaatattatttcagattgtgacattaaacatcactttcaaatgctgaggttatttcctcaaatatgacatcagttgactcaatcccattaggagaaatttgaacgccttcactatgtaacataaaaattgctaattctttccttattatatattataatcatgtgtcacttaatgctggggattcattctgatattgtgtgaacatcagggactgaacttatgcaaacctagatggtagagactactacatacctaaaatatatggcatagcttattgctcctaggtacaaacttgtacagcatattactgtgctgaatactgtaagcaattgtaacataatggtaagtattcatgtatctaaatgtatgtaaacatagaaaaggtacattgaaaatacgatataaaagataaaagaacaatggacctgtataaaacacttaccatgaatggagctcctaggcctggaagttgctctgggtgagttgttgagtgactggtgagtgaatgtgaaggcctaggacattaatgtacactactagagaatttataaacactgtatacttaggctaaaataaatttattttaataaacttttcccctcaataataaattatccaccttagctactttaacttttttactttataaacttttaaattatttaaacttttgactcttgtaagaacactcagcttgaaacacaaacacattgtacaactgtacaaaaatattttatttctttacagacttattctataagtttcttcaatttttaaatatttagtttttactttttaaacttgtttgttaaaaactaagatgcaaacacacacattaacctactcagacagagtcagcatcatcaatatcactatcttccacttccacatcttgtcccactggaaggtctgcaggggcgataatatgcatggaactgtcacctcatatgatagcaatgccttcttctgaaattgccactgaaggacccacctgagactgttttacagttaatttttttctttaattattaggaagagtatactctaaaataataatgaaatgtatagtatagtatagtaaacacataaaccagtaacatagttgtttattatcattatcaagtattatgtactatacataattttatgtactagagttttatacaactagcagcaatatagttttgcttgtaccagcaataccataaacgcatgagtgatgtgttgctctgcaacgttatggcagccatgacatcactaggttataggaattttttcagctctgttataatcttatgggaccactatcatataggcagtctctcatggactgaaatgtcattatggggcacatgactgtgtgtgtgtatgtaggtacacacacatatgttcatctcttatgcctgattttgattctttattaatgtggtgtaagtcaatatttattggcagcaaaggatattttcaccttagcaaatgacagatatgaagtttcattctaaagaattttggtgctttcctcctactgccctggggaaatgtagcaatccatgtaatctgccaacatgtatggttggagatgcattttagggggtcagggagataattaatgaggaaaccttgagagtcctatccctatttctagctcttacctcaaaaggaaattactcgtaagtccaggaaatggctacgctgaaaatacttgtcatttgtctgacactgtacagaattctatgtttaagatcatcagttttagtggcaggtattcttggacttaatcctacctctaccaattacaccagtcattagctgcataattttgaacaatctcaatcttctcctccataaaatgggaacagcagtgtctattccttagagcagttgtgaggattaaatgagtgaatgcatataaaaaaacacttggtcctgaatctgacacatgaaagcactgggatagttgttaccatttgaattgtctaattcagggccttttcattccacaagcgaatggcgaagtaccatttaagacttgccaatgggtgggggaggcatttactatccaaataattatatcactgatcatgtctaactgaacacatttttggctagaagggaacttggataaaatataaaaacagagctttcacaggcatttttgttatttcatttatgctttgaaaaaaatattttggggcacctactattatgggtagctaactgcatctcaaatttatatcttaatgtgttcttgtcctttaatttttattctgcaacatatgaacttcagtaatttctaatttccagaatggtggaacataaatacatgtctccagttcctatcaactttgctaagtcataataatattattaacaaaatcatagtctttttctttaacctagcaacagttacttaacaataaaagcaggtgccaacacagcaggaacagtatttagtgttttgtgagtcattgtttttattatttttaactttttttaccatcaccttaggaaatcatacaaatgtcattgtggaaatcaatcattagagtaaggtggaggactaatttttattgtaaaaataaccatatttacctggatacttatttagaatctaagtaagaatgcctgtcttcttgaatcccttactttatttagtcaaatgctaagttaacttgctgttaaggctttgggttcttctttttcagtcgatgtcagtgttgaggctttgtgtgttggcaatttttagttgtgtatcgattaaccattgctacaataatgctatgtaacaagccatcccagaacttcaggcttacaacacttacttgtagtttctagtaatatggttgcattggttctactgatctgagcatatcccatcagggctcattcacatgcctacactcagctctgtattagcttgttggtttcatttgacttggaggggcaatgatgtggctgggctctcagcagagaagaatgggctctgctccacatggtacctcatcctccaagaggctagcactgggtttttctcaggctagtccagtcataatatcatggcaatcacatagcagcaaaaagaaagcataaatgctcaggcatcatttcttcttgaatcgagtcagctaatatcctgttgcttaaagaaagtctatggccaagccaagagcaagcgtaggagggagctacaaagttatagggcaaacgatgtggctacatggaggctattaattggggtgctaatgaaaccaatctaccacagatggcatggatccactgcatatggaagccaccacctttcaggaagacctccccaactggacttttaaaatagcctttctctccagatgccctacctatcatctcatctgcctgttaagaatgggtacatctgggccgggtgcagtggctcacgcctgtaatcccagcattttgggaggccaaggcgggtggaccacctgaggtcaggagttcgagtccagcctggccaacatggtgaaaccttgtctctactaaaaatacaaaaattagctgggcatggtggcaggcacccataattccagctacttgggatgctgaggcaagaatcgcttgaacctgggaggcggagggtgcaatgagcctagatcgtgccattgtactccagtctgggcaacgagagcgagacttcgtctaaaaaaaaaaaaagggaaaaaaaaagaatgggtacatctgggatgaccgtaccttaaatacaagacatgacctgttaacactgccaaaaagaaatgcttcagtgataccttctaatggtggaggaacatagcttgtcaatactcagcaagcaataatcatgccttaagggttgatgttggctttgtgccagatccccttgggctggtgattctccagctgctgctagtgttggcttttattagcccccaactgagtcctatggagaactgctcctagcccacggttcacatcccacccactgccttctgcggggtagcctgtctgacacagtgcaaacatcccaaccagttttcctcaagatgggacatctctgtggtataatccatgctccagaactcccttgggtccacgctcagggtggactccagctgaggccacagccttactcagctctgcctcattcactttctgcttccctccttctcctgttcctgagagtcactctcaagaaatcacgggcatcccaatccctgtctcagactctggttttagaaaactcaacctgaaatacatgttacaatgttattttctgtcattttcttttgtttttttaaagcaaaaaaagcatagatttattgaaacaaaagtatactccacagaacgggagcgggcttgagcaagtggctcaggagcccagattacagaattttctggggttcaaatactctctagaggttgcctattggttacttggttacaccctatgtaaataaaggagtggcccatgaccagtttgattggctctaggagaggaccaatcactggctgaagcagagttacaaagttacatatgaagacttggcccacaaccagtctgattggttgtgggacaggaccaatcagaggtactttccatctgtctttattattattattattattattatactttaagttctagggtacatgtgcacaacgtgcaggtttgttacatatgtatacatgtgtcatgttggtgtgctgcacccattaactcatcatttacattaggtatatctcctaatgctatccctcccctctccccccacctcatgaccggccccggtgtgtgatgttccccaccctgtgtccaagtgttctcattgttcaattcccacctataagtgagaacatgcggtgtttggttttttgtccttgtgatagtttgctgagaatgatggtttccagcttcatccatgtccctacaaaggacatgaactcatccttttttatggctgcatagtattccatggtatatatgtgccacattttcttaatccagtctatcattgatggacatttgggctggttccaagtctttgctattgtgaatagtgctgcagtaaacatacgtgtgcatgtgtctttatagcagcatgatttgtaatcttttgggtatatacccagtaatgggatggctggatcaaatggtatttctagttctagatccttgaggaatcaccacactgtcttccacaatggttgaactaatttacagtcccaccaacagtgtaaaagtgttcctatttctccacatcctctccagcacctgttgtttcctgaccttttaatgatcgccattctaactagtgtgacatggtatctcattgtggttttgatttgcatttttctgatggccagtgatgatgagcattttttcatgtgtctgttggctgcataaatgtcttcttttgagaagtgtctgttcatttcctttgcccactttttgatggggttgttttttgtcattttctctatgtattttttttaaattctcaatgccttgaaaaaatagagaaaacttcacagatacaaaatgagattaaattcagacatttatgagatatatttttaaaggccctatttcaaaatattcagtgcacatgtatgtattgaggcagtcttggaggaagggacatcaactttgcttcagagaaaatgaatttatctcctcagtctacctggctctgcacttattgatcctgagaatttatgaagaactttttttaaataatttttttattatgctttaatttctggggtacatgtgcagaatgtgcaggtttgttacataggtatacacgtgccatggtggtttgctgcacccatcaacccgtcatctatattaggtatttctcctaatgctatccctaccccatccccccaacccctgacaggccccggtctgtgatgttcccctccctgtgtccatgtgttctcattgttcaactcccgcttatgagtgagaacatgcagtgtttggtttttcgttcttgtgttagtttgctcaacttgattctctgtattctcatatgcaaaatggtaataataattactattgcaagggattttgttgagaattaagttaaatgagataatgcatgtcaaaggagtttcaagggctacagatatgctatttttacttgtagactgtattttcttataactcagagctttagaaacccgatgcaactacctaatgccagtaaaatggagtcgtaaagtaataaagaaaactgattgtcttgtttcctattttttttgaaaactgattttgttgcttactgtttttatcatttggtcaaaactgaaacgtaagttttgtatctctatccagatacaaagacagatttttggctttcgttacaacagcacagtaagatacaaaaatgttcacttcattttaatgttatattttgacttcctctcctgaatgctacttcaggcatatggcaaaataaactttcaaaattaggaagctctgagaaataaataataatgtaaacattctttatttgtgaaatgtagatcttttcctttaaaaaaaaaaagcctggctaaccttatttaattctactgagctttacaatttgggggtattataatcaggagattgtagattcgagctgaaaaggacacttttcttggtactgcatcagtggtaaaattcacctgtgttttgggttagtccagggttaaattgaaaataatactttttagtatttgtggccagaatgattaccaaacaatctctatcaaaacagccatttcttcttaataaaaataatgttccggagatgttgcatagcactgtgacccagattcacacacttgtgctaagagtacctgtgtgtgcaaagacttctcttgtcatcactttcctaatcacattacattgactttcttcatttctttctcccccacaccctgcccttcaacttgctaagtacacagtgtattttcttcctaaaagactttctttttggttcaaaaatatttttttcaggaatttgaaagattcaagggaaaggaaaagagttagctgacttagattcaagtcaaggttgatgctgattgttatgtaacatgggcatgtaataaatgggaatgcaaatctccaagactgttgatactggacaaggtttggggaattttggacagagattttcatatatgttacagcatcttcagttaatgaggagaaactatatgtgcttagattgatagataagtagattgattaatcagtcaatatactgattaatctgaaaaaaataggaatcacattcttcaaagaaaactcagtgatgagaattcttaagatgaagatcttaagttttcattctttggtatttattctttagtgtgtgtttatcctgctgtctgtgacttaaatccaatgtttcctcttctactttttgaaagtgaatactggtagaagattcttgcttatttctgtcaatagggtttgaaataattaatctgacttgattaaatgcctcagttatatagtagcatttaaaaaattatggagccactgttacataattggcctcaatcccatcttgtaccccttttgctgatagagcaaaacaaacctacgcaaatatggaagaaattacccacagcagttaccaacccccgtgctgcttagaagaatgcattgttgtgcataaactcaggataaaaatactgaacatttttcaaccatggctgtgtgttgatttctgtgccattgtgttttgtttgctattttaaatttttgtctacaatgtttcactgacagtggtagacatcattcccttagatgcttttggtttgcctagaagaaatgtgggaataaaagagatgaggacgattacactttggcttccttcaatttttcttttggcagtttagtctaacctcatcttcttttgttgattttgtaatatgagaatttaaggcattcaatagtaggttatatgattgaaattgttggccatctctacttccatgaagggtgtgtacatacctacctccagtagaatctcaatatcccattgtaattcctgatagaattaagaatccatgctttagaatgaatgaaaaccttaaaaccaggttaaatttattttatggaaaaccatttatattactttaagttcatggttcttatttgttcctctcattgttattactttttgagtctttgatcttaagtggagaaatttctgcagaggctcctcaaagaagtagcacatatataatagctgggtcataagagagcttgatttataaaatgtttgattaatagagaaaagaggcaaggtagagagtcttgtctccagaaacaaagttgtctttaaaagtatgtaaaattaaagcttgaatctcttggaaccaaccaagacagaaataaaattaatattcatgtaggtgtatgggctgaagcatcctacaatccaattacataacagggacaaactaaggtaaccctggtgtaatgtcttgtaaaagaagaagtgaggttatataattagactgcatttatcaagtagcacattccacctacacaggctctgaagaaagaaagaggaagtggggagggaaagatttctaaggaataatgactaagaacagtttgatatgtacgtttgtgtcatcctttcaagattttttttgcttttagtattatgcatagcatcacttaggcgtctaatggcttacagttttgtccttcaaagaccttgatcaagccagtctttggggcaaaaagaagagcttagatatgggtggagggaaagaaaaactggaccctttaagaattgtgtctaaggaaaacggtcaagaacagttaactaagaatatgtttacttggaaagatcattttcatattggtaagtagagttattaggtgaatagagagcatatgttttgtgccttgagaggattagactagggtaatattatcactgttgataatgcagatattgcagtatgttttgttaatccaacaaaggtatcataggaaggtacaaaagatagaaaaaaaatccaagatggtaataaggagctttattatggtgaccagtatacaggaggggcaatggatagggcagaatcattcgaaccaccacctttatggttgtctctgtttcactcgttcagcatcagtccttgtaagatgtttctcagtgctgtgctattaaagttgaaacaacagtaattcctgctgaagaagtatatttagccaattgacctcgagtatacccacattagaaaactacactccaaaccagtttcccaggttgttttctcctattctttccagtgttggagtttgttggaaatgctaaggaaatgtcctcgcaccaaatttatcagatatcagaagtgtagtaccttttgcttgtctcaaacttggggtgatagctgttgattgaagaaataaaaaatattgaagtccctgctaagttaaatgtaattgctgaaatggccaacatttcatgcaatcagtacaatcatgcaatcatacaatcagtacatgaatactctgccatcgttagtgtttttgctccctctgagtgcaaaacatctggtgaggagcatgcagcacatgtatgtatgacttccccattttcagtggatgtactcattcctgacacaaaggagagcaaataaaagtaaagcaatgacaattaaaatgtaccaattccccaaatacagactgatgcaataataagtttaagagacagcaataatgaacaacaaagattgttgaatacatgagaaaatttgtttcaaattctaccctttggagataatcatcattaaagctggatgaactaaattttaacaaggaagttggcgagtaaccaaatctatatttaaaggctttcagcctaccaaatcttgcatgtatgtaaccgtcattttatgacttggcttttcatttcattaatattaaccaacaataacttccttttggctctgatggacttaagtctaaaggtctcgaagttgaaattggaaaaattgagttgctttttatactaatttctgattgctatttttacttcttttatggtagaggctatattttatatatacatcatttggcaacagtaattcacttctaagcttttatggtgcaaaatcaattgccaatttggtgataatataggcaggcactaatagtgctgctttgccacttcaaagcatccagcccgagaaatttcataagcaggaaacctaaccccgctggctgaactgatataaagaactgcctcttatgtgttcccttagatttgaatttttcaaagctcctctggaatattgtatttttggagcaatcacaattttcatttatttcaagaagttgatttcctgtaggcttcaaagatattacagttctgcatggattagttttaaaaaccggagtgagcatatgaattgtttctaaaatgtatggtgtaagtgccatgggcactggtatggaatggatatggattctgatgttccctcttccatataaagtgtacttgggaaaatctgtttcctgatctgtaacattcagacaacaatagttcatagaactaatgactcagaagatgcaaatgtatctccatatgttaatactattgaaagtaataggaagatataggagaaaaaatcatcatactgaaattagtagaagtgatgaatggaggcagaagaaactagctggatattttcagtggaaaaactcattttaaatcatgaataaccactgttagcaactttccatatttgctctcagtattttttaaagcgtgtcattgtttttgcaccacacacacacatttgtgtttgtatgtgtgtcaaatagtgaaaaaaatcacaaaatcagagccccaagtctaccacccagaaacaaccattatttcattggcttaacatcattttaaatatacatgcaattatcaatatagataaaagcatataaaatagttttataaaaactaattatacagatactattttaacatgaagccttaaaatttttgttttaatattgattgcctctctgtgaagcatgagaacgtttgtccccttgtgtgtccctccctctctgcctctgtttggatttttgttacttgtgtcgttttttttttacactgtgtatctctaaaacattcatggtgacttgaaccatgatttccatatttcattagtactagcactatatttaaataagatcaatgttctcctgcctcatttgccagggctttgcattcttaaattattcatcttgcttcttctctaaattgtctctatttcatcatcaaggtctatttttttaatatttttaggaagggttcagaagtgtatgtgttttatgagatcttccatgttggccaatgtcagccatttgccttaaaaattaatactttagcataatataatatttttggagtcacatttgtagccattgctccatgggcttctagcactaaatattgctgtgcagaagtctgaggagaacctgttctttccctgcgatgagttatttgcttttcgtgcctggatgcttgaaaaagtcttctctttattttcctctggacaaggatatttttcatagttgttttgcccttttttaaaaatcttgcttcgatgccccttttcaaacattctctcttgtcttttaaagtattggtgacttcttgtctttctttatctgagaacagaatgcttctttttcacaggctttttggtttgagagctgaatatttcacgttctttctgattttcttgagaagggaggctgaagggaatactgatgtcatatatgttctttctagaatttcaggtctattttctctcccgatactttgttaaatgtccagtaccaggtttgctttgcatcagcgtgagtgtgtgtgtgtgtgtgtgtgtgtgtgtgtgtgtgtgaagcggcacatggtcaggcttcattagctttctcaaatcattctgaagcagtggatgaattcttcccttaattcaaagaaattattgtttcctattgtcctcagtgagaagcatctttgctattactcagactagggaaactaccaggacacccattcaacttgtttctttctcaatttgtggttatgaacaagaattctcagtaagtttggactcaaccattgacttggaggaggcatcagtgttaggagtcagtgacttgctctgccctagaaatttctgttattttcttagctgtcagagttactgcattaggtctagctttgtttcttgtatgttcttgttttattttgtttataactgttttgcccatgtttaaatgtattctgtgaagtagtttttatcttctgtcttaacctgaaaatcagtaaagggttttaacctaagcccggaaagttactgctatttcctttgcagatggtgcattgtccctgtgggggagctgtctagagggtataaccaactgtgtgaactaggcctatcagaaggacatttcactgaacacctgctggcttttatttttttactttatcttttgtcagtgtcaagggtattatattttttcctttttttttttcatcaccacttacaagccagataagacagaacattcacacctcactgactttctttttattgggaaatttttatttttcctcttgatttattttttcttgctctgagtaggtttataaaactaaagtgaggaacattcagataagatgcactgtcaagattattctaaaccccagcatctttactattttgaaagcaaaacttaaaacaaaaaagattaattaaaaatgttcttaaaatttgaaggtgttttcctttccaaaatgtatttctgcaggaattcccactgatttgaaagataaaattgtatcagatcaacatctccagttaaaaagctagttttccatgttttatttccaaatgctatcaaggggataaaatttaaactttttttgtgcacacatgttattcacatgtgagaataatgaaacataatattccatttttctgctgtatcctttgctacatgtagagtgctgcttgggaaacctgcctcacagtatggttgtgaggattaaatgtgcaattatatagaaagcacttgataagcacttaatacatattatctgtggctgctgctcctttcattgttatgtcatacaatggaaatttcctcatggatttcttcttttgagtgttctttttttacactgttaactccttaaatgagatttttgcataatatttaaagtacaaattctattggttgtccaaagctctatttgagcttttttccaaaatatgttgttttgtttgataaaatgggatgtaagggaagccaatgggctatgttggagataggcctcgagtgcatcctttgtgcccatcttcagaaattggccctcagcctgaatcaccaagcccagtactgtaaaggattcatatatacaacagcacaaccatagccccgccatgaaatactgctggaattcaggagttggacttctatatccttgattttaatcttaaccccactcttgggtagcttcttcgtcttcttcttttcttcttcttcttcttcttcttcttcttcttcttcttcttcttcttcttcttcttcttcttattattattattattattattattattgttagagatggagtctcactctgttgccaggctggagtgcagtggcacgatctcggctcactgcagcctccacctcctgggttcaagtgactctcctgcctcaacctcctgagtagctgggactacaggtgcacaccaccaagcccagctaagttttgtatttttagtagagacggggtttacattgcatttctccaatagttcaattccctttgcacacatgaaaattatatgtgaaatcatcgtatatgaggatcccatcataccaagccatgtataaaagagaaggtattttgagcatagcatcctaagtctggattattttaaatgaatagttattgtacttgatgatttatttcaaatttcctctttaaattactgtaaatgtttcacaacataaatgctactctaatatatttcttagatatataaatgctactctaagatatttctatatatataaatgctactctaatatatttcttagatatataaatgctactttaatatatttcttagactcacagttttgacactaagtttgttataagtgcagaatctcagactccaaccccaacccagacatactgaatcagaatttgcattttactgagattccccagaaattcctaagcatgttaatgtttaatattacagaactaatatagttgatactgttaatagggaaagccataacactcaagagaaatatggatttaaaaggcctttaaacatatgagactgaagctctccattcataattttaaaaatcacaatctaaaactacaacccaataccaatgttctcttcatagactggtaaaagtgcaaaggggtgacaatatactgtgggttgtccagaaagagcactagcattgctggaagttgaggaatgcagggggtataatccctagaggtttttggcatatctatcaaaagtgtatgctttaacccaccaatcctacctctgaaaatttatcctccagatatgcttgcaaaatgaaatatgtacagaaatgttcattgcagaattatttgtaaatgggagttgcataagggtcaatgagggactagtgcaataaatgctgcaataaaatattatacagctatacaaaagaattagagcatatccccttatactgattggttaaactcttcaagtacattggtaagggaaaacaaaagcaaggtgcagaaaaatgtgtatgatactgtttttttgtgtgaacaaagaaacaatcatatatataaatatattatataaatatatatttatataatatataaaaatatatattatatttatataatgcatttatatattatatatttatattatgtatatatatatatttgaattagcctgtatggacatttttaaaacaactttgcagacacacataagaaacaaattaagtatctgtgatacatgtaactgatgaagagcttgccaagacataaatgtaacttctaaaactatataggaaaatgacagataatgcactgggaaaaaagtagacaaagatttttgaccagtctattcataaaagaggatatcaaacagccaataaatgtataaaagtgttcaacatcatgaataataatgcaaattaataccaggagaagctatcactatatgtccatcagctggccaaaattaaattttcttacaatagcaagggcactagggacttggatgcatgctggtagggtgaagattggtgtaaacacttggacaaaaccatgttatgaatatattttctattaaaggtgaacatacacgtgtgttatggctaagcaaccccaattccaggtatgcactgttggaaatatattctcctccaccctaggaaacaggcataagaatgctcttcttaacattattctcagtagcctcagaccagaaataacctaaattaaatatccaccagcagcaaaataaacacgactatacagtgttttttaaaaaaaaaaacaaaacagaaaatagcaagtgttggcaaggatgtagaaaaattagaacttttgtgcattgctggtgggaatgtaaaatggtccagctgctgtggaaaaaagtttatccattcctcaaaaagttaaacatagaatcatcatatgatccagtgttccatacctagatatatttgcaaaagaattgaaagcagggactctaacaaatacttgtatgccagtgttcctagcaaaactattcacaatcaacaaaaactggaaactcaaatgtccatcccagataaatggataagcaaaactatttagccttaaaaaagccatgaaagtctgatatttcctagaagacagatgaagcttggaaacattacactgagtgaagtaagccagtcacaacggacaaatattgtaggattaaaataggcatattcacaaagacagaaagtgagattacaagggactggggagaaggaagaatagggaattattatttaatgagcacagtgtttctgtatgggatgatgaaaaatgttttggaaatagtggtaatggttacacaacattgtgagtctacttaatgccactgaactgtatgcttaaaatggttaaaactgtaaattttgttacatgtactttaccataataaaaaaacaaattatagtatgttcatataaaatagtattatacagtgatggaaatgaatacactataaacgcactccacaggttgaatctctcaaatataatgttgagtgaagaaagtcatatacaaaataatacataaaattaattgtatgtaagttcacttacataaagggcacacaggcacaactaaactatgatgtatcgggatgcaactatcaggatgaagtaaaaagaaaagtaagaaaggaactgccctagaaggcaggttagtggttatctttggtgaggagcagatgaggcgtctttggggtgctggcagtgttccatctcttgatctgggtattcacttcataatgatttgtttagctgtacatttcttaatgcattttacatatgtgtgttacatatcacaataaaatgttatttaggcagggcatggtggctcacgcctgtaatcccaacactttcagaggctgaggcgggcggatcacctgaggtcaggagttcgagaccagcctggccaacatggtgaaaccccgtctctattaaaaatacaaaaattagctgggcttggtggcaggagcctgtaatcccagctacttgggaggctgaggcaggaggattgcttgaacctggaggcagaggttgcattgagcagaggtcacacaattgcactccaacctgggcaacaagagcgaaactctgtctcaaaaaaaaaaaaaaagttttttaaaaagaagtgaaaaaaggggttatgtgttgaggttggtaatacaagaactgcatggtgtgggcatgattctcttaactctactattttctatttgggtttttaactgtaaggcttatgtcatttaattttttcaattcaaataactaaaccagtaaactacaaaatgacctggatcaaatgactgcaagaaattttgattctacatatttaaacaatatagccttccaggaaatgtaaatacttgttttatataaatataaaaacaagtgtcttaaatataagtattgaatttgatttgtcttcagaatccaacattcagtactaagttccactttgaaaccctgttttttgacataggttattaaatattaagcatttaattattacaaattaaaaggaaaatataaaggaggatggatttgtttgtttctttttcagattgaaactgcttggccaaggcctagccagggtagctggcctacccatggcaaggacttgcagcaagccaaattaacttccttgtttggatcacacattaaatttcggaataaagccatttccctggaaaggatcaggaagcattaagcagtagtgctcaagaagattaaacttccatgttgagaatctcactggttatctttggccttctggatagctagttcttttctggcctgtgtacctttctatggctacataaaaaaattaataacctttctaaaagtaaaaatcctatttggagtaagatggcattgcaaattaaataagtattggaataaacaacattagcatatttttttcaaagctatgtgtttagcactcaaaacaatgtcatgttgggcatctataaaacagcttatcaacatttgcagttggcaaataggtgtgttttggagatgttatgagcccttcttttaaaatcactaagatttcttattagtgtaaagaaacatcatgtaagtaaacccagagctctttttaatacatttttttctgttttctcttgtgctactgttttatttttttaaaaccttcttaacatagatgtcatggactctgttcataattcagcagcaaagatcagatttttttttaagttcatagaaattgaagctgtttgtttactagatccccttaaactttgagactcatttttaccaataaatctttacacactaaagaacaacgatctatataaatagttcaattaggtagcctttctctctgctccttaatctgtttccaaagagactttgtaactttggcttagaacttgcatgaagatgttttctagtgttattttcttggtatggttgcattgccttttacttttttttggttttaaagtaacacataattcctgacacacttatcattcaacacataagtgcttctatttagatgtctactttcattttattttttaacattgtactgtaaaaagacaaaacatacctactacaacaacagggattgttctaaatgctgtctacctactaactcaattgtagggaggtttgattttccattttatttgtgtgcacttctaatatacttggcaactccctatcatattcattaaagaaaaaactttagataaactatcataggaaaatctaaactgaaatatttaaaaaaaaattttaaatcagccttatttatttacatgcatatacaaatacacacaaacatgttaaaatgctcaaattatccattttacattccatacctcataactattatatacatttagtattaccatgtactatatgtttgtatgtagtgcagtttatccaacagcataagtcataccttctgggaagatgaggtgtatgtcaagcattggtgttctactgcctgccagttttagtttttaataaaaacaagagaatcacaaagatgaaacagaagcaatccaaagtgtataaatcatgcttctttcccttatgatcctattcttgacttttattacctcattggaggacaaggttatacatctcactgttaatcctgggctaggtcacctgttgagtaaaagaaaagcctttggttctcagattttaagtcatctgacattttaaatttgcatttggagacaataaaggaatataaccaactttttctgtttctttagatcttgaaaaggaagttgtttgaagtcaattctttgttttgatgtttggtcaataatgaaataatcttcattttatgttatatccggcaaagaaaaacagtaacagcaatatggagccaggatgtaaatagattgtattgcttgaaatccacttgggtaaaaaataagcatgcaaagcaagggaaaataatcaatcaaaggggttggtagatgtttttcttggttgtggctttttgggtggctttttggactataagccaaagttggatcttgtcccaactgcttttaattaaactcctacttctttttcttttaatactattttttctcataaaattaataagggatcatggtaggacttttggaaagtatgagtattaattaggatatgggtctagctactctaacagacatccaagtgtcttatgattagagtttatttctactctgagataattaggcaagagctgacgtggttctccgtggtgttcaggactcctaacctggactccctccatattgttgctatgctgctgtcctccaacattgcttccacctcctgatctaagatggctgcttcagctccagacttcacagtcaccttccagtaagaaggagaacagaggaaaggatactctggacattcccagaagtgacacatattatctccatttaaaattcattagtctgtgctcagccacaacagaaaactgggaagtttcatcttaattctagttaatcctatgcccatgtaaaattggtggttctacagaaagaaaagaagactggttattgggagagagctagcaatctttcccagaatgcaaaaaagtataaagaagaaaataactattacccataaattcaaaacctaaagatactgttacctttaatttttggcatagttcatttcattactttactgcattacatatttttaaaaagaattatactatatattataatatgctttttctttttttaataataaatgctctaacattctaacagtctttaaaactttattttaatggctgcatagtatcatatacttataataaataaataaaataaatcaatcaataaataaaataaaaaaattatttttcagttctctaagatatgtaacttataggtcaaaatactcactttaaagtttttatttttcatattacctctcaaaaaggtggtgtaaaattatactcccacagtcatatttgagtactcactgcatcaaatatttctcactactaaatagtacaaattttaagatgattactcatttaatagttaacaaatggcctcttattgttttgatatctatttctttgtgaacaacatagaatctttgaaaaaacaattcttggtaatttgtctatctggtttaaattttctctatatgaccgttatctgtttttctacttataaatttatgaaaactctttcaataatatggatacaacttatctttaaccatggtgaaatattttcccaggtttgagttagtcttttctttcaatatttatattcttggaaatttgttctgttacaatatttagaataaatatttatttgtatctagtaagcaatcaataaatgttaatttaataagggattgaaagagtgaataattagatttattaccacattgtattactcttaatgcttactgctagtcttttcttcttttaactaggtctcccccttttggatgcttttcattttggttttcatcttgaatgactagaacatatattttagcaatacttttgagatgcatatatgcttcatatacacatgcatttcaaaatatccttctattgactttacccaaggacttgggtgattgtatagaattcattaatcctgttttccttcaaaactctgtataccttttcctaccttctggtatgtgacataacgtgtaagagtggcctgagttttatttctttgtaagaaattattggccaagcacagtggctcatgcctgtgatcccagagccttgggaggctgaggtaggaggatctcttgagtgcagaagttccagaccagcctagacaacatagcaagactctgtctctgcaaaaagaaaagaaaagaaattattgctcttttggttttatcgtcctggcagttctaaggtactttttctctcctcttgaaattgccccccaaaattagctcaatataatatgagtgcacattgataacatttcataacttcccctgggaatatcaagaattatattaaatagacagatctggaaatgtttccttccactttgcccttaattcttatttctcttgggtctgcttggcctcttcctctggaacatcagtttatactacttgagtttgcttttcatatatgttgtcttctttcttagtctaagaatctgtttgtcttttgtgcctcttcattctgggagaatttaaagggtttgttcctgtaccagtggtttgctttttctgatctgacatttatgtgctcgttttctaataaagattttaatattgatatggtatttttatttctcagtgttatgttagcctaccctgttcttgttttgtttctgcatgtgtctagctcctgttttatctcattctctggcatttttgtctcattgtttatagagttattgtttcaaggaattttattgatcctataaaccagatgcttcacttgtgtttgctctagtaaatattttcccaaatgtatgctccttctcttcgttttgcttttatatatatatatttctatacatataaatataaaatatttctaaatatatatatttatatctatatacatatacatcacagtatcttcagggctcaatcttttgaaatgtttttattccttttcatatttattcagaattgaacatagagactatgaagtaggccagatatttgaccataaacatgaaataatggtggctagattctagtatattttcacatccaatttttaatttttattttttaagaaccctatctcatctcttaacctggaagactggatattacagtcataggttcatgtggctggttcattgatccagacacttgaaggacatggccattttctgtgtttaactttctgtttggactggtctctgtatcaggtacatagtgtgaccatggatacatgaccctccttgagcagctacccacggcattattgaaatgaagctccaggtcaggaagatgagccatagtttacttgggtagctgcttcataagatagagcaacctactcctatggccttcacacctgtacccaccagtgcggggtttgtaggatactgtgagcattgtcatgtaatcatgctgtgtttatttctcaagtgagaggcttccaagatagttcctggtgtttcccttcaaacaatttctcttctcactaatatttagctaaatatttatgtttctcaaatattgatggtattttttcagggctggatacattagtcctttcatatagtagtccattggtcattttataaggaatccaagaagcatagcataagagaaaaggataaattttcatcctggcacagtggctcatgcctgtgatcccagcactttgggaggccaaggcaggcagatcacctgaggtcaggagttcgagaccagcctggccagcatggctaaaccccgtctctacaaaaatacaaagatttgccgggcgtggtagcatatgcctgtagtcccagctactcaggaggctgaggtaggagaatcgcttgaaccctgaaggcagaggttgcagtgagccaagatggtgccactgcactccagtctgggtgacagagtgtaactccatatcaaaagaaaaagaaaaggtacattttctcagcaccaagtttacgtgaatgccattaacttagcctgtttactgccctgattcctgatttctcatattatgtaatgatatttccatgttattcaatatactgacaaaaattattttatattactatttcatcatagaagcaatatatacatactcccagaagtatttgaaccagaagataatggactgttggccagtagagcagatctgggcacgggacccacagcatccagtacattaatcctttacagttccttccatgtgaattgtctgagtgtgctctttgtccattcctccttttgttaattaatttttaacaattcaacagttattgtctactatatgttagagctcttgaatctttctaagcgctgtccttcaatgaaacacagggatttatttgccagttccttatattaaagagaggatctccttatagtagctgctatataatagtctcttgtctgctttatttttaatataatactttctcagtttcctgttctccttgtaagtaagtatcatggttttggcctggacagggtgaaaattctcatactgtagaaattatcagtggacttttgtctatacttcttccatttgctttgtatatagtaagaccagccaaggatataaattctcatatccaaatttttcatctaatattttaatatttaactttttaatccaacaggattttatgttgaattttttgtgataagagagatttaaaggaatgtactttcctcagaaaacaagacaaattctacagtggtgtctattaaatatttcctacctattcatgtgtgactctttactctatatcccaaaacaatctcacctcagtataagtaaacttagtccatatttatgtttatgtataaatatatttaatatttaatagtgtgttatatatgatgttgtagtagcctgtgatataatatatacatgtacattgattttttatatatttagcacagtgtttctgggatcacgaatatttaataatataaaatttgtgattagaataaagaagaggataagatgtcaccagcttattgatggtaactgccacccccaatacctcatcttgtccccaggaggcttgctaaggcatgtggaggaggaatggagagccagatggtgcctgtggctccatgtagatgattcctacagggctggaaagcaattactcagtaccagtcccctgggaggctgccgacaaggcaggcatgttccccgcattcatctttacaaggtgtaataattaagccagcagaatcatagcattgcctgatggatgtacaaagaatcagcatggaccctcttggcttgttcattacctcaacgtcacctacacaaactagtaattactcacggaatttatggcatttacatgtgacaatgatctttgctgcattaacgcctcctaaagctaaggtccatggggccagttaaaaacctatttattaccaatgaagcttaagcattgaggatttgggtagattttactgacattacacttagagaaagattttagatgtcttcatcaagaagaagacaaagatgtgtgttggacgcagccattttgaatatatttggcagcagcttattaaatgccctagagttagcctgtttaactctgctttaaacaagcacttgacatgtgctaaaccaaagaacttctctatctgaggtgtaactgtctattatatttcttccactgacttaggctagttgcagaggaccctccaatcggtacattggaaattcttggctgaacttgaaggctgtgttttaggtctgcccttctctatcttgcgtttctatccagatgccaatatgaactaaaatagagcttcttgttagtcagcttcttgtccttgaggggcctggaggctacaaaaaaatgagaagtagccattcatcttgatatctggaactcttgccctgggaggctgtcaaagaaagaaaattctggaaagaagaggagaagttactattttttgtcagacggtctagaagcagagcttgagatggagattctgatgcaagtgatttttggagggaatgctctctggagaaagagagtgagaaagaaaaatagggtaggattagaaataaagtaaaggtgggacagaaggtctagcctcaacctggtcccacagggagctttggggtaggaattgcaccacagagctgtcctgcagaatgtcatggactaccagcagcctacctctcccagaggtgcatgcataaacttccaggcatcttcggccagggtggtactcctcagccaacaacagtccttcagagaacggtagaggtgccagctgttagcagctgacaccttcagcatctgcaggatgggtgcaatggccccgtgaagggaacctgagtggggcacggaagtactaactacagttactgatccaccttcctctttcttgcctccaacagtcactctattactctgttatgtatagtcatagcatttatcactatctggaaatagcaggtatatttatatatttactgcttattatctgtctcctttccactagataccataagctccagagcacatcagtgttgtatcatcagtttctaaacaagtgccaggcacatagttaggtaccggggacacaatttgttgaatgagtaggggcgggatgaggtaggaactttggaaatctgtgtcatgcccaactgtagtggatgctatcagtgtcccatccagatcacctcagatcctggctttttcaacccgggttcccattctccagcttctgcatgcttcactcctaacaagtgtcgtctgcttattagtgtgtgctttattagttgagatagtaatagctagaattgattgagtgctttcagcctgtctaacactgctttaaacaagcacttgacatggactaaagcagtgcttctcaggctttaatgtgcacacaagtcccctgtggatcttgttaaaatgcagactctttcagtgggtctgatgagggacctgaggaactgcatttccactgagactcccgggaaagctgatgctgctggtctccagaccacactaagagtggcaagggatttgttcattaatcttcataacagctcggtgaaataggttctattattatttccattttacagatgaggaaattgaggcagagagaggttaagccatgtgctcaaaatgacacagctggcaagagatggaagcagaatttgaatccaggcagcctgaatcccaaatgtgtcacctgaaatactctgaataaaggcctctattgaaagatgaagttataagtcaggttgaccaggctaacaagtaaagacaatgcatccctctggtggatctcacagtgaataaagtctatacactgccccaggacactcggaatcttgaacgagcatgactcaatgggagactgttccactgtcagtttctcttccagcctcccatgactccaaaccattaggctgcagttttgacagtgtttcccaatggcttgaaagtaactaatgagtgagtgccagtgcctaatagaggtggatgatggcagttataatttctcaaagatcatttgattcatcttttgtaatatttcaacatttaatataaaacagcaggcaactggagatttataacttgattcattctaattgatttcttggcttccttgggtctaattaatttttactgtgtaccctaaaatggtgcaataggcttcctgaaagctgttagaaggcagctgtatcatagtttataaaaagctgaaacttggcttttatttgataggtaaatagaaattgattttgcttttgaggtccagacataaaagagaaaaattgactccagaactcaagagaagatcctggattactctgtcttggtttgggttcccccaggaggagattccgagacaaggactctgaatgcaagtagttttctggaaggtcgtgccaggaaacctgccaagaatgggaaagtgagacagggagaggaggaagccaaataggggatgcattgtcaaataagtcatattatgggcagctggtgttcaatctatggagttgtctaggagacagcacaggttcacacttaggttttattccaaccaggaacaagtcaccaatcacatcagtcctgggttgagggctactttttcacattaactccaagcattctggacataggcctggctggttttgacagccagagaaaactctccatcaaagagatgaaagcgcttgcacttgaagctgtagggttgggtctacctgggaataataaatggcaaggggatatagacagagaacacagtgtctgttacaatgtccaaatataaactgtgctgctttgaccttttgtgcaccagtgacttctccccagttcccagccgcttgcccctgaccttgtgtagagcccataatcaagattcctgtgccactgacttgaagacctttaactaaggcagttgtccatcttacattttataatacaacactgtatcaccatttggaagaacataaattataactataaattatataaattataagttacaactattgacaagattgtgcatagtgtaaagtgctttgggattttattcatcagtgctcagaatagacctcatggtgacttggcttttagtggaccctccagtaacaatctttttgtgaaaaaaaaaaaaaagaaatgagaaaagaaatgccccatcaaactgaaaattgagtagaagcttctgtgttgcagtaattttttgtgggcttaagatttaatcttgaaaatgcaacatttgtgtttagcattgtcaaaggcaaaagaggaataaaatagtgccttccaggtcaatgaaaaataaatccagctcctgatcaggctctgctgcttgcagggtgttgttctctgagtgttctgattggcacaacacaggctttcttgccacctcccaggcccagctgctgtttgcccacctgtgagccttattcctgcccaaaacaaggaaaacagcaaaaacagtggggccactgaaactgggctcaaggtccaagaacagctttccctttgggttctgttattgccaccatgaagctacttgtggaagcccaggagcaactagttattaatctgttcctctcaactatttctttaggaatcatgtgagtgtatagacactacagacaacgaggatgatttcaaaaccaaaccatgatttatttgttgatatttggaaatgtacattcaacttcttgtgttttgttacacaactcgatggcacattttcatttttgttttagtttaattaacaaagggtgtgctcaccgtgtgccagaccataccagcacttggcaaattaaactcatctagtcttcataacttcaccatggtgtaggtactgtctttattcccattttacagatggggaagttgaagcactgagaaattgtcatggtggtattatcatgaaaataacattaagattgatgaaatgtatatattaactaattttgactcacaggttaatccttctgcccttccctgatcctatcccagatggcttttggaatgctttccaatacatattaaagggtttatctgtgctatctctggaatgttgcccaggctctgttatagtgaagggtaggttataaagtcagcacatagtggagaaaatgccatagagtccaaattaactctgaaaatgctttcaaatacctcaaagtactgcagtgtggttttatgcttatgaccctctgtggtaattctaagggagctaaagttctagaaaaactgagcctgactgaagaaagaaactttcaaatcactcagcttttaagataactctagggtcgaatggggattggatgaatcaatcaaaaagcttctgcttgcctgcaaagttgattcctttctagttacacatcaagattctttaatctcaatgtctggtaataggcttatttgttaccttaaacatatttgttcaagcacagttgtgctttttagtgaaatgtaaccaattgcttaagaaaagggtctcaagaagtagaaggcctgagtttgattcccagactcttcatagatatttagcaatgacaaattacataaagtatttgaccttcagtttgttcatgtttaaaatgggtgcataatctgtacctaaccttataggttcagtgtgaggactaattcccatgaagctctttgaagggtgcctggcacttagtaagggtgcttgaaatgtcaactcttcctgttattctaaagtcaggaggaaatttaaagaatcggttatgagattcagctgtaccatattgtcctgcataatgctataattatgaattgacttaaaaggggcctggttccattacttacaagcttgtgacattaatcaagttactcaactcctatggctcaatgtccacaactacaaaaagaggtttttaatgttacatttcttataacattattgtgagcattaagttaattaacatatgtaaaactccttggacaatgtctgggtttttaaatctgttaccactgctgtacccagaacgtagcacatagtaggtccttttgttaagtgggtgaatacactatcagtagccatagtaggaagagcttatcactttaaagtgttatgttttgattgacactgtggttgcaaaaacatggtttttggtcacagtgtgatttgatgtcatatgtggtcacattcattaatgtcaccactgatctcttaaaaaaaagtctgtaaatattgagaagcccatcaagctcacagtggtggatacaagcttcccaaaattctaagttttgcttggtagcttgcattttattattggcaacacatactgtcagttatttaccttgatagacccactttattcattttcaagaaaatatctgtcacatatccaagtctgaataaccctagttttcctgtcattctttcaagtaaaaatggtgttacttgggaagaatgactggttcagcttaaaactcagtctcctaagtgtttcagtataccggagaattattttatgtatagttctcattttgtcatacagaacatttgaaaagccacaaagagtaaaaaaatttaacaaaattaataacttttagcacttcaaggatgacattcttgaagtgtgtttttaacagtgagtgtgtagaatgaataatcaaatgatttctggtacactggaagtctggtgccattgtcttgatttgtatgaagacataagcagttttttttttagcattgcttttgtataaagtgcagatttcatctcagtgaaaaaggcaataacctcttaatatcattatgaaattattttgacctcagggaccctcaaagggtcttggggaaccccagagatctgtgtactatgctttgagaatcacttagctacggaaacattcagtagataaaactggccagtgaaagggatagcagagtcaaggatgacaccatttcccattctaagaaagtgagtgggcacagatgccattgcagagaagtaagggactagagaaagggcgggtctgtggcagaaaagataggttcgtgttggtcatgaggcatctagaagatctatttgagttgcacatcttgggacgtcttgtgcaattgttcattcaagaaagattaatagaacatccactgtgtgctggaaatgagaggaatgtttttcattcccaacctttttaatgcagaagtcattttcttagtgaaattgtaagcttctttagaggatgacctaaattatatatttagaaaaaaaattgtatgaacctaacacaatgcaagacattgacaaaatatcccagtttacaaaaaatgatattctccttcctgacttcccacaatgacatacagtttttcttccaccctttatccaggtcagacagtagacacagtcattctaaacttcatcattaatcacgaaaatgcaaattaatatcacagtgagatattgtatatacccaataaactggtgaaaatttaaaaatctgacattaccaaaagttgaggataaagtgggtcattagggatatgaaacataccctatgactcagtgtatgtacacacaatttatatgcatatatatacacatacttacacatatgtgtgcatgtatatatttatacatatttatacatgtgcatgcatgtatatgtgtgtatatctacatgtctatatgtatatgtatctaagtataaaattgaaggtaagatgaccctggactaatcttccaactagcagagcacaagcactcctgataagatggccttatcagaagtgcttgttctctgctagttggaagattaaattgacaccaccatttagaaaacaatttcacacaatcctgtacaattagacattacactccctataatccagaaaatccacttttagggatataccctgccaaaagcctagcacaagtttaccaagggatctgcacaagaatgatgatagtaatatgttaataatgtcaacttaaatgaccatcgataggaaaataactagtggtatagtcccacactggaatattacactgtggtaaaaaatgaatgaactactgctacatgcagcaacatcttgaaatcttagaaatataagccttaaagataaaagaaaaatgcaaaagactacgtgcagtatgatacattatgttcaaagcaaacataactttaaacatattatagtggataatacctgttggataaaactatacaatgaaacaggactacatttaacacagaattttaacaaggtgttttctcctggtgggtgtgtagacaaaacgatgtgatacaggaagaatatataggtcaaggcaatgatataggtaaccttctatgttttaaattgggaggtagataaattggtttttattataatgacagaatacacacaaatgtgtgatacacatattgctgagtatttttatatttataacaaaataatattaaaatatgataggaggaaaggtttctttggtaagcctttaaaattttgtaactttcatgttttacacatgtattgtaaatatgaatttttctgcatgtctcctaataaattatgagagtttccagggcaaaaatcttatttcagtcatgtttacatcttgccttaaaacaaaagaatttctaggctctattatggaccaaatctatgtttgctaaccaaaaagaattaatcaaaataaataaataaataaaagctgctttctagattgatctatagccaaaataattcactgatgttttcacttatgtacttgccaaaggatattagctatcatttggcatttagtctctctctatatatatatcctcttttttattattttatttttgagacagagtctctgtcacccaggctgaagtgcagtggcacaatcatacctcactgtagttttgacctcccgaactcaagtgatcctcccacctcagcctcccgagtagatgggactacagttgcacaccaccacgcctggctgatttttttctatttttttgtagaaatggggtctgactttgttgcctaggctagtctcaaattcctgggttcaagcaatcctcccacctctacctcctccaagtttacttatttttaacaggagaaagattactgaaccaattttgactaagtttatggggtgagttcgtctcaaccaaatactacagaggattgaaatctatattaagatagtcactgcaattattttcatgttaagaccagatatcagaacatttttaaaacgaatatgtggtgttctgtcagtaattagccattgaatatgtcaagttaatcacctaattatgtcttgctgtagaaagacatacatgagaaacttacaagcctgttttgtacaacgttgtgtcttaaacactgtgtgtgatccatctgtcctctgaaattacttggagtcacctcccatcacccgtcagtgttctttcaggaatcatacagattaatagagtcctcacttccgtgctgtgctctgaacctttttaactttaatttagtcctgacagtggggaacaaggacaagtatatgccctccaagaacccgagagctctctacattttgtctagctgaggtaataaccatgtttattggcctaggcaatgtcttttaggtcccttttcccattaactttgtagttgtgaacagttgtcttgaggttaggaggaaaggtgatttaaggaaaaagaaggagcagagggatggaatgtgtacatagccctttctttctgaattatgtctccttgtttggcattccttcctctgggtgttttgtttcattggctgtggttgagcccagcctttattgatccccctgtcccaccagcactgtgtgatgtaaatgcaaatgtctggagtcatcggggatgcttcataaagtgtggagcagacctagagaaaggttatgaaaatgtacaatgcttttccatcgttgtagcttcatgcagacattatatatcatgaaatgaccatatgtttgagtaaccatttatatggaagatgagagagtttgaaagttcatttttttgatacaaagtattttctactcagtcgcagccttttctatctcagtatatcatcatttatcttgctttgaatgaacttgagtacatatagttgtgtgtatatgtatatatatacacacacatgcaaacacatgcatacacacacacctatatatacatctgtatagatgtatgtatatgtacatgtacacacaatatatatgcatacatatatacatgcatactcctgtatgtgcatatgcatgtatacatgcatgtatatatttatacatatgcatgtatatctatatgtgtatatctatatgtgtatgtttataagtataaaatgtacgtataaaattgcggataagatggacctagtatgcgactataccacttgtgtttcttttccatattgaaaattgtcaatctttccccatttctgtagaaaaaatgaatttacactcaaaaaagttgattagccatgttaatagtaataatgttcaatatctggaaattagctgagtacatcgatatacaaattagtcaatacaaaagtagtatatgaaaaagccactaaataacatggcctctttgtttattgataaaaaattccaaaagggaagtggagaaaatggagaaaggcaattgaatgccaagtaataatcgttataaccactgaggggtggctgagagtggatagtattgattggcaaaagaaagctttcttgggattctgaggatatcagtatcattaatgcacaaccactgagaaggattttaaaaggtgaggcatagacatcactgttagaaataacagcagggcattttttcaggaagctctggccatttggtcagtcaagagctattaatttcagtgaattctgcctgcataatatgtgcagcccctagagaggccaccttcaattctaaacctcaacattcatttgctgtcttaccaccttagtagatttctttttgggtttttttttttttttgccaaaatcttcactgcatgattttgcaggctcacatgcttcttgtttgccattttaaatcacagtccccatcaaatgcccattatctttaataaggtgaagcaagaggctgggtgcttggctcacatctgtaatcccaacactctgggaggcctagcaggaggattgcttgagctcgggagttcaagaccagcctgaacaacatagtgagaccctgtttctaccaaaaataattaaaatatacagatatagtggtgcacatgggtggtcccatctacttggatggctgaggtaggaggatcgcttgagtcttggaggtcaaggctgcagtgagccatgatcacaccactgcactccatactgtgtgacagagcaagactatgtctcaaaaaaaaaaaaaaaagatgcaagaacttgaatcaagaatataaagctctgcgtctgcaccacaagagacaagagtaattggtagagtttgtgttatcctttaaagagtgcttgtgactagcagatgctgagagaaaaaccaacatatttttcttgttcctcaagctactcattattatcttgataatatttctaatatttatttttttaaactgacatgctttaaagtaaatatactgaaaaaaaccttattcactgactgaactaagtattccatttagaagtgtggaattggggctttttttttttttcctcaacatgtaatgagtcagtgtggaatattgattattcatctgaatatttaaatcttgttttgtttttggttttgtttgcatgtgggttttcttggctcagaaaaataaataattgcatgtaaaaaccatttattctttaatttcagaagtatttattcagcatttcttctattcaaatctctgatggtattacatagcacacaggaattcaaatgcagcagagcatctaaaacataaccaaacagatgtgtggggcatgtgttatgctaataggaaaggctatgcacagcatcactttaaccataaacacgctccattaagattatagacatagacaggtaggtattaggttggtgcaaaagtaattgcaattacttttgaaccaacttataggtaggtagatagacagactagattcattcattcatttattcattcatttttctgaagaagtagcaaaagagagactgcaaaactttctaaaatcctctagaggcaaagccaacacattatagcacctgtacttcccatgctgcatcacacaccaaatgtcttttcttgctggagtggccccatgtctttctgctggaattcagtttagactctcttagtctgttctctctatccattatcctgaccaacatataaaggtgtataagccaagctgcccaataattatgctgtaaaacagtggttttgagtactttctttctttgtgtttttgatgaatgcacaataaaatctacatttttgtcattttgccttggaatacaagtaaccatctcacacacacacacacgtagacacacacacaactttcaggcccaggcactctcccattctcaatcaacagtcttgcctcaagggcatatcattcaatctcatggatggaaacatacctgctgtccactcccaaattcacgtcactgtttcttccatatgccccttttgagtttaaggctgtctgtctgacatttccacttacatgtttctcatgcaccctgatttctcaactgcaactgaattcttaattttcatatacctccaaaacggctgttcctcaatctttcctttttagtaaattcgttagctatcaacttagttgcccaaactggatgtcaaggagtctctctgggtaccccttaggttctcatcttctatgcaatctatcaccaccacgtcctgttgatttaatgtccaaaatacatctaaaatccacccacttctctccattttcactttttctcaaggctcaaggacttactcttgcttaacttggctcactgctcctcagggcgcagctataatgttgccttatgtatcagctatctcttgtcacaataatgttgtgtagcaacaacaaaacctcactggcataaaacacaacagtaggcatttgtcacatttgagtgggtggggttcaccttgatgactctactgaccttggctgagctcactcacatgtctggggatcatcgagctgctggctgacttaggatggcttcagctaagaagactgggatgactcagttctgctccatgtgtctcatcctcccataggctagctagggaatgttctcgtgggaatgacagaggcacaacagcacaagtagagatatcaagtacgagtatttgttcaatgctctggtgtgttacatcttctaatattccattggcggaaacaaatcacatttcttagcttgtgatcaaggggcagagaattagactttgcttcctgaatggagatctgttagttccataataaggacggggatatagagaggatgatgaattaggatgattaaagccataaatccaccacgctaggtcagaaaggcctttctccccaaattagagtctcacctctctcccatttatactctctcacagcaccctttctatgactccatagccatttgtttggaagtggtttttttttattattattatactttaagttttagggtacatgtgcacaatgtgcaggtttgttacatacgtatacatgtgccatgttggtgtgctgcacccattaactcgtcatttagcattaggtatgttatttttaaagaactatgtactacccaaacttgtaagcctcatgagagcccagagaaaggagctcccttttgtttattcactcacagagcctagcacaatgcctggtacattgttaagtgttcagtaaatgtggagtggaagacaggaatggattggcagtggaattctcaaggtgcagatgatatatcctcactatagccccaggctagagtgctgcttacacctgcaggtaaagataaggacttcagctaataaattggccctcctactacaaggcctctggtttcattgagccttttgggaaatgtaccagttcccgaggctgtgattgtgatgtacttctcaccctggaccagagtcagggcaggagtcagttctacaatgctgcattacggagagccttgcctgcctatttctgctggttacaattccattattacaggacccagtcaaagcagctggagaaactctactgtatccctgaaaattcagctgtcctttgaggagtgtaacctaagacaatgtgtactctggtaatgccatgttctgcaatatcttccatgccaaggttggcatttttgttagtaatactttcttatagtgcaaagaaaagaagctgcttttaaagagctgaatttggcacctcataatttaatagtcaaatcatttgctgtctattttcaagggttttcaggggaatttaagaaccaggaaggactgaaagatccataatactttctttttctagcaaattattaatgcaaacagcattagtacaattgaatacaattgcaaggaatcaaggggattataaatccaatgagagaaaaggcagccagaatgctaagagagccaccacccactgctccaccatgacccgccattccacgtcccatgctatcctccacacactagacacatgcaactcctgctgccactgggttgtgatccccattgtccttctggtcatgctgtttctaccgtctggaataccctcccccacctttcctgacagcccaggctctactcaacatctaggcactaggtataaatttaaaatgtgcaaatgctttgacccagtacatttgctttgaaggatttatcctcgggaaataattggagttgtgccttgagtttgcacggcaatatgccaggacatttgcagtatttacgtcatctccaggagttaggatctggtggtcaagaatgtggctttggcatcagactgccttgattcaagtcttgccttcaccatttgctggttctgtgactttggacaaatcatttaatccttttgcctcaactgcttcatacctaagatagaattgatatcggcaactaactcctaggtttactgggaagagtaaaagtgtcagtaaatgtgaaatactttgaacagtgcatggtgctcagtaagaactcagtacatgtaagcacctatgctttcaaatggactctcattcgttgagaatttttcttcattttcttgctgtagttgctattagtggaacggttagaaccttctctttgtattctttgcaagctttaacctactgttttagatatatttgatcttcagtgaacagttgttagtatgtcaagaaaagtaatgaaggttcttaaactaaacttaattttttatggaggaacacaaggcaatttgctaattcggggatctacttctctttcatgatagcatctgcagatgtcatgacagtttttcaagaccctggcaacttgataatgtggcccaaatagggggccaatttcattctgctatgagtccaatttaaacaggctcgattgcgtcaaaattagacttttaattatactttatctaatgtcaggaatcagtgttgtgctttagctatttaaaactttggctttcaattagaaatttgatagcaatgcattgaatgcatctcttcatcatgttttcagaatttaaatatctaacttttttcttctttgattaaagaggattccaatcattgctgcttgtatacaatgtaagttacatacgctaatgcctcttcagttttttaatttttttaattttattttttaacataccccttcatttatctatatacaaattgtgtcagaagacaaaattatttctgtgtttttcaaataaaaaatagggtcccttttatttttcaaggaatgatcttctttattaaatattatattataccacaatataacatctagacattgggagggatctttgaagatggtggaagacagtcttgatataataagattgaagatgaaaataggctaatagaattgcaaccgattatactgggtgtacccactgctatgctgtgaggtagggatcaatgacaaagctttgtgtacttccagagattggaaatatctatacaaagagaggtaaggagtagcctttccttgtaaaagtagaattgattccatattatatatcctctgtatgtccccgaaatagaaggtctgctcccatgagcagcttctcagaacataagaagagcatctgggctgaaaaaatgtttcttgtttcctccttgttacctattctttgtatagatccggggtttcaacgtaaaggtcatgattttatctcctcagtcatttgttgctgggcacaatttgcctttatggcaagtgttgttgctagttcttaaaactaccagaagagatacttaccctcctgagcagacagaagctcaggagtgccacaaagatgaatatagattttaaaagaaatttaggtaagaaactagggaagtgataaatcatggccccctgttaaacagaaaactcattaactggaatactgcgttctagttaagtgacattttactatccttttttgtacatagagcattacttctttaataaaaggattacagaagcacaatataaagagggtaatttaaaaatctctaaacagtgaaaatactactttttacgctttgaaatggctttttatgtccagtccgagtgacacttttcttccttagtaaaatcagcaggcacttccaggtggctgaaatccaccctgtgcattgttgctgagaacatttatagcacattgttcagattagaatagctgagaacgacagggggctcttcaaatgtgcctcatcgagtcccaaattggagatgtgtttttgtcatttcaaagttttggcagtagggtctaggattcaaagcaaacaccagctcctgcagaacacaagccttaattaatttccagcaggaaatgagtgattgccaataagccatgaattaaaatggaatggttcaccaaaaaccaggtcctcatctcaaatgaatagcatttcttgctgttttcttgaaagatcatctcagactaagaagtgagcaagctcctatgacagctctctgtctgtaagggggtagttggtatggacaaacaccaaacagtaagtcctggcccagtaaaaaatggggaccaaatctgatggactcaagggcattttgtcagtatctctatcatgtagcctgcaatttttatggagaatctgtctatttttctggcttcattatttatcatgttgtcattaagattcagtcttgagaaggtccttaaaggtcagctgttttcatcattcagtcagtgcttacagtacactggggctacttctgccaaaggggtgtccagttgctgcttgaactcctcttgtggccagaaactacccccttctaagagaagcctgtttcatctctgagcagctcagccagttttcattttttcttaaaattgagcaaaaacgaatcccctgttgcttaaatccattgagcctggtttatccctgagggccaaacacaatgaatcaaaaaccttcttctgcttgatagctctttaataaaaggggaaggcaggtctcacactccccctgaggggcctcttctgtggacaaacatctctgagcttttcctatcttctttgagagtgctttgtgtgtgtgtgtgtgggtgtgtccacttgctcttatgtaaattctaattactattgtaataataaatagccaatacatacagaatgcttccagtgggccaggcagtgttctaagtgctcccataatcctcacaacaactgtatgaactggttactaggattatcccattttacagagaaaaaatgaggcacagagagattaagaaacttgctcaccaggatctgaatccactattccacactcttaaccccagcactataaagtttctcatgtcctcatttgtctatttcagccatacctgtcctggagacaagagccattgctagttttctatggggaactgacattgctatcatctactccacactggctatatgctaggaactatagattagttggtctgattaatcctttgaacagtcagcaatcattgtttttgaggatgtgttgttgttattgttgtttggtccagcacttccccatactatccccattaatcattaattatgttgttaattaagaacacctgtacttaactcgtggccatttattccttttctagaactatttattgtctatattttagagaaccttaaatatgaaaatggttaatccagaattttttgcttgggccaagcaagcaaaatgcattgctgctttatgaagaagaccttcttttggtaagaagacagtttttcatattttcatagccagcaattaaaaccacatgagacaggaaaaccttcaaattctttctgagcaaaatactcttcctagtgagaaatgtgctcaaagtggttaaagataatgggaagcagcagaattaggatttgaactcgtgtgcttctgggccaaaaccatggagttcccattttgcaaacacaccttggggtctgtaaccaggtgcggctccctgcaggtgccaaccacctgtggtaaaggcatgatgagtccacttcctgtaaggctcagccctgctagtcgcgactagcgccctctagtggtccaagagaaagggtaaggtgagttccggtttatgatttgacttgaggcattcggaggctaaacatccacaaggttagttccctgaacccctataaaccttgctatttatatctcttcctcaactctgaggccctcaccctacatcggctgcagtacagattcagcctttagcgacggaattatgtactgaaacactcatttctgtgccgctgcagtggttagctttgatttttatagagatgcacatgagaaaacagtctgagcctggagagtgacttgtgggctgctaaggtaaattgaacccatgtgtgtggtatcctcatgattgggagcagcagcagatggtgggctaggatgcctccagaaatgggcttcggaagcataaaataaggacttgttctcttacatctgcctctgttggggtgtttaaagaattgttgggattaatgcatttttcatttgaagtttaaacactctcagaggatgtttagccgatggactattctcattatagaatgaattgcttcactgggttgcactttgcaaagattggctgcagggagtaagtgatttgttggaaaagaaggagcaaaaaagggtggaaagagcaaagactcagtgtctcagacaagtcttcaacttttcctctccatccaaaatgaattcattatgactgagaggttccagttggactcctggagacatttagaagtgccccagaaatgccacctgcaggtcagtggtcatgtcaaactagaatcttctgcacaagtcaaatataagaaggaaacttgtttcatttgagtcagatttacttaagttttggattgactcctagatcggcttctcactttgggcaagctccttaatgtctgcaatccttgttattttcatctgtaaagtggagcttgtgatgcttactttgtgagatgtctttggaatcaagcgaagtaatgtctgtaatgcgaatagcctagtgcaggcatacaacagatgccccatctaatgggattatattaaaattattgttgttttaatattggttatgaaaatattgcaaagtgaatgaagaactctccttttacccaatttttttgttcaattttgtacgtgaacagtttaaggaatcttttaacggaatttttaaaaacacttggaggcggtgactctttaaaagctaaaccatgaaatgttaccatcagaaaagagctgctgctgccatttacaagcattaaccaaatcctcaagaattaagctagaactgagcacattcttaacaaggtggtttcgagttttcagatacatctttatttcttcagctcatttgcaaatacttatctctgatttaaatcattcaaatgacttcaggaacacaatggaagcagagcagaactaagtgtttccaactgtcaggtctggtgagggatgatgtaaaacgggacatttagctggcatcctgcatagtctttaaatagaattaacaaaagcttccacgtttcaatggctaaaggtagtgtttattgtaaaggcagcatgcctggagacctaagagtgggagtaggggggtgggcatgggcacgtgtgggtgcaggcagggcattctgaggggtcagttgaaaggctctgtctctggattcagctttaactggttctaaaataatgaagcagaaatgactttccttctctctctggtgtcagcttcaaatgaattatggatactgaacctacagaggtaatgctgattaaataattgaacaatccattgattaactacagattgtcaattggaataatctgtcgacgacctgactgcccacctttagcatttagacagtattttaatgttaatgaggttttgaactttttgtgcttttggtttggtgggggttttttttgttagtttttgagggtttttggtgggttttttatttttggttcagcacttccccacctaatcccaattaatcattaattatgttgttagttaagaacactgggctgggcacggtggctcacacctgtaatcccagcactttgggaggccgaggtgggtggatcacctgaggtcaggtgttcgagaccagcctggtccaacatggtaaaaccctgtctctactaaaaatacaaaaattagccgggcatagtggcacgcgcctgtaatcccagctactcgggaggctgaagcaggagaattgcttgaacctgggaggcagatgttgacagtgagctaagatagtgtcactgcactccagcctgggcaacagagcaagactccatctcaaaacaaacaaacaaacaaacaaaacaaaaacacctatacttgacttgtggctgtttattccttttctagagctatttgttgtctgcattatagagaactttaaatatcaaagtagttattcctgaactttttacttgagtcaaataaacaaaatgcattgctgctttgtgctttatgcagaagaccttctcctggtaaggagacagtttttcatattatagccagcaattaaaaccacatgagataggaagaccttattctaattctttctgagcaaaatacttgcccttaatttattatttaataaacacatatatagcacttaccatctgccaaattatttatattcttttaaatattaaccaatttaatcttcatagggactttctgagtaaagaactatgaatgttcagccgggcgcagtggctcatgcctgtaatcccagcacttcgggaggccaaggtgagcggatcacctgaggtcaggagttcgagaccagcctggccaacatggtgaaaccctctctctaataaaaacacaaaaattagctgggcacggtggcaggtgcctgtaatcccagctactcgggaggctgaggtaggagaatcacttgagcctgggaggcaaaggttgcagtgagccgagaccgtgccactgcgctgcagtctgggcaacagagcgagattccgtatatcaaaaaaaaaaaaaaaaaaaaaaaggacaactatgaatgttcctgttttacagatgagaaaactgaaatacatggaggctacataacttgtcagagatcactagtaagtggaagaggtgggatttggacccaggtagcgtccatagcttaatcagtgctctctcagtactttttggtcataactcttaaataagtgtaataataataaaaaataataataatgtctgccattcatagcattgtacttcttctgcctttgtagtgtagttcattttgaatcccagatagggactcatagatttttttctttttaatatttaaaaaatctcagatttgttgacttaaaatccatatagttttttttttaaatgtggacctagaactgagtattattgggggaaaaaaaacattgtaaattagtaagtagtgtggttcatgggatcatcaactgttagcgctgggaggaatagtatttttctgacccattttattttgggaatgaagaatctgaggtgggagaatctctggttttatacaacagtaggttgcccatggctttctttctgaggagactgggggagacacttggataagagaaggacttctgtgaacaagggggtatgcttttctaaaaatgatttgattaatccttgaaaatatccttctacgaggcacagagggaaatcctccctacccccgaataatgcacaagaccttactggtctacaaaggtcctgcagatagaactaaggacaagagaattcctatgccgctgtaatggcctacataggaaaagcattcttcttgttgttgaataagaaaacataacatcctccagatttctaccagtgtttttcttatgactggaaatagtaagtagaacaatgtcatacttggacaactatattcaaactggctaatagttttgttaattgggactacaaatgagaaatagaagtcccatgatgacctagtccattgaagtgtcaagtttaagtctcctagttcagaatcaaagggagcagctatagggtgagaagcaatcgcgtccataattccgttgacagcagttttcttcgggctttgattcatagctcatctgctccctgctgattgccctgagctcagcaatgccatgctggtttccatggtgctgatttgcataccaaaccaggacttgtatttttgtgtttgcctcacacatttccagtgctaagtgttcttctaagaaagggattagcacgctagccaattaagggagtttgccagaaataaagcacccagggaatttttcttcaggttatatattgctactgctatgcctaagtactgatatggttgattggttttcttaggtcagcaatgagtcttaaagataaaatttctactgtgtaatctttagtgttttcttttttttttcaactatcttttaatcagtttcaaacatttcagtgattaaaagagagatttgttgtggttttgttgtggagcagaaatggatttcaaggagtttaccttcagagcttttgtttttgttacggtgggtctctctagtggaaaaaaaatttccccatccctttggaaatattttctttaaaggaaatcatgtttttaaaacaaattatcgaaatcagctttctaatcaatttgaatcatctgaacaaaagctggaaaatgtttagttgtaaatttcaccaatgaatactacttagcaacacaaagttgaatgaagttcaactgttagtcccaagcttatggatcaatctcaaaacatgatgctgagtgaaagaagccttttaccaagagtatatactgttttattgcatttagatgaatttataggacaaaccaaattaatctatggtgaaaaaagaaacagcagttgcctctgggtgctgggacagggatggcctggaaaggggtatttgggggctgtctagggtgatgaaaatggtccattaatcatcatttatcttttgtttgttttgtttaatttccatttttattttagattcaggggttacatgtgcaggttggttacaaggatatattgtgtgatgctgatcccgtcacccagatagtttttcagtccttgaccccctcccactctccctccttttggagcccccgtgtctatcgtttccatcttgatgtctgtgtttacccaagattaactcccacttataagtgagaacatgtgatattggttttctggctttgtgttaatttgcttaggattaaggcctctagctgcatccacgttgctgtagaggacatgatttgttattttttgtggctgctgcatagtattctatggtgtatatgcacccccactgatgggcacctgggttgatgccatgtcttttctgttgtgattagtgctacagttttatactactctcaccagcaatgagtaagctttcccttttttctacagcttcaccaacatctgttattttttggctttttaagaataaaaaatggtctatattttgttaggagtttaggttatgtgtgtgcattcatcaaaacttgtaaatgcccacttgggatgtattcatttcactgtatataaattttacctgaatgtaaaaaacaatctgtaaaaataatgttcttcattgtaaaatctagagtgatcgttatcaaagacttagaaaaactagaaactgagaaaaggtggtatgatttgtggcagttcaattggcagaatttagaaatcatgaatagatatgtttattctgctatttcaaatacttatgtgaatctctagagccatgtgggaagatatctgcttcctgaagctctgcattcatttatagttttatgtggtcagggaggatttgattgagttggaaagtggatcatttgtacttcactttgatccatcttcctttttagaaacgagagaaaaggcatctgtgattgtgcctctgattgggtggcatccaaaatcttgtttctcagggtgagcttagggttcatctctattaaacgtatcatttgtcagacattggcatgtctagtgattcggaaagcccttggagtagcacagaaatgctatcataactccggagtgatcttttgcccttaccagtactttggcttttttaagttgccacttgaacttgggtaagaggccaaggaggtggtggctgaggcagtcaaatcttgtggaatgtggctgtcaattgatgccctaaagttaaggttggtctgtattccacaattgacaaaaacacatatacagttgtgggcccagaattggagtgatgagaagaccttgcataatgtctacacaggaggagagcaagcctttaaactccaactgccttgtgaatgttcttctcttttgatgtcccctcttccctctcactgctcaacctctaagtccatgctgcttgcatatacagataacggtgagttgcagatgatattataggtggcctatccagatccatgtcacctggcctgtgcttttagagccagctgctgtgaggattagttgggaagactcacagctgccttcactctcagagagttatccttgattgctggaagttatctagccagggttggttatagatctacccacccaccaatgacatcccctctccccgcctcctcacgtccgcttctcaagcgcgcatacaattcttctaccccgcaaaagcctacaggactatcccattcccacagttaggaatgactccatggtacttttcatggtccagagctctctgtgggatcaggccaaaaactgcactttatttatcttcttcatgaagatggtgaagaatctcaacagaccttcaaagagatcaaggcttgcatctaagacaggatcaatgattgcctctaagaagaaattacacctggatatttgggtacctgtaattaggtgttggctatgttaatgttttgcctgctgtgaagctactgcatgcggtgcttgggtagtgccactcttcttacatgaggcagaaccaagaggaatgaccctcccacatagtaatgaaggggaaaaaacaaggcaaagcatgtttatttttaacattttgctcttcttaaaagggcatcgtttacacccattccatctgtagaactttcaacacaagggacacatactgaagtaatataaactctgaccttgagttattagaatatgccagagactttgtagttcctgagagccacaagcctccatcttttctctatagaaaaaaaaaaaggcttaaatcattggtcagctctcctgtgcttgaaattgtcaccgtttgaagagtggctgtccttttcaaaatatttggcattatagagtcacagaaaaagtgttaactattctgtgcatttacttatgttgaaaatgatgtcatgtatatttgtatttaataaaatgtgaaaggaaaggaaaataagttcttttcaaaataaaattttggtgccccggaaggtttctcagcctgcctgcagcatgagttttacttaaagcaaaaagcactagcattttttttaatataatgggatgcaatagaagataactatatcaatcacctatttgtaaaatagtgctgtgtaacaaactatctcaaattaaaataattaaattagctcaggtatttttagtttgtcaacatagactgggctcagctggcagttcttctggttctggctgggctcgcatgtgcctggcagctggctggtgtttgagatgatggagacaatgaagctacatggttctcattctccagcaggccactctgagcatgttctcatggtggtgacagaagagcaaagatgagagcaagcaaggcacttacaccctttcaagcctccacctgtgtcttacttcctaagatcttattgactaaagaatgtcacctagtaaagcataaggtcactgtaggaggtcaatacaagattaatgatcaaatatgtgaatgctgggaggagcaaagaattggacacattgagaaaatctaccttatacaagaatatacatacataggaaattttattaagtgaaacatgaaactcactagctagaaccccaaagctacaatgtacttcacattttctctctgttttctttccagaatcttgctcctactcactgaccttgacctttctcattttgaacacttcatttctgtttcttggaatatctgtttttcttttctatccaaatccaaaatattcctcaaagcccagctcaagtttatactttcctggaagcctaatatctgtgtcattgttcaagtttgtttttatattactttatagtcatgattatttttatctgtataacaatgtcttgttgcttcaatgtagtctaagctccttcaagtaaggaaccatgtcttatacttacttgactctcccgaagtaggcttattgtatagtaagagtttaatagtaagttgattgacaggtagttccattttcaaagttctatgctaatcccttttttctttgtctctgccaacattatcttcctctacatctgagatggcatctcgagagtcatcttcagtccattagtaacagctgtcttggagaattatataaagaacaactctagccataactaggaaagttggaatgagagctaccatagattagtaatgtctgccataaatagaggaaggggataggccattcatatttactaccaaaatagttcttaattttttttcggagttgtatcttatcttctaagctcagtggagaaatagtaatgatattcattgaagggaaatgatagtgatggcaaaatatcagaatatatgtaagaagccatatattcaggaaaaatcacttaataataggcagtattatgcccacagaagggctttcagccaacagacttgacttcaaattctggttctgctgattactatcactgtgactttaggcaagctatataacctttgtctgcctcagtttccctatgtgctaataaatggcaccaaatgagggttgttttgaggacttaatgaattaatatactcaaaacgcttagcatttgtcttggcccatagtaagcactgaataaaatactagctactattttttattaagtagtggtaaaaattacaaataggtaaaacatacctttaaagttaagatacaatgtaactcctccatttgaaatcttagatgagggcagttgatgagaggaaggggaggtgagtgaccctgggcctaacagagagctaggctattcctatgataccaggaacaactttgagcaatgattttgccagctactggcactttatttcagtcatatttaattagagacacagagccactaatcaagattggttaccggatttgaccttatgcaattgtggaagctattaaacagtccctatgagtctgtagtcttcacatctgaggatggagctcaaagccaacagggaaggaaggatggatataaagtgggggagagcaaggcaagctgggctcatgagctagagccagaccttaggagaacagactggaactcaggtcagttcttacttcttccatccttggactaagcagggatcctgtaggagaagctggctccttcgtcatggagctgaacatatgtctgaccgaggaagtaacatatatgtagggacagaaaagggtgaagcaattgcatgcaaaataagtgagccaccaaaaaagtgacaaagggcacctgccctgacctgagtgggaagagaagtggggacactttagtttgtttttccagattttctgcaaaatgtctcttgtggctcatggtaatcataaacagtgggaaatcttgttaaccctagttaagctgacacattttgaagagtcaccatactcctctagtgaccatgtggtacaacagaaagagaaataactggccttcaagtcaaaagatctggaagtgtaaccttggccaaaatcacttaccctttctcacttgtgttcttgtgttcttagttttcttatgtataaaatgagggaggaaggtgggctttttcatccttaaggtcccttccagctcttagtctgtaattttgtcaccttactgcctactttcattaagtttcttgtgtctgccggtcttgcttacatatttcctgctattctgccccaagacagccagccaagccaaaatgagcgtaggcaagggaaagaagcctgagtgtttgcctaaacacttagggctgctgaagtcagatgctgagggcaaagggcaaccgtaagtgatggaattaaatgtttactgtgttaaccgttgaccactcatggatttcagagaaagctgaccatattgattggagttttcactcctgtttttctaatgatatgcaatcttaactaaatctgccagctctcagggggttgaacgctattcagcaacattaatttctttgcctacttccagttaccagcaattataatcttggcagttttactcaccttgaataagcacttgtatgctttattgatatctggcagagctggctccttccatgcaaagacccacttatgtttctgacactgctaactctacaaagcgctcaagctgcagatcaacatttgttggacattctgggggaagatgttatttctgaatatggcaggacagaaagttccaagaaagctcaaagaaattgtgtttatatgctcttagacacatttttttccatcccctcccctcaaaatcagtgaatgagccagtcctgaaagacacttggcacagtttcacagtctcttattgacaatttccttgctgggaattcacctagcctggagagagcgatcttgcctgtaatgactccttctttatagcatacaatcaattagtgcttatccaatatttaagacccagcccctcacgccaattcaggacagttctgttggtcagtctcaacccggagttcccatgagattggccgagacttctatggcaactgtaacacagccaaacttctgcttttaccccaactactcccttccatagttattaatcccagaactattctctaataaatgcctatatacaaacccctatctccgggtttacttttccaaggaatcagtgatataactgccatgacaatgaaagagatcaaaatttgggagacagaaagacgaggggtgggaagttgaatttttttcctcatttataacatgatctggttgggaggattcaaggcagaccagttagtacagatccccagtcccttttggggatcataggactcttgttttatcccctcacggcatttatcaccttctctcataaaaaatttatttatttattatgttttatgttgtttgcctactttctgtctatacccacccccggcccagataccctcaaacaagaaagtaaaacccaccaagatgaagttctttggtttgttcaccagtggatttcaaacacataatagatggcaataaatgctaagtgaatgaatgaatgaatgagtgaatgaatacagtcagggagaagagctgggaggccatgacagtaatgtaggtgagcagggatagaggctgaatgacatcaaagaatggggatgagaagtggatagagtctaaggttttgtggataatagaatgcataaaagtgctttagaaacacataaagttctcacacttgagggtacatcagattcccttggagggcctcttaaaacacagattactgggccctatccccagaatggatgattctggatgtctgtaatcaaagtcccgtttgggtcattatttattttagcaacatccaccatcatagattgtgagccccatggtaggaggggctgtgccactctgatcacacaggctgtctttcatcactagtggagtgtttggcacaagctagtactcagcaagatttgttgagtgagtaatttacacccccccatccccccgacacacacacacaacaccatgcaaatctatgcaatcagggcacttgcaaatccttagtattatcaaaagaaaaatgcaaattctaaggcattcttatgccccagttttgaccagaattgacctgtgaagatgagctcaacatccaatccagattattcttagtgctgttcagagtgggaggatcaacagcctctgctggtgtatgctctcactaatcattatccttatttccagttaataaggtttttgtctattttattcattgtagaaataaagaaaagagttagtgttgaccttgtaaccataaagcttcatagttttaaagtcaattattaaataacccattcatctttcttcttttagtttgtttgaaactctctttttttaaaattattttctcctgggcactactggcaacatttatttttcttccattgagaattcattaagaattatttcttttcttttttttttttggaaatttatctaacatctcaacttctttattggaatacagagaccaacactgaacttggaattcataagtaaaatggcagttacaaccagatattatttctcttaagccttatctctgtgatgcatcctagtattcataactaggtcttaatcaaaaaattattttgtaaatttttagacagtgtatgatgttatatgacttctaggacttaaaagtcttttgacttttaaaagtcagagatatgtattttcctttttgaccttacagtctaccacattcattattaattcctaacctgattttctagtgggagaagggggaggaatgaaactttcaaataatgtaatgcacctgaattaagaccattttgactagtcaaatgcagatatgcagatattttaggccttctgaacctttcatttcatagaaatagaaattgccccccccctttttctttggtagtcatccagcttgtttctctgttgtacaaataaaacagaaattaggacagcgctgagattgttttattcatccctgagttctcagaggttagcacaataccttccacatagaagatgcacggaaaatgtttgttgaatgattaccaataatgaagttttattatcatttttatccaagggcactgtatttcattctgtctatacccactcctgtgtttattttttttgggttgtgtgacaatattatgttcctggaaaagcaactaagaaaaaattgaaaaaataaatgttttcagtgggccaataagatggttacttttgtgcatatttttgtggtctgatgttcaaataatacaatagtcagagaataaaatccttaaaaataatgatttataatctattaagtgtcaaaagtgagagtagtcatcccttcttacttttataaaattgtcactcttttttgtttggtaaaagtgatatctttttaccagcccttccaacagctaattccttccactgccacttaaagtagtctgtgtttagctgtattacatttatacctactcaacttatcttttagtaatgtagtgtgtattatatataggcacccatacacatatgtttaattatgcaatgactgctttcttacagcttctaggacatgggtcttagagtcacaaaacctagtgttgaaatcttacttctattattgcatcagttatttactgccaaataatgttgcataactaattactcccaacctcagtggcttacgataataagcatttatttagctcatgtatctgtaggttggaaatttgagtggggatcacctgggcaattctggtcttctgggctggctcactcatatgtctggcgagtagctgacttctgtgatggggtgactgggtcatgtgtctctcatcatccagaaggctagcccaagattgttcacatggtcgctgggcagggctctgagagagagtggagagcatcaggccctttgagacctaggctcagcatgacacactgtcactctggtgcattcttggcaaagaaaaaaaaaaattgcaaagctagctagaatgaagactccactttttgaaggcaaatggtgttgagtacaagaaggagggggtgacttagggccatctatgtagtccaccagagctattcacaagctgacttggaacagtttattccaaccttggctagataaacaaggagagttcatgcttttctttttcttattgtgaccccatggaggtgcattactctagtgaaataaagattctccttatttaccaccaagacatgggagtgaaccagcatacataatgtcactatccaacactgggaggaaaggagaagcctcttggggtggggggaagggggagggatagcattaggagatatacctaatgctaaatgatgagttaatgggtgcagcacaccaacatggcacatgtatacataagtaacaaaactgcacgttgtacacatgcaccctaaaacttaaagtataataataataaaattttttaaaaaaagaaagaaagtgtttagcacgaggttttgggtgaagaagatgagacatgtgaggtccgggggcatggcattttggctgcctagatatcccaggatttaggggaatgcataactttctcactaagtatatgatgaatgagtaaatatgcttctctatatgttgttattgtgttgttgttaataaagtgtgtttttcacactgtaatctttcagagtaacacagactcatatacatatgaaattgaggactgtgggtatcaactacaaaacatccacgtaatagcagttaatactatttgttacatgccagactcagttctaggagctcccttctggtaacacagttaatttttaggaggtaagtattaggtaatataaacttccctattttggagatgaggaaattaggttcctagacattaattgtgtgtcccgaagtgacacagctaataaatggcaatggcaagatttgccctcaggcaggaaagctccaggctcagaaccctaaacccctattctacagctgtggcttcagttagggtttccatatgtggtcactgttgtaattctggctttcttcctttgaaccaactctcaggaaaaccaaaccatgacttgcatgttgttccatgggtgtttttcatccttctctggctttgtcttgacaaagtcatttggtacatatctaataagactttcctttgccatccattcacgtgtcatcaaggaatgcaaaacagttttaatgcaaaatacttgtaatattaggacagaaagaaagaagaaagaaagaaagaaagggagggagggagagagggagggagggagggagggaaagagagagaaagaaaagaaagaaaaaggaaagaaagaaagagagaagaagaaaagaagaagaggaagaagaggaagaagaagagaagaaaaggaaggaaggaaaagaaagaaagggaaaatagaaaaggaaggaaagaagaaagggaagtaaaacagggagggagataaagaaagaaagagagagaggagaaaaaagtataatggattccaatatttttctgtcatcctcaatgttcggctcatactctgtacttctgtgttagcaaacataattgaaataaaccgtttaggtagtaagctaattctgcagcattcaaaaaagacagcgtgcaatactcacaatttgcaaaactgttctcctttttttgtttgcataggtttatacatgttccctttttatagcacaatgtaaacacatgtgagaaaaactgatttgaaatagattttaaaccaggcagcccttttgctgtttcctaattggtattcatcatacctcttattgttgtgttctaagcatttcgttcatttgtttttcagtcctcagtttcctcatataaacttccatgatctgctgcctaagaatttggtatctgttaatgaaaatcaacttttaaaataagcattcttcctgccctggcaattaggagaacctttgaagacattgggggagtgatatgggtcctgggatgggaacagtaggattctgataacaagccaaagagatcagaaattcctttaagtattttaccggtaccccatagtcctcaaaatcacatacacaaaatatcatgggtacagatcaacaacaaacttagactggctttataacagtgcaaggtctaaaactttgttaccaagtcaccaaaatattcccaaataagtaaaaatcccacattaaatgccaccatcctttgtctcctctctcccccgcattgggttctggaggactttggtcatcatagccgacatgtcagtgtcccctcgatagacattcccttggcatgcagtatatactgctagcatcttgttataagtacctgtggctttctaagagatttctctgggttccacaatgttttcagttacatgctgggcatgctgaaagtatcaaggaattaaagcttctggaagcagccgtccactagttactaagggatttgatagaaaaataccccaggtccatcaggttttagtaggggcggatctgaggcatgttctcctgatctagaattccccagcagaactgagcccccattgccaacaatggttgcctatttattaatattctttattttggcttctttctcttcattgtcttgtattcctgctcacctgtcattgcttcctggggttcctttccccagataatctccctccacttcagctctaattcagtgtgtttctgggaggactttatagaagacatctaccataatattacaaaaattaaattactgaagctattcaaattattttctgatattttcattctgtccttttcttacttctatcaacccatccccatgtgtcttttttccctgcagtccaagattatttagccccatcctacaaggtcaagtattttatacaccagctaaggagtaaagtgtaaaatttttaaaaaaaatcagtaggtagaatattacactggaatcttaatagttcttgctgatagtgcccttaaggttaaaaaaaaaaaactcattaaattccaagagagaagatggttataaaaactgaatgaaaagatagaagttattccacaagcatttcttaaattagtttgttaagagccttagatcatcagacatcaagtagaaaaacacttatccaaatctacagaaagcatttctcagaaagtgaaagaatgcagaaatttacttccaaagttttgaattaaacatgacagaagaaggcatcaatttggaaaactttctcagaactctcccttgcttggtagagtgggcagcttacttcatctgtcagaggaaaggaagtagctgttactgaccagacgacatgtgttgaattgtttgaggctgtaccgcatgtcaagctttgacagaactgacataaaaaatatacctcacattgtgttagaattgaagagaacagctcttgttcattagaaggtgaggctcttcaaagaagcttcctgatgcagcccgatctccagctcacagaatgaaaagggtttcctataaatctcagttaactgattgctttggagacacagtcccaagagggatttgaagccagcataaacttgattatatgcacagcttgcgggatttggtcattctctttctttcggatatgttttgtgttctttctaaaatatagtcagtgatattttaagttgtttataaggtatttataggaaaatttatttataaaatacacaatgttccaattatcaattgctgtataacataacatcccaaacttagtggtataaaacaataaccatcatttgttgttattatctattgtggttctgtgggtcaactagtccaggctagataataatctttccacgtccctcaggaatctgcattcagaggatgcctggggctagagcatctcaaaagcttccttccccactcacatatctgttgtcttgtctagggagacccaaacagctgggcattggtgtctattcctataaactctctccttatggcctctccagcaggatggattcaggatagtagggcttctcattcggaggttcaaggctccaaagattcatgtcctatgagggagcaccaggcaatagctgtgttgcccttcacaatctaggcttctctaggttagaagcaagtcactaaagcagcctatattcaaggaaggggcatcgattttacctcttgatggaagaattgtcaaggaatttgcagactttttttaaccattacatttaatgattacctttcatcatcatagggccttattggtatttgcaagcctagttcacttaacctaataccatgcttagtcattgccaaaaaaaaaaaaaatctggctaatttaatgtatcaacaattataatatagtgatgcttttactaatttttatgctctattcaactatcctttaaaatatacttatctagagggaagagttaagtgagaaaactgaagatttagaagtatgatgttgatttctaaatcaagaaaaacatatgtactattgctttttcactgaattaaactgatttttacagagtgactgctataatcataacactgggctagactactgtgattaatacaggtaagtaaagacggttttaaaattatgaacagaacttagtcctagttcacagtctctaaactggtaggggtgtgtgtgtgtgtgtgtgtgtgtgtgtgtgtgtgtgtgtgaaactacgtgacaaggattatttacacaccattatagaagtcacactaattaaatctaatgaaagacatgtattcagttttgatattttccgtaagagtcaggcaaaagttcccaacaaacttctaaatctataatcaatccaaaggaaattataaacaataggctttgtatagagagagtaggtggatcatattaggcaataatcacatagttgatttcttactataaattatgatttatgtatcataaatagcatacaaatgtttgttaaatgaatgagatcttacaaactattactgggaaaatctttaattggcagctcttctctgatacggggactccaagggtccttggaacctggggactggggacttcctgattattttcaagtagaagtgtttgatttatagttgaaagagaataagaccattaatgttctctcattttttttaaataaaagtgtaagctctgccaaggggcattttctcattggctttcagtgttattttggtctcatgaattcataaacatcagcatctctacctatttccaaagaaaaaaaatttacttatgctcaaatccttgtcacagccactgcttctagggaaacataaactaaggcagggtgattgcagttctgggtatttgaaagaggttcttatggatttttccatgtgggaataacgtctaagtaattttccaagaatgaaaatactaaagtttttgataattaaagatactgacacagtacagacacaaacaggtttttcgggtgcttttcttgtgaagctttgcatttaaactgaagttttattcatgtaataatcatgcccctactattcgcaggagtaggaataatgggagttaacaggtgaggcagaaaagaaaggacatttcagagatgctctgcaataaagaagtgactgaaaactatagcactggtttttcttggttggatgaattaatgcacattctgaaaaacagtgttttagatttcaagttccaggtcttccagaaggagctatcatctgagctaagattgatgcattctagaccattattctggactcttctctgataagcccatgagataattttgttgaggtgtgatcatcccagcgttttagttatgtttcactggaaaatttaaaatattttaataagcaacatttgtttgggagagatacactgtccctgaacttggcctactatgatgggaatcctctgttctgttcaaaggcagttttctcaggcacctatggagtcagagactgatgtgacacttaagtggtacttactatgttccaggtactgagctgagaaatttatcatgtattaattcatttaatcctcacagccagccatttaatcatttcatctattttaaagacaagggtcaggaaggttaagtgacacgtgtaaggccacacacatatgatttgctggaacttggattcaaacctgtctgtccttagagtccatgcttttgtgagactccacctctggctgttcctgaggagttcctagttaagcgggaatgggggtgggcaagccagtgatgacagggttaggtggatactggaatattcaggaagtgccagaaagtacagaggatgaaaggcttgacttcaccttggatatttaaaagctccagaggacaacaccttcatttgaattggaaaggacatagcccattggaaaacttgttgtttccagggaacaaaacattttagactattttgaaaatctgtatgaagctacaagtacttgtatttggttttataatctaggtaacagtaattaaaagttgattcttttaaaagagatttacccttcgaggttgtttaagtaaatattttgctctctgttaagtgttcctacttggaagtgtaaatatctgcaaatgtgtttatgtgagtcctctaacttcagaaagagtcctaacctattttcttcaagctcttcatactaaatattaattctctgggaaattatatagtgatatattgacctctacagaatagattcttcatataaattaaactatgtggtttaattttctgttgttactcatttctttagcttgtgagtgttcacccatgtcctgagtgtaagattgtggggctggaaggtttgcattccagcccagcgcttacagcacagcacaagctgaaggccaaagaataggcgattttcagttgtttttaagctttctaggaatgataggttatgatttcccttggcctgtgatttacctagtttcataaaaagtatattttccttttttatgactgacaaaattgttcctagtgtaagttacctgctttttccgaaaagtttgttggtgacttagtttaactattaacccatgaagtctctgaagcaacaaatgcctattattaatcatgtattttgtctgggaaacccccaatgtcttttacttttttaaaagaaatatgtataagtcaatgccagattgcatcctcactttaattttacttctatgaccctccagaattttctcaaaagtagacctgcttattgggtctgaaacaccacactgaaacagatgctgatacttgctagaatgttgacagggctgctttcacagcgtccaaataaaactgacttaaactagatggaggttttttgttttttgtttgagacagggtcttgctctgtcgctcaggctggagtgctgtggcacaatcatgattcactgtagccccaacttcctgggctcaagcaattatcccacctcagcctcctgagtagctgggactacaggcgtgcgccaccatgcttggctaagttttgtattttttggagagactgagtttcgccattttgcccagactggccttgaacttttgagctcaagttatccacccaccttggactctgaaagtgatgggattacaggtgtgagccactgtgcctagcctgtttgtttttcatattaagttctgaaccagagggcagtttaatgtgaccctactccatttggttgttgaggtgtccaggcttcttttatgttgttccgccatatgctaaagtacttgtatgtctgaacatgggttacagcaccatgtcctcattccagttgtggggagggagaagaaagtgggaggaaatttttcccttgaaggacataatgcagaactttcataaatcacagatgttcacattctattttggccagaactgagacagatgcccatgcttagctgcaagggaagttggaaaatgtagcttaatgcaagagttcaaccaacagactcagaagttgctcttgccaaaacgaagaaaggaaaacctgggtattggaaaacagcctctgccatagaaggcctctaccatagaaggcttgttagcggcctcttccatagaaggcctgttcatcatagctcagttcagaatatcagggtcttcctaaatttatgtcatgataattctaatttctaatgtttaagttaacttttagttcacttgtgccttcaggtagttttctgagggttttctggctgtcaatttatttctcacattgttgaaaattatgttatcttctagttgccaccatagaaaattaattatcttgtagttcatttcactaactacaaatatatattatataatgtgtacatatgtatagttatatatatatatacacacacacaaattagtgttatatacatatacagtaatacacatgcttatatacatatatgcacatatataaacacacacaaatcacacaaatgcaggttgagtattctttatctgaaatgcttggggccagaagtgttttaagattttggattgtttcagagttcagaatatttacattatactggttgagaatctgtaatccaaaaatctgaaatgctccaatgagcatttcttttgagcatcatattggcactcaaaaagtttaggattttagagcatattggattttggattttcagatgagagatgctcaacctgtacatgataacatgactaggggtgttttttttaatattttgttcaccaaatctttttttctctcatttgtcttgctgaatgcctttatcatagcttaaatttgaattttctgcttctgaacagtgcttaaaatggaaagaggaggcagatgctggagttgctggtatctgcagccagcttctcttgtcgctgtgttggcttttcttaatttttaagcatatgacatatgactagttgttttttgttttttggttcattgcctgattttggccctaactattccattttaattttagttatcctgcatcatttctgtaggtgtgttttatttgttatttctgggtgactaataaatatatacatttatatattattatatatgaattatataaactttacaaattaaatgagcatgtatatataaaaaataatagcctactgccactctaatatgcaactttgggtatatgaaagttgattctgttttgagtattcatatgctctgagacagatgcctcaaaataagatacctaacggagtacttgctgctctaggcttctagaggactccctggggtgaggattgttcagaaaggaaacacggaacataagcatgatattatgttatggccaactaattagacatctagtcaattgactaacaatgtgtgtgtgagaccctgtgctgggtacagagtcagggaaaagctatcaatcctgaatagccccagtatcttcagaatcaattactgatgctaacaatatcttccagtgtcaaatgagaatacaagatgcacatgactttcctaactaattactatgactcaattggttagtttgaggaggtcttaaatgacaaaatttaattctgtattcctgtatatatagccagtattttataaaagagaaatttggtgaaatggttctgtatgtgttgctatgaattgaaacaaattccagccacttgaaaagattttttaaagtcttatttgcttttctaccagatgtgcttggaagtgagtgaaagtctctcaactagaactgccaggtctttgagtataggtggcattttgtcttagcctaaaataaatactttttttttttttttttgagatggagtcttgctgtgtcacccagtctggagtgcactcctagcctccagtgatccacctgcctcggcctcccaaagtgttgggatgacaggcgtgagccaccaaacctggccaaagacttgtttttatccaccacatctacagctgtttggttttttctgtttgtttgtttgtttttttgttctcatccctgcattcagacaatcaaaatgttttctcctttcaatttccagaaaattacaatgatccaggttcttcgctgaagctaccatatctttgtttcttgtgcaatgataatgtcactgatggcataatgtcttcctctgctagtggagcctaaagcctgatttccaatgaagcttttcagcattgctctctttctaaaatcctcatctgacgtgggctgtggtttgcttttagagtttgcttcagagtccacctatgcaattctcagagcactgccacagcatgttctgaaatcagagttgggtctgtttagtctagcaacctcatgaggaccccgtcttatgattgcatgaactctcctacacagtagaaatgtgtatttctataggcgttacttaaatgtttgcaaaggagctgtgtttcagttttccctcttgtaattaaatgctgacatattttgcaattgaaaataggagaaaataggtaggtggcaagacggtgttcaagaataattctttcctcgggcaaaaaccactaagatcaagattccatccccctgattcttctgcaaaaaaatgtaggacaaaaccatggggccttaaaatgaatgagaacaataacatcgaatcaataataatagctatcatttataattgcttatcacgtgccgggccttgttcttagtactttacagtgtattaactcatcgtttcattatagacaatgtagagagcagatattactctcattttcctttttagattggaagctgaatcagagagaggttaagcaacttgcaccaagcctcacagctgtaactggtaaaggtgagggtttaacccaggcagtcagattgcatataaacactcaagaagctgcattttatagccgtagaagagccatgctgcattgataaaatgtgctccttagcaggcgctcaaatgttacaccagctcactggcttgagtaatcagtcctcctttcactggttcagttgcatcagacgagtgttcatttttcacacccagcaaccactctcagttcttaattctgatgaatgcatgtcaggctatggagctttcttgtttctgaagaagttgttggctcaggattcctattttcttgatagcattcaagggatcctgcaaagtcagcagagtgttctacaagtctgctttgaggacaaacttattgacatgtaacagattctgaagatggtgtctggacattttcatgccatttgttgctagttgagttgaaggaatgctgttggcacctacaacattagcatctacatcctttgctgtgtcataaaggatagatgtaaaatacaatgaactatgaaggagggaggtaggaagtatgacatcatattctctcagggcataaagcagatttacagtgtacattgcacatttaatatgcacaaagcgcttctggtacatatgaggttaaactatataaaataccattttggtaagtcaaaaacagtggactagcagaaaattcatccacacacatgcacagatatacacagactcatgtgtacacactgcactgtgtaaaggtatttatgttgtcactttagttaataaaacaaatagacaaaggtcaaaattacccagtggaattgggcttaacctccaaagaacaataaaaccttgtatgactgaaattagaaagtggtctgaggacccattcttaaaattctatcagaaaagaatgttttacagacaaagacttgcttttggaatactatgcctgctaccatattctcaaggcaaaattcacacattgaaagaatgagattcaatacgtgtgaagtttttttttttttttctatgttcaaatcgggagaagggcattatccaaagctgacatattgaggtttctttgttttttgttttatgccagtctgctgaaggcaaagccttttctcttggcaggctgatgccttttgcaaggttttgtggttaggggcatgcctgtgctgcagtgatgtgagcagtttatcagcaccatttttctgacagaagttactgaagcatggtgtctgagtccaccaaaccattacatcttcagttacaaggcacttcactaaaagagtggctttggaatattttgatcctaaacaaagagcttgttgttaaagtggtgttattttgttttattaaagaaatgagggcaaatgctcatagaaggtggaaactcactttcagtttgggggaaatatcccttaaactagaagaggtatatggaagaacttgacaccttactaacaggtattctgtggattttttgtgtttgcttcatatggcttaatatcacttcactctgcagaattatggaatgtaaggtaatacacatcaaagcagcataggtaagacaattggatcgagaattagcaaatgtaggatttaggcttatgtgtcccatttaaccatggacttttctggacttttgtctcctcatctgtaaaacaagtgattcaagaccgtgaactggaagatgtgattgggtgccgggtgtctgttcttaagagactctagaatttctggtcgctgaactggcagaggaacacacaaagcatttgaccttgctcccatctttcataatgccttgtgctgcccttggtatttaaatgaacatgattctactgacttgctgtcagcgggacttgcactttgggctgctttccagcagtggggaaggatttgggatgattcatcgacacttgctttcccagatgcctctgcttctgcattctactgtcaaattgagcaaatttgccaaagtcaatgacagattttatttgttccttgcaaacaggctaaggtggaaaaacctaaatagatcccaaaatacatagaatttcaatgtgatgtatattaaccagaaaattctgtaaatgtatagattaagtattagttatcacttgtggcatattatcaataatcaaaatgtactggacactattttaagtgctttccatgttgcatctcatttaaacttcatgaccactctatagtgtggtaactatgattatccctagatgagaaaatggagatgcggaaagactaaatgacttgcctgagattacacgtagccactcagtggcaaagccaaggttagagtagtcagactctagtgacagtgcttataactgctacattgtccctctctttggctaatggtgctccctacctggcttttgaggcaggaactctcaactcatagccagagttatggagtctagccctaggatgtcaacccaagtcagaagaactatttgtgtgcaaactttaccatgtataagatgtgaaaatagcacatacatgattagaatcatacttgcttaacttttaggatcttatttgactaaaatatttatgtagctgctttggaaggtgcatagctgtggcacagatggctagctgatcactaaaaatacacgtgccttttcatggcatagggtaattgctggcaaaagtcttctcaacgagggactacgtgaccatttctcaccaataaaatgtgaggagaagtgatgtgtgtcacttccaggatgacatggttacagagatgcgctttcctcaccatcctttccccagtccctgattgaatggagggaattccagtcatgtgctgaagattatggagccaaagacattggagcctgagttcctcaataatcacctgcaggaaagccatctgaccatgaatacccacattggattttcacatgagtaaggataatcttgcagtgaattaaggcactgagttctgtgttatggcagctaactagtgccaaaagtaaaaagtgttgttgctttcatccaggtggggattccatgaatgtccagctttttacaatgctgagtaagtcattgaacttagcagtgtctcctgttatgttttgataacgaaaatttttatttcatggcctcagagcaatgttttccaactaggggcaatattgtccttatctccaaggaacatttggcaatgttgggagacatttttggtggtcacaacttatgagaggttgctactaacacctagtgggtagaggccagggatactactcagcttcctagaatgcacaggatgtactcttataacctaaaaagcatctggcccaaaatgttgatagtgctgaagatgagaaaccctgtcttaggagcatgtttgcagccacagatgtgagcatctttactgcattcttgtgacatgtagttcaattcaactggtagagaccctgtgtggcccctgctctgcactgggtcttacttactggatatatcattcagggcacatattctttacaacaagactgttttggttctcaattcgcattctgtggtggaataaacattgagtggaatagaaaacattagctttgggcctggcgcggtggctcacgcctataatcccagcactttgggaagcggaggcggacggatcacctgaggtcgggagtttgagaccagcatgaccaacataaagaaaccccatctctactaaaaatacaaaattggccgggtgtggtggtgcatgcctgtaatcccagctacttgggaggctgaggcaggagaattgcttgaacccgggaggtggaggttgcgatgagccgcgatcgcgccattgcactccagcctgggcaacaggagtgaaactccacctcaaaaaaaaaaagaaagaaaagaaaagaaaacattagctttaaagctagatctttctgttaacaactatgattcgaggcaagttaataagcccctgcaagcttcacttccttcacctgtaactgagaataatatcatctgcctcatagatttataagcattaaattgaatggtatacataaaacatttactataatcactagcaaataacaggcattcattataaatattcttttccttccccggacttcataaatgtgacaaaaataacttgttaacaagatttgaaaccatacagtggaataaactagaaataatttactgagtgccataatgtactgatccatatttttatatattcttagtttattggtcaagtaaataactggtttccagagaaaaataaaacactcaagttaatattcaactctaattcatgccattccagttttaattccagtcacttcttgacaaagaattggtgaaccttttgacagccgtgacttagagaaatgttgctatcctgaaacaggtccaaattctttcttctgtggtcattctggttctatgtggtcttttgttcttttatatcctaggctagtctatgacccagacctacctctgccccatgcttttccatgcatagctgcttatttccttgtagcaaggtcaacatgccattgcagaacattctcaggtgctcttggcaattagtcaaagttcagacatcgagtttcagactcttcataaaatttcctataaccatacctatttctgtaccaaattctattgacacagattaatgcaatgctaagtcttaatgaatgaagctctattcatcaatacttgaactacaaatgtcttttcctattgcctggggagtgtttgctttgctccaatgctataataaatgttttcaaagtggccctggaagttgatggaaaaaataatatttttataccagtgcttgtaattttttggtgacatagtatacatagtaaaaatatatatgcagaccatttggtgctggaggtgacaagctgggactttgtactcctgatgtctcacccagccagggcaaagggtcaatatctaggcagagctgtcacaaccattcacgacatgctgacttgttgaggaactctattctagactgccttggtgatgaaccataaaaatgacaattttaacacaaagtcctagacacctccctctaacccacaacctcctaaatagttcacattaaagtcttgtcctttatttttatgttttgtgttgttatatgaattgtcactttatctttaggaacttgattcatgtttcatgattttccctgttggctacacttgagggtctctgtgtatacatgagtagatctggtccccacccgtagttgctctcctcctgccttggagattgcttggtgctcctgcaatgtcttccttcaagcatgatgcacattataattattctgttctgcttcaggaatgcatatcaagttctatgcaattaatgccattacaaggcaaatacagagctcttcttggcatctccaggacatctgtaacgctgcagaagcaaagcattgtagtaatttatgtgacttaggaacttcttttttctatgactgttaaaatggcatttttaaatgaagaagttattagccaagaaaaaaggacttctggagaatagctgactgcctacaataacgctggtcagggaggatttgggttctggcgctgcttctagaggcacgttgatcacagcagggagggattcagaagggtgaggcaaggctggtagagcagcaggatccagtgggaacatttggagagtctttagcctggagaaaagtagtccaaggggatgcgggaagctatttttagctctctgaggaagaattcctaaaactgatcttgaattctgcggtcaacagaatgaagactaaagggtaaaaaggtagttacagaaagaaatgcaaacaacacatttaaaaattggttactagtgtcaacagttaggtgttatcctctcagaagattatctgtgtaaaccgaaacctacacctatatacgtacatgtttttaattatgcgtatatatttaagaatagttttacaaaaatgggattatggcccatgtattttccttaaactgggaatcaaatttggatttcatataataaagacattctatgaattgggagtatctaggattctcagtgggatagtattaccagtggaacagactgcctcatgagtagcaggcttgccatgagtacaatagcataggccagcaggtctccacatttagtattcatgcacatctcctggggatcttgttaaaatgcaggttctgattcaggaggtctgggctggggtgtgagatttcaaacaagataccaggtgatcgtagtcctaggactacactttgaggaataggtgtctagcttaacatccctagggatgctagaaatagattcctgtcttgggatgggataaaataaccctaaatttccatataacttgaagtttttatttcatcttgattttaactttattattttctatggaaaagaatgttgattatataggtgtttcatttactgtctcaccattattcatcattttttttcttttctatttctctcttttctccagtatagcctacaacactgtgatgataactatgattataatctttccttttttaatgttcaaaacaaatattatagctcttctactggttgcttatatctttatttagaaaaacatgtatttacatattttaggatcatttctatatgtctaattcagttcccatagtaatatgaagattatatttaaattatgcccctagtaatgctaatagaaggaaccagaatgaaaaataaaaatagataataatgactaagaccaattaaacacaacttatgtgataaacattgctttaaggggtttgtttatatgcattaaattatttaatccaaagtgtagacttatggaataggcattatttttatcccattttattgataaagaatgtgaggtataggaaaattaaataattggtgaaagtcacccagtttgtgtggtagaattggaacttgaacccaggcagtctagcttccaagttgaggatctcactgttatagccatattggaacaattcattaggatgatgcaaaataagatgtcaccttatatcaaaatgtgagtttttatttttgtaccattatggtaccatctttgttgataatttagtcttttaaatagacatttagcctttgagagcatccatgctgcattttgtaatttctaacttatttattgaattgccttagacatatggaaaatgttggactatcctatttaaatttcatgaaataggccttaaaatcgcacttgtaagatacatctgaaacttttataaattcataatgataatttggtgacccttgctaaactagaggacactgggatttcaatgttggtttgaacaatttagaaacccttttgcaaagttacaccagggttttaagcattctctcttaaaagacaagtggaaataagtgatttcttttccaaagcggtttatcttcttggtaagttaactatgtttaagatttagtattcactccttaaaatgtttttctataaggaaaatgaaaaggattgattaaatgagtaagagtgaggtcctggcatctaaagttgtagagttgtccatggcaaggacatgtgctcatttcagcacattatgaccattgctggagacaaggatgaacagagagggatgaatgatgcccagaaaggtgcctgtaaccaagactgtggttctcaggaagccagagacgtccaggattcagagatgtgaaggcagtggcggtacttccggactgattcacagttctaggaattagcaggggctgtctgtttctatttcccaaataccttaatttattaaattttaataatatgtaatatattctcatacttccaaaaatataaagggcaggattttaacaatgagaggcatgttaattattcacggagttttgcacattcataaggaaagcttagaaagccctatttctctgtgggaatatattccgccagtggaacccagcattataattattttgttaacattaatgggaggaatgtcttttcatcgatacccttttcttgaagaaagcattaaagtgttctggtaccaagataattgttaaatagaaagggcacctctgatgggtattctctgtttcattgattctttttccatcttgtgatgttgatgatggtcaagtctaaggagcagagctagaacaaagatgaacttaaaagtcatcaataaagaggtattttttacccagctgtcagaacaagaaaagttttttgtacaatttttaatcttgtatattaacggttcttctttaagatataatttatatagagtagaatgcacaaatctcaaatataacactcagtgaattttgacaaatgtatacacctgtgtaaacacagcgtagattaagatagaacatttcatggtcccagaaaattctcttgtgccctcttccagtcaatacctctctctcctacccctgcacgcacataaaatacccagtgatgactattatcttatcatccagcttagtttactgataattacctttcatttaggtggaatcacatggtgtgtttttgtgtttggcttctttcgtgcaatgtaattttttttgagattcatccgtgttgttccatgttgcattcctcttttttattgctgtgaagtgtttctttgtatgactttaccacaatttgtttatctactgtccagttgatggacatttacattctttccagttgtaagctatgatgagtacagctgccataaacaattttgtacaggtcttctcatggacatacattttcatttctcttgggcaattaactaggaagggacttactgagtcatggagcaggtgtccattttgctttattagaaacctcagttttctgaagttctgtgtcactttatatctcaccaggagtgtgggagagaacaaagatggtcttgatcacagtggtatgctgtcacttgctcctcatgtgggcacttccacagtcttatatatcactgagctggaaagaggaggagagaatgataggctggggacaggaggcaatggaattatggagatagtgtattggagaggtaattgatcctgcccctgccagcaagaccagctcatttactcccagaactgctcctcagcccagcgatgcctgacaaccttccattaaaagttacaccatgcagactggctgtgttacagaattaattccgggactggctttcagcccacttgcaccttgacctcacctctgcctgttttctctcacgcccagttcatgtgtattcatacagcttcacaaaaactctcttctgttgttggtgatttttttggttgatcctcatcactgaaacttcatagtcatgagctgtctcttacaagatacataactttgggccagttacttaacaaccccaagtttctgttttcttgtctataaaatggggatcagaatgctatattaaaaagttaatggggccaggcactgtggctcatgcctgtaatctcagtgctttggggggccaagatgggaggatcgcttgaggtcgggagttcaaggctgcagtgatcacaccactgcacttcagcctgggcaacaaagtaagaccctgtctcttcacaaaaataaataaacaacttttaaaaagttaattcaatcattaatgcctataaagggctcagcacatagcatgtgctcagtaaacactactgtaactcccagcacaacccctcctgttgtacttcctacatatgattggttttccaactctctaattccccttaattgataattctagtgaaataccctcctgggaacggacctaggaattcctgcctaggcctctgcctttccaaggctcatcctcaaaccgttactctgagacaattgtaatgaaacaagcaccatttatacggcaaactttaaagctcctgctagcttgagctggggctctttggatttcctgtttcatattttccaggatgaggattcgattttaaggattacatgctaaaaatagacctctattatgcattttcaaggattttaatatattgttaaattctagtttttttttgtttttgtttttgtttttgagacggagtctcgctctgtcgcccaggctggagtgcagtggcgcgatctcggctcactgcaagctccgcctcccgggttcacgccattctcctgcctcagcctcccgcgtagctgggactacaggcgcccgccaccacgcccggctaatttttttgtgttttttagtagagacggggtttcactgtgttagccaggatggtctcgatctcctgacctcgtgatccgcccgcctcggcctcccaaagtgctgggattacaggcgtgagccaccgcgcccggccaaattctagttttaacacatagagtacctcccctttaaaaatgaattgttaccaccggccgaatacctaaacactatcattctgtgctcctgatgttcctgtgatctcatggagtctagggtgcctttcccagtctcaacagagaggacttcatgagccctgggtacagaaaggtcattggttttattttaaacagtgtcagctacctgctgcccactttgttccaagctcttccttggccctgctattttcaggcaagatgcccatgaaccagtacagctcttcacactcatcccttctgcctcttgctccagaatcatgcttgggtatcacaagcctacatgtggaccaacctcctttcccttgttccaccatgcccccctcccatatacacatcacaaagcttctcttccccatgccttcactcacattacccctctctggttagtacttcctcatcaccaacatgaaatcaacaggtactactcattccatgactttgctgctctcctgtacagccaaactccttagaaagtcttcattaacttctctaaaggaagactttgtagagagtcttcactgtgcttcccctcctcccagtctcaccccaacacactccattataactgttgtccgctccactctgctgaaaagttgccaatgtccaacatcttgtcattccttttcatgaaacttgaccccttaggctcactttatatgcctgatgggcctacttcttttttgaaaggtgctcttctcctaacttctgggacaccggatttgctgttttttcttcctggattcttttctctcagatcttcatggggatgtttcttctcatcatggatataacccctttgcagaggccctcccagtcccaagcgatcctaatcaaagcagcttccttcaacctttggcctgactttctacctcctttatatttttaatagcactaattatatctgaccttctcatttatttatgtagatgttaacatttcatgtggaagtttgtaacaattgcacatttgtcaataatgatccctgacattcattaatgacctgctatgtgctaattctgtcctaaattagctcgtctaatattcaaaataatgttatgaagtaggaactactatcatcattttttgtatgtgtaaactgaggttcaaagaggctagataacttgccttgattccaaagctgtaagtaacataatgagaattcagacccatctattttgatgctaagatctgtgatataaatcattgacagaaaaaaaaaaacagtgaattaagctgtgtccccatgctttctaggggcacaaagagagatttggtgagacagaacatctttaaaggtaccacctggagagaactaacattttgtttgctctggagtgttgagaatttaaaggtttggctttgtgatggctcaagcagtaaatagatcacacacagtgaggaattcatctcattttgcatcgagtgtgcaaagcagtcataaatgatgaagaactgcattgtgggtcttgtgtaagtcttagagtaagactataaatttctaaaacttgaagtttgtaaacaaaatatacattagtttactcattaatgaatttataatctaagatgaactgaaactagatcctagttaaagcaaaataaggaagatgcactggtctatattttctttcctttgactttccacttaatcattaaagccatggccttcatggattattggcaagggaaagcagattgtaacacattttgcagatagagagagcaggtgtttcccacctgttcagttccatctccaggatgaactttgccttcattacatgaatccagagcatactctcccaacttggtagtgctcctgtgaactgttgatctgttactggcaagcctgaatagcccggcgcaagagccagtctgcctagaaaccctgaactgagtctaacctgttctcagcaaatcccatctctgcctctctggtgggtcctcacggcacccttgtctgctgcctattacttcccaaagaaagagacaaaaaaatccttggaagtgttacactaatgactttacatataaaacctctctcagaaatgtctgcatttttctggaagaggatgagtagaaaggtcaataggtagccccacagaatgaaaagtattattcagctacagtagatgctgggggccctcaaatcccaacagtccaataaatcccatccacatggatatccaaggaatagttttatacaattggattataagtcaagtatttgagggagaagctgttcactaatcgcccaaaacattcctccagtctgcacctccttctcattcccacagcgactctcccttttaggatattgttgttcatctcctagtccacttttcaaacttaatgtgtgtaccaagcatgtggggctctaggtaaaatacagatcctggctcagcaggtatgagatggggcctgagattctacatttctggccagcttccaggagatgccagtgccattggtccaccaaatcacactttgtatagcaagatcctagcccagaactttccaaggcagaggaggcctcaaaatcccctgtaggcatgtgaaaacacagatctctaggccctatggcaagatattctaattgagtaggtctaggatggtgccccagaatttgtatctttaacaagttatcaggtgatgctgctgctgatggtctgggaaccccactttgagatccaccatcctagattattgtagtagcccgtgacttctctctgtcacctgtacttcattgtttcactgtcaccagaattatcctttaaaattctaaaaataattactttgtacatgttttaaaaactgctaacgattctcaatggatcatttagtatacttccaggcttcttggcatgctgtaacacacagttaggtataagcagccctaagaagtttttcagaggcctgcccctctggttatctcaatagctgctatgagatatagcccacccagttcacatgcctgtatttatcagtgatttagagaattctttatttcaggaacttgtgcagaccacaaaagcatttattgaaaatgaataaacatatactatagagtgatgtgtgcaaactttttagtaacctgtaataagacaataccaagtacaaagccatcatgctttgtaggatatcaggattggctgacgtactcgttgacatcaggattccactgtcaacctccatgtccaatgtcttgagaaagtggctagtgtccagccagagagaggctgttctgtcctgctctgacctaaccttcacattggtctgccctatttttgttaattgtcttctgtgggatctcatgccatttcttttccaggcagctagatgcaaggattatttgttgttgctgatgtttgttttgttgggggatcttagtcctaattctttttctttgaatctgtaaatacttcaagtgcagtccataaagaagcttgacttgcctccagaatgcactgccagatgctagcttccagctttactaaccaacccgagagatggattttgtgggtttgtttggtctcgcagtttgtgccaactgggcaccgtgtccttagtccaccctcttctttgcacacaagtacaaaagggaacattttattctgctgctttgggtgggaacagtcactttatttatggggtctgagctaaaatttgatttctctattgcatggtgcactggctttatccatgtacatccacatcctttattattttcccatttcatgcgcaagttctaggcttctcatggtgttccaccctttgtggcttcagccttcctttccagcttcacctcccagtactgcagcccacctgctccagcgattccctgaaaaagtcacgtcccctgtagtatatctgctcccggtgctcaccccaacaggattaagcccacacttgtaggcctaaccagatcctaaactcaatcttgttgagcccaatgaaaatcaggtggtgtaactcacaaaggcaattgacttgaactcctctaggttttgcttttgtctggttttcaaaggaaagtgcatgagggagcagggaagtgtttgctgcaagcaaatgtttgaacgttcaggacagttaaaagaagaaaagatataagcattggtgaaagtgagcacaatagatgcaaatttggcacgctgaaaggaatttttgccccttaatgatctgtgttttctttatgcagcataacccgaggcaattaaaggcaggaaactactctaaccaactggcaattatgttttagtacatttggtacaatgcatactcgctctccatattttcagaatttttgaaaagtaaagaagcttcaaaactgtcaaagttggctcttctttcactcttcacgaagccttagtaggaaaaaggaaagagctgggctgtttgctctgggtccttttatgtgctgacatggatgcatttgaaggatttgaaatgtgcttcagtttgaaacttgggttccttttactgtttattcttttttgtgttttcacccattggtacccttgattgatagtgtttaagtcaggggacaagccgggggtttagaacattgatgtcctcagcgaatgaccctaagcttaaaagggagcccaaactcatcaggcctcgtgtttaaaaatagtttatttttgatgatgttcatgtgaatgagccatagtcctactcctcagggctgtggaatggaaagccttgagtagcaaatgatcgtagttgcctggccaaaccctctttctggtccaggcactgtcctccagcagtcacaggtgctgccctgggcattgtaggatgttcagcagcactcctgcacttgaccccttagatgccagcagcatcccaccagggtgacatccaaaatattcctagactttgccaaatgcccgggactggagaaagggcaaggtggaggcaatgggaggcaaaattgcccccagttgagaatgattgatctctagggatcctgaagatgtgctgggtgaaagccaattctcttcctaagctgatccaggcacaaaggagagcagaggcatctgcaaaatgaaaactacattcttttaatgatatcactctttcctcttgacccaattttggccagtttttagaaaatcacatcttcctcaagcatctaaactggcagaagagagaagatgccacagtttctgctttgaagggtccagtgaggtttggtatggtcctcacataaagtaaagaggccaaggatatttgtgttttacgttaggtcttggcaaggtaaaaattataagagaagttttatagtgtaccagatttctatcgtgtttttaaaaagaaaataacttattgaatataattgccagacaaggtgaagatagtaaaagtattcaggttgtcaccccaaactgcaaagctgactaaactaatttcaaccttttcctgctaacaaacttcacccttctgtgttttctctccctccatttttgcctgcctgtacaactcaatcctttgtatttactcatgatgaaaggcctacatgcaataaagaaaattaagcaaacctgattttcaaggcttgagtaatttaaaaactatgattttgacattttaagaatgttatgttgaccttgttcttgatcagtcatgagaattaaatgcaggagctttgcaccaaagcaaggcccctagcttaataaagatttaatttatactgcttcctaacattctctttctttttagtctacacagctcacattgtaccttttctcaaagtaatcatgagttataatttaaactgttaaatacacactgccttaatcttgtattttgttgttacattaatcaaggcagtgacaagcaaaattctgttcgaggactcttaacctgccttgcaagaaaagtaatgttcactttttaaatgagccattaaataaatccattgactttttgagtgaaaagcctctccctgtcccaagagctcaaattgcattcaacagttgcttttggaatcccaaagagagcagcaaatagtaggagttatgtctctggaaggcttcttgagttccaaaaggcgatttccttcctctccagaaggaaatcaaagaggaaataaacaggaatcatctgaaagataagaagtaaatgcataactcagtggaaagctagctagctagacagatagaaggaggatacaggctttctagagaaattgggattttaaagcatttatggagtggagaagaaatgactgcaaacaaagccaagtgctaaatatagaaactatggaaataaatagcccatattcccaggatagccttagctttgatgttaagcagcaaagcagatccagagggttcctgtataaagctataaacagaaaagaattaagaatatgctgattgagagaaacaaatgtggtttaccttgggaattacctctgtattgtgctatttatggaataaaagacaataatgtcatagcaagcactttgtataattaaagttctagagtttatagtggaaaaaatatgcagtccattgtcttgaaatgtttatttcatattttgttgtaagggagctttacaaaggtaagtgccttattctgacagtgctagctaactaataaagtaatcaagaacatgaactctgataagcagacctgaaaccaaaccagaaggcagaaaagggaaagaacagactccaattggagctaggtgatatgtctaaaataaatttcatgtgtgcctttcttttatatttccttggatccattttaatggaaatttccattagtggggcaacctatgtaagtaattgatagatatacttaatttatttgctgataagttgagaatatagccatattaatggaattggaattgtcaaaaaatattgttggagttgtccatgaaaatactcagtatttcttttagggctacttataatgttactataacaaccaatgaatggacttaggcctgaaagataaaatgaaacataaagatgatgaattttttaagttaaattttttattgaattccatgaagaaatagctctgaaatctcaggattgctctagtttcaagtggttagaagacaaaaagagcctgaggcaggagaatggcatgaacccgggaggtggagcttgcagtgagccgagatcgtgccactgcactccagcctgggtgacagagcgagactccatctcaaaaaaaagaaaaaaaagaaaaagagcctggcttcttaagaaaccaggtagtaagatggtaaatcatgtaactggagaaaatgattgggagtattttggggaaagatatggttgtgaacactgcaagtttctgttggggaagaggtgtttgtagtcatgactacaaagatgaccctctggaaaagtctaggaagcaggtcataggacaattccagaaagaaggagaattattcaatcagtgactccactgtctttcagcaaatgcttgcctgattactacagaacatgcaacttttgctgatacaaacatgcacgaaggaaggtacttcctctagatagagggaccttgtgagtaattgaccttgtggctattctccccttatacttcccaaagtcccttgcagctagatgtgcctctgagctaaattctggcaaagaggtgtcaacaaaaacctgtgggaatttggggatcttttcttaaaggtggggacatggggtgcttcttccttccctctttgctgcaggctgaaatgtagccaatatgaattgtgttggagcagccctctctatcatgagggagatgctgcatactggggattgagaggttgtcagagagaaaaagctgagacccaaacaattgtgtgatgcaggcctaatggcctggtctcctacctccaggcttctttcacatggaagaaataagtctgtatcctttctaagctgctgctgttttggcctttttagaaacttacagctgagcttaaacttaactcatacacatttactgtggttataagtagaactaaaaatatacttaactcatatttagcagttggttttatttcctcagttcatactgaaactagagcaatgtctttgcttaaaaacagaaatcaaaatcaatcaaacataattgattgaatacagattgcaaagaagtataaaatggaattttggccctcaagtggctttcttcaacatgaagaaacaagacttttaaaaaggtatatgcatatatttgtatatatatatgtatgtatatacacacatacatatatatacacacacacataaatatatacatatctacatatacacacccatgtactacacacatatacatataacaaaacaatattaaaaactccattgtgtaatagttcaatagaatcagtggtgcacagacaataaaatccttgggaattcagaggaaacaactgaaagagatgggagtttgggcagagaacctggttgtgaagattaaaaggaaagattagacaggtgacaagaagaggaaataggacacaatgaatgtattgtcagtaaaatgaaagagttttaggttgatatctcagtatgacatatttacagtcacaattcaatataaagggtcttttgctagcgttcatgtattttatctggtcttaatgaaatgtataagtgaccatgatagacctcactgttccacaggtagtgttttcaggaaaattgtgcaattagtgtctgaatttattctatgaagagtccttacagtttgtctccaacttgcagttctgtggtcaaaggagctgtctgaataattgcagtatagtaattgtgtctacagaggacataagcaaagcattttgcttaagcaaaaacattttgttttgttttggttttttgtttgtttgtttatttttgctggcagcattgctagtcaagactgaaaaattagggcatttaaaatagtggagtaagaatggtggttgttgcaggggagctgagtaagatagagcaatgtgacaagcaggtcttataagactaggtagaagatcaatactctgagaaggagatatggaggggtcagaatggtctgtggaaaaagtactgaatgtggtccagttgaagaggaagagaatcaatatattaaaaaagacccaaatgaaaaaaagaaataaagctgtctttatttgcagatagcataattttctatggagggacaccaaagagtctattaaaaaaaactttctagaacaaataagtgagtaaagcaagatgcaatatcaatgtacaaacgtctattgtttttctatgttccagaaatgaacaattggaacttgaaatttcttttcttcaacttttattttatctggggttcatgcactggatgtgcaggtttgttacacaggtaaatgtgtgctatggtggtttgctgcacagatcaatccatcacctaggtattaagccaagcatccattagctattttttctgatgctctccctcgcctgacccccaccctggataggccccagagtgtggtgtttgccccacagtgtgtccatgtgtactcatcattcagcttccactcataagacagaacatgtggtgtttggttttctgttcctgggttagtttacggaggataaaagctccatctccatccatgtccctgtaaaggacatgatcttgttcctttttatggctgcatagtattccattgtgtatatgtgccacattttcttcatctagcctatcattgatgggcatttgggttgattccatttctttgccattgtaaatagtgctgcagtgaatataggtgtgcatgtatctttgtaacagaatgatttatattcctttgggtgtatacccagtaatgggattgctgagtcaaatggtttttctgcctctagatctttgaggaatcaccacaatgtcttccacaatggttgaaataattgacattaccaccaacagtataaaaatgtggaacttgaaattttaaaaattactgttaaaaatatcaccaaaaaatgaaatacttaggggtaaatttgacaaaatatatcaaggagctgtatgtggaataccagaaaactctgataaaataagttgaagaaagtctaatgagattgggtgatatttcatgttcatggatggaaagatttaacattgtaaagatattaatttttttcacattgaaccacggattcaatgtaatcccagtcacaatcccagcaaactttttttatatgttggcataattgttgcaaaatttatatggtaatgcaaagaactgagattagctaatacaaaactaaaatggaagaataaagttagagaactcatatgatttaagacttactataaagctacaataatcaagaaagcatggtgttggcaaattagatacatagatcaatggaaaataatagcaagcccccatatagacccagataagtatagtaaactgacttttttatgaaagtgcaagaataattcaataaagaaaggatagtcttttcaaaaaatagtgctggagcaattgggtgtccatatgcaaaaatatgaacttagagttcatactttacaaaaaaaattaactcaaaatgagtcatagacatatatgtaaaatgcaaaccaattaaacttctagtagaaaaatagaataaattttgtacaatcttggatttgtggatgagtttttagatacaacaccaaaagcataatccatgaaagaaaattttgataaactataatttgcttaaatttaaaacttttgctatgcagaagacagtattaaaagaatgaaaggaaaagacatagactgggagaaagtatatggaaatcacattgtgataaaagaatagtattctgaatatatagagaacccttaaaacccgacaagaagaaaataaataatgtaaattaatatttggcaaaacatatgaacagatatctcaccaaagaaaacatacaaacataacaaatacccatatgaaaagatgctcaacatcatttgtcataaaggaaatgcaattgaaaaccccaatgaaatatactacacactattaaaatagctaaaattataaaaattgatgatactaagtgttggcaaggatgcacagcaacagtatctcttattcattactaatggggttgcaaaatgggtataatgaaatataatacagtttagcagtttcttataaaactaaacatactcttaccacatgatctagcaattgtgctcctaggtatttacctaacagatttgaatatttatgtcccacaaaaacctgcatgcaaatatttatagaagccttattcttaataacccaaaactggaagccaccacgatatccttcaataggtggacagacaaactgtgatatatacaatggaatattattgagtgataaaaaggaattagctttcaaaccatgcaaagacatgtatgaaccttaaatgcataatgctaagtgatataagtcagtctgaaaaggctgcatcttgtataattccatttatataatattctaaaaaaggcaatgccatagagagggttttcagattagtggttactaggggctgtagaggagattgaaaaggtgaagcacagtgaatctttttaggatagggaaatttcttttgtatggtgctgtaatggtagttactatgcacgtatgaggtactatgcatttattaatatactgtgtactttgaaatgtacaaatgtactatgcatttataaaaatctatagaattttgcagcacaaaaataaactttaatatattcaaatattagaaaattatttaaaacatcaagagaatcccaggatggaaagcagattgtgacaaataatatctatattataaatatagacaacaaccttactgaaggcaataagggaggaagttgctaactgaagtaactggaaatgaatggaatctgtgaaactgaaagcaaaaagaatggttgttaacaactgttaacagttctgagaccagtattcttatatactggaattgaataattagttggatggctgacggtggaagcaaggtttctcactgttggagcaggtagttatagagcaaaggaaaggtgctagaatgatccatgtagacataggctagaattgtgacatcagtgtgaactcatttttagcttaatatacatgcagatggatgaatatagaaagttctgtgtgtatatacatgggtttgtatacatacctgtatttccaaactgggttcttgaagaggacctacaaacaataacactttggtatcaatgagcataaccagccccctgaacttggtttctagtgccgttcttcaataaaaggaactagggctcttggagaaatggctgattctagagctggggaagggaatttacaagattaggctggagcatctaacaatgccaggaagcaagaaagtttctcaaaggaacatatggaaccaactaaaagacttctcaatggtcaaagctggaacaatttaagcaacaaaataaagatgtgatattagattgcaactcaaagtataaaataagtatccataggccacattattataaatcagtcattgaatgaataaataattgggaagaatacacaattctcccatataggataccaaataatttatgtaggagcataactgccttctcttaagtgtgggattcacatagcaacttcctgcaaaaaaagcacaatatggaaagaggggataaagagtaattgtgatgcagaaactgacaaacactgcctcagtcagctgaccaaggataatctcatcagtattaagtcatgttgatagtaggtacctttgacatgatgtgatgaaaatggcattttacctctgtggtctctctcccgaaacccacaacttcagcctaatcatgagaaaaacatcctgtacccatattaagggatattctagaaaatacctgactagtactcctcaaaactgttaaggtcatcaaaagcaaggaatgccaaagagacaccctaagatgacaggtggactaaatgcagtatggtgtcgtgaatgggctcttggcacaggaaaaggacagtaggtcaaaactaaggaatatcaatgaagtatgggccttagttaatattaaagtatcaatattggtatattagttgtatcaaatgtatcatactaatgtaagatattaaccatagggagaactgcctgtgacatacatggaaattctctgtacaaattttctgtaaatctaaaattattctagaatagaaggctatttaaaaaaaaaaaaaagaccaaagctaaacatataatcgtggtggcctggggctggaagtgaaggttagagaatggagagttattgcttaacatgtacagaatttctatttgagaagatgtaaaaggttcctgagatttatggtggtgatggttacacaacaatgtgaatgtacctaatgccactgagttgtatacttaaaaatgattaaaattgtaatttgtatcgtgtattttatcaaagtaaaacaagtatttcaagaaaaaaactcaaagacacagaaaactagagaagagaaacatcagaaggactaaaaacaaaatctaaaagtggaccaacaacaaagcaatgggataggaaggaaaactgcgtaagattcacagggcaaaacacttccattactagaacaccaggaaagaaaacacctgtttagaaatcacagcaaataaattagtactcacggttttctctttacttcgtaatttttaaattgtacacaccctcttccaaaaaccttacaacacaaggcaagaaatacaaaacaaactttttgtttattagtaaattaaatactgtattgaatgtggaaaaacagaacaaaaagtggaggctctgatacactttggccccgaatactggccctctgagcggaggagagttggggaaatcagatgttatattaatggactggcatttagaagccaggcattgaactctgtttattttatatattattttaaccctcacaacagcattatatgctagtactattatttctcactacagagctaacatttgagatcatggttttctgtcaatgacttgaatttagtaacagtgaaaattccatacacataggaatatagcagaattttttcagtaaggctgtaacgtttaagtgaacttagctgatcctacatatattagagaacgcttgctataaattcatgggattctgtctaccaagtcagagaagtggtttaaatgtgttgatgtatctggcgtattagagtctacagtcatgaaatggaaccctagttgtacaactcattagctatgtgctgtcaaattacttaacatgtagagatctcagttttaccatctattaaatggggataaaacaggttctttgcttataacattctttttccttttctaatatcccatgtgcttgtgactttctatgatcagagatagtggtatttgtcttaaaaaaaaaaagaaagaaagaaaaggtcatttaagccccatattatttggagatcataggtacaataaaaaataaatgccagagtttcaatagcttaacacattaaaaagtattcctcatttacttagaagcctagtgtgggtgtttttgatataaggtgattttcttctacctggtgatttagggacttagactctgtccaatctaacagctccagtatctcctagggtctctctgtcctctttaaaaaggacacaggagaaagaaaaagacctgaaatgaccctcgtctcttccattaaccttccatttgtgagaactattcatatgaccctccttaaatgcaagcaaagggtgatgtgaaatgtggctgtattcaggcagcaatttccctgtaattctttgaactgtgtaaggcaaagtgcaaagtttggtggcgaatgagcaacctttgccttaagctctgtgcgagcccagtattgctgaactgtgctaacccactcacctgtatggagagaagagtagcaccattatagtaaggactcctgcagtaatcaccaagtataatgggggcacttaaccctcagcttttttgcaccttaaatggtttaataataattgcaacaaaaagtatttataaagcattcgggaatgcttataagggattaaagtaatattaaagaaatcactagagtctcagcattaaatgatttttaatgcaacaaaatctcatcatactgtattttttcttcttagctttaaaaatagacctgcagaatagatatggtataaagtgagactccatagtgtccagaattcttttctttgtatttgtactgaaattctctctctcttttccagtgtatcaacttttagttatatattttgttcaaaaataacatctgatcatcataaacatcaattatttaaataggataacatgcttcttctgagtgctttaaagtaaacttgagtgtttataagtaagggaattattaagaagaaaccctggtatatccacaagataaatgttaccagtctctaagagtgcgtctcagtggttctcaaacttaaaagtatatcagaatcacctgtaggatttgttataatgcagattgctaggtcccaacctctggagttttcagttcagaaagtctgggatgtgggccaggaatttgtgtttctagcgagtaaccagatgatgtgatgctgctggtccagggaccatactttgaaaaccactgatttttctataaaatgatgctgaagaaggtaaggaggaaggtatcaaatctacgcggtttctctgaggttggactacttgatgtgtcccagcttttatgtttaaaaaaaaataatgccgaaagacatacagtgcttaagactcaggttaatttaattccataatcatacggcataatagcaccaattttggtacatagagtcttctgtacttaattttgactgacccacatagagcaaatgtgatttatctgacttgaaattgaaaacccaaataagctaggttgtgaaacacagtaggtttttacgatggggcctataaggagacctatgaattattagagggatagcagtggttaggctaaaggtatacagagaatacgttgcaaagatattaaggaaaataagaaaattatggaagactttaaggaaaagcactaaatatgagttcagggcctgagctaagtggattttcaaaaaaatttcctgggtatttactttcttaatacagaggaagtaatttggaggaagatttatttttaggttttactttcatctgagcaagaagaaatatattgtgcaataatgaaaaagcgatctatcttcttgggtgctcaaaacctatgttaaggatttatgaattatttattaagaaaaattatacacccagggatggtgaccctggtcaatatttaagcttcaaaaaagataatgaaattcagtttttctaaactgtagaggataaagtgttttatcataacattacaaattgtggaatgaatgaataaaagtcacagtgggttcttttttgaaagtctggggctacccggaatcagcatataggacccaacttcaaaaggtgaacaatgatattaaccaataatgtgtttctttgaggaaatgatctgaagcaaaaagatacctcacagaccagggaggtaatattcaagcaactaaagaagctaaggactatttcatatgactatcttgcccttggtgagaaatcctaatacagtgattttttttctccactatatttacaaaggaagcataaaaataagaatgttggctgggtgtggtggcttacacctgtaatcccagcactctgggggggccgagcgaggaggatcccttgagcccaggagttcaagatcagcctgagcaacatagtgagaccttgtctttacaaaataaaaaaggaaaaaaagaaagaaaaaagaaaaaaatgagaatgtctggatttgaaggaagaaaaggattcaaagaaattctgccctgcgttctgctgatggcagttttatttgagaactcttgcactgtcaaatgtttcttagttcatcgcccaatttaatatttcagaaaagtcatccaaggactgttttcttttgtggttttctttctggcagcattctatggcttctctgttcttggagtgttcttctgccttgacaaggtaaagttcatgcctaagcatgtgcagaaactcaaggtcaagtgcaccactgagcaccttcagagtgaatttttaggggataatgttgtcacaactgtcttcatcatcaaacagcaagccttcatgataggcctgccagggaggtggccctgccagcctgctgcctcttgtccctttcccagtttacactgttatttctccatcttgccctgacttttgcccaataacagcaagcctttgggttgaacctagcatacctgctttccttgtactccagggccataagcttgcagagctaccgtggtggcatggcccatggtttgtcctgccccaacttttttgtttttgagacagagtctcactctgtcgcccaggctggagtgcaatggcatgatctcggctcattgcaacctccgcctcccgggttcgagcgattcttccacgtcagcctcccgagtagctgggattccaggcaccctccaacatgcccggctaattatttttgtatttttgtacagatggggtttcaccatgttggccaggctagtcttgaactcctgacctcaggtgatccacccaccttggcctccccaagtgctgggattacaggcgtgagccaccgagcccggcgtgtcctaccctgccccatcttgcttccttcctcctctccctttattccttccttccgttctctttagaaatatttttgatatgtaacagaaaaatatagaacataataggaaaaagtccctcttaaatgttttcgcttttattttttgcattatcccaataacctgtttcatttatgtactttgtcttcagggtgcaattgtatgcaatatgtttggattctctgccacttgcactaacattctcttgccttaatgctgtctcttcttatctactcattttctgtttctcatcctttaacttttttaaagattctgtgcttctcaccaacatattgcaataaactgcactgtgcttccacctttcaggctttttaatgaagggagtaaatttaagaattaacttgtttctcatgaaggtcaagtcaaggatgtgttggaagaagacagatgtcttctattagttgttcttctgtattttgtttcaacctactgttctgaagcagcaatagtagtaaacataaggccttgtaaaagagtttttacacaattttttttttaaatctgtccccatcccacttttggtctgacagtgattgctttttacttactccctctctgttcataaagaggtagtaatactaaattaatagtgtttgtgaaaattcctagaaaaaatgttattcacataggatctttttaaaaattatccttattcatttttaagtgaggttttaatgaaatgataaaatgaattatgtttatcaactttggagtagagctttatatattctgttatggatagtttttttattattttaatgaaaggaaagtcagagtagggggtagaaaatagaataaacctttaccaagaagaaagtaaaataaagagaatatgaacatatttctttttagctatgggtatgacaaaaatgaactctgatttggagattaggtaaactgatgtttttcatagcttttatttatttatttttagtaaggaatatttcttttttaaaatcaggcactgtctctcacgtgatgatgagaaaaagcttttgggaaaaccatttgcacgttagattacagggtatttatgcatatgttttcccagtagtactcactatattttaaaacctgattaagatgacataagataaaatgtggcgtattgtgactgagaacccctagtctcgaatgctcatatttagtgggtataatgatgaaaactattttcgaggacatttttgaaagattccaaaaacatacagaaatatatctaaagccaaaaaagtaagtaatataaaaatatgagtttaaaaatagtaatatgtgattcagaataatttcaagtttaacgttattttctaagttgattatttgcaaatgatagctatttggatcctgttctctgaacaaacccagatgcaaggggttgtatacaagtgatttattaaggaagctacttccaggagacatcagtaagagagtggaggaagcaagacatggatggagaagagttaagtaagggtgagctttcaggtgaagtcccaacctcaacctaagctactgaaagctgcagagcacaaattacacctcgagttgcttctcctgcatctgtcagacatgaactatcagctctctggggagatctagcatctcaggcacttcctgctctctacacatctgagtgaagtagctccaagaagccaaaggtagtcaaaggctgcaagtgtcacttgtttggaataaagctgatagacgctgggggatgggtgtctagccagtaagggagcctagcagggaaccaggctagtatcaatagaggttcctgcaggagctttaggcaaacttcctgagtaattggaaaatggctctacattgattttttttcaatcattcatagttcttaatatgaacagctagcttcgttttgtgtacatacattagtgttgagattgatcaacagtcgaatgaaaaggagagttcctttctggtaaaatttacgcacttaggcaaaacctttgggctgatttattgattgactcagtgaatgttcttctcaggaaaattcattaagcatgatgttcccttttagacatatccagctcctacccccacaaattagcatcggaaaagatttggttgaattccgtctgtcttgccagaaagccaaaagcaatgttaagaagcaaatcttctttgaaagggaggggaaaaaagaccacacttgtcaacttaaaatatctcattttggaaaatagattaactcattacatattcacaatgtcttatgagaggaaaaggtcatcaaaatgcaaacctttggcagaaaaaaaattgtgatacattttggaataaataactggagaaaatgagactatccagatggatataaccaatcagctactaaggtaaagcaaggataaatgccgtctatctatacttcagaaaatatggaagtcaccagatatgccatactgtgtgatgagagagaaaagaaaatacgttggttgagaaaatacgttggttactcactcaaatgtatcatgcacagggctgaatcaaaacatgtggaaatcagccgagcatttttagaacctctccttgacacagtctggcctctagggcccaatgtggaaattgctgctttaatctacagtgatattagagctactgataagcacagtagtctgaagaagacttctcagttttattagtagttttctcattgctcttagaattctgatgcagctactttataactggatgtaggaagcctgtccaagtgtcagaatgccctacccgttctagacctaattagccttctctgtgggcagccattgtcttcatttaatatctagggcagagattctcaaacttcagattgcatctgaatcactgggaggtgaatcacccagcacagattgtcgggccaccccagagtttctaatttagtaggcctagagttgaaccagagaatttgcatttttcacttgttcccaaatgatgatgatgccataggtcaaaggaccacacttggagaaccactggtgtggagaaatgaaggcatttaagtcctataagcagataagtgatggattcaaatattatattaaggtaagattgagggagtagtttgcactgccagttaaaaaaacttggctggctgttcagccacagtgaaataggtgtaaaccagagataacattttagatgattcaaaggggaaatctggctacatttatatcatctggagttttcaagtggaaacagcttgtttgcctgatgaatctatatcattccatatttcttatcaaaagaccttttatgaaaatcagattctatgctcacccaaaatattcaggaagatagtttttagcacttatgaaactatttgcaaaatgatggatgctgtttctagttaatctgattagtctgaaatgaggaatttagcttatcacaggcagtaatagaaaattgtaacaatgccatctttatcatcatagttgtgattttttttaactctgagttctgaatacatgcaacatcattcattcttcatccataaagatgtggagaattcctctgtgagaagcctgtaatatataagaactggaaaaataaaacacgtgctataaagagccaatatatttctgaaattattcatctttaaatatatatagattatccatggtgattatggaactttttctcaggtttttaatgtcaacctaataagttgacatctcgttaaaatgaaggcagttactagcatgttaaatctgacctgtttttcattcatcatttgaaagaaattacaaaaatatatctcttaatataatgtttcctagaatccagaagcaagtgtggcagtttcttccctcagagtcatagatgcatgcaactataccataaatactgttacaattaagttttattcattttacctcttaataaagccgtggtgctatacatataattttatgtttagctgcatttaactttcaactttggaagtgttttactcttagatgagcgtgtaggagtttctaaggttgctgaagaaggaagtaagaatgagaatatttggctattgcacaaccagccaccaaactatctcacctggcaatctgcaaggaataaattaactgcatatctgctgatatagttcacattgccttgtgcagacacagcctctgaaaactagtgttatatttatttatcatgattattttttcatatacgtgaaaaaagacttaagtggttttctttcatttatgttacacaatactcctgctaccttatcaatatccaaaatttttagaaaaaagtaagtttggggatatgtggattactttttctattatgtacatagggtcaatgatcctgggcaattaacatattttctctgggacttagtttcctcatctgtgttctctttctgttcccagttactatgattctattatagtaattgtttctgtttgggcacattcaataatggtgacagcattgcagtcatttttatgcagggtgggtggagtgccaagatacgtaaattcattttcattcctttttaattagttgcattagaacttggaaacaatggggttagtgtattagttatctattgcttcataacagactaccacaacttaatggcttaaaacaacaaacatttattatctcacagtttcagtgggtcagggtctcacctgcttagggtatcctaaggctgaaatcaagatgtctcctgggctgtgttctcatctggagctcaaattcctcttccaagctcatttaggttgttgccagaattcagttccttgtggtggtagaactgatgctcttatctcctggaggtcttcttctccatagtcagtacacagcacagccagcagattagtgtctctgctgcttcaagtctcttgcttctaaaccctcttttgaatggcctacccaagatatctctcttttggctaactttatgttgtctgattgggaaccttaattacacctcaaaattcactcactcttgctgtattacataacataatggtgggagtgatagcccagcacctttgccatattgtattggttagaagacagctgcaggtccctctcacactcagagggaggggattacacaaaggcatggaaaccaggagacccacatgagtgtggccatcttagagttctgcccaccaaaggtaggcaaaaatgcagagatttgtgaggaaattgtgcagttgaccaacagtagtcaatagtagtcataactatctctgttagttttctcatctgcaaaacagagaaatatgataattaggtgacagtattattgcaaagactaatgagataatacatgcaaattttgttttacaattcttggtatgctggttctccattataaatacatacgattattattgctgttattattaaggatattatttgactttgccacctttagtgtgggaacctttaatctcatcaataataatttctcagtttttattttatttgtaccgagcagactctttagattaaaaagtgcattaagagagattgtctgggtttttttggttcggtatcttcctgtatactgaccttggctcccggaagaatgcatgaactccagaccttggtggattccttatctccctaggacaggcaatgggacaatgaaggaagcaaggaaataaattaaaaatgaaaagttatcttccacattatctgccgcattcatatacttgccaataacattgggccaaatactttggaagtaggtccagggataacattcagactggagaatggaaccgataatatccgcaggcattggatcacccactttttccccaatttatgctatgatatttatgagagcatgagagcatggaaggtaattccaactgctgtattaatgaactttcagtgtccctaggttgcttgcaaaaataaggcatcttgttggttttctgggtaaagatgagtctgacttgtattttatgtactgtgttcctgttaggtccaaagtctgaaatacctaacatcttcagcagggtgtcattcattcataaaccaggatgaaatacagcctctgtgctgaactttatgtcaaacactatacaaatcaggataaaagtccaaggtctttttgtcgagggattcacaccaagtggtgaaaccccatgtcaattgacagttacaatacaacctgtaacacatgaacgttttcattgcttgtcccatttcaaaggttgatcctatttttcatttacctataacacataaaagtgaaaattagtttctctagaagttttctctattacttaggttttaagtttttatgaagtagctatagagttccaggttttcagatctttttctttttctttgtttatttacattccttgtgtttcttctagatgctttacctaacaacttttaacttttctgctaggatctttcccctttcacttagaatgggaaatcttgcaagcataagaatttctatatattcagtactcgctgcttgctaagtggagatcttaatttaatatttcagttggtttagcagcagccgaacgagggagatgttgctggcatctgcacctgtgtttgacagatgaggatacaaggcatgcatgagcatctgtagcaacttgtttaatgctacattgataacaagtgataatttgagggaagaacttacattttctgcctcctacttctatgaaatttgcactatattaaatctaagtgtgtttaaataaagaaagccagatgtgtcatctttctcttttctctgccttggttcttattgatgacctatacctctcatttccattggtgtttcttactgtgggtctccactgaaagttgtggaaataaagatgaaaatcatgcctaggaaacaaaggaaaagagagaccaggtggcagacggtgcagagatttctttgagaggtacattgcacagatttttcaccccctcagaagtggaataaagttaaggaacaaagaattgagtctaagtccatctgcttcttgttaaatgaaaactatttgttaaaatactctaaaatcatttttttaaaaaaattgtgcattttaaggaggtttggcagtcagtaaaatatattaatgtattctacttttggtaaatcaaaatagaccaacttaatgactataccacacatgtatgtggagatatacataatcacaatgcacacacccagccattaatatcttctctgtgaaatgtttatgactgtaattgctgttctgattatatactgtgtgaacctgaaacacattattatattgggtgactaatggaattcaataacaatgcacagaaattgggattctggaaagagttgagttttaaactgtatttcctcctcagtttgaagtggatttcatgtctcatctaccacacagtatgcttatggctgatggattgaaatctctctgctaaatagtaaacaaccaagacaattcagtcttctcttagcttgcctgctttctcgtcactcattcaaaatatttttgttaaatacccaaaacccattaattagtaataatgggttttgagtattttgttaaatacccaatacctcagtttgtttaagagtttaagagtttctgttttccagctttgtggaattcattatttctttacgactttctttgaaagagagatcacagggtatatatgtggaaaacttgggtttgagtgaagaccctaaaattaattattcatgtattcagtcaataactttaccacactaacaatgcacagaaattgggattctggaaagagctgagttttaaattgtatttcttcctgagtttgataattaacatcttcagcagggtgtcgttcattcacaaaccaggatgaaatacagcctgtgtgctgaactttatgttaaacactgtacaaacagagataaaagtccaaggtcttttgtcgagggattcacaccaagtggtgaaaccccatgtcaatagacagttacaatattattgtaatattactgttaattcacttttatccatgctgttaattcatttttatccatactgacaaaaagagagggcatatccatcaatgcatcagtggatgcatctgaggtcctaagagtgtgatctccaagctttgcagggtgtcattaatggccttggaaataaagggttcttttagtacatgcctcgtttaatgattccggtaggttcttttagtacatgcctcctttaatgattccggtaggttatgtgactttaggcacttcaattcctttctcattgttggatggacttcaaggttagagagaacaaattttaatttctttattccacttttctaaagatgtatctaatgttatgaagtataatgcaaaggttctatgggagaacatctgtgacaaacaaaacgatttcaattgttgcttgagtttctgaacacctaggacatttgcttggatagaatatgatttaatcctaaagagaaattattaaaatagcagtcgatggcatttgtcattcaatagttttttcttcagctaactctcaccactaggcacacttttacattcagtaagtgtaatatttttatttgaaagttcccaatataaagaaatgatagttatagattcttcatattaacaaaagtaatgtattgctttatcaatgatattcacatgaaaggccttataacaacatgagtgagtatataattagtgcttctcaaagtgtggtcattggaccagcaacgtcagcatcacctggaggtttatttgagatgcagattctcaggcctgcctcagactcacggaatcagaaagtctgacaggtgacacggagcaaatctgtattttactaagcttttcaggtgactgtaatgcaggctacagttggagagccactgatacggaaggtatgatcatacccatttaatagatgaaaaaattgatgctcagtgtggtaaagttattgactaaatacatgaataattaattttaaggtcctcactcaaacccaagttttctgcaatatacactctgtagtctctctctcaaagaaaggagtaaagaaataatgaattccacaaagctggaaaacagaaactcttaaactgaggaagggcagaaagggaccatttcactgctttattgtaatgagttgttaaaactattgtcacgagaaaattaacctagaaaaagttttaatgatacaagaaacacttttgtggtcatgcattgggttcctcattttctttttagtggcagagagaaagggatgcagttaaactccagaggggtggctgtggtatgttaatagaagtgggagacactatttgaatcatcgctttgtagccaaatgagttcatggacggcatttccacccaggtcttccccacgccacattacccttgatgacagtgccctgcggtggttttcatgcacacagttggcgttaactacccttccgtggcttggggaatgaatcctggaagtggaatacagagttcattatctgtaatgcaaaagtctatataatgatgcctgctaagatctagttctttgttaattcaatttgggctttgcgtatataatcaaacaagttatgtttaagtctattgtttcttcaattgggaggaatttccttaaatagaaaatattacgggccgggcacggtggctcatgcctgcaatcccagcactttgggagcccgaggcgagtggatcacttgaggtctggagtttgagaccagcctggccaacatagcaaaatgccgtatgtactaaaaatacaaaaattagcagagcattgtggtgtgtgcctgtaatttcagctactcgagggctgaggcacgagaatcacttgaacccgggaggtagaagttgcagtgagttgagattgcaccactgcactttagcctgggtgatggagtgagactctgtctctcaaaaaaaaaaaaaaaaaaaaaagaaaaagaaaaaataaaagaaaatattactattgattaggtaaaaatactgtgtgtgagagatatatttttatcctatatagatgtaaaacatcatgcaacatatatggaaaattacatcaaatgtaaatgttagtgttttataaataattataaagagaacacccatgtaatgaccactaaatcccaaagtgattgttgctaatgctccatatacctctgtgacatatcctaagtgggttgtagttttctgcacacaattcctgcttctgtgagtttctacccgcaatttcctctctctgaaaccaccacccaccctcccaccccgatcacacagttataaggctggcaaactctgtctcatccttgtgtactggctgaaatcatgccatagctctctgtagccaatgtctgtagggcactttgaaatatttcctttagcatataatatttgacttgcttgtgaactcatcgaaactgggatcttatctttgtatgttttagtttctcagtactagtgtatacctgatacattgtaggcattcaataaataatgctccagtgaattaattactggcattttcacttggataaacccctcaaaccaacatctccagaatgcactatcattttgcccaaacttctgagtctcagtgtaggaaaggtggaaactgcagcgtgttttatgacttccctctttccttcagtcagttcctccattgccatctctctcctctttcttccaattacttaccttcattttgtctctcatctttcacctctcagatctccacttatttcccatcttctagattaaacttcttcaagcttgattcccttactgtttctcctcttccagcaaatattttggttgtcattgctgtagagatgaagaaacctggacatatgcttgacttactcatgtctggtttttccaccgtttcttcacagagggttctataatgtgcattttctgaagtgaagcattgaacatggttgagaccattgttttctaacactcataaggtaacctccaatattgtggatggtgtggccttcggggaactgtggcaccagtcactctgtattgcaaattccttgctgggttgccacctgtcacaccccaggggtttgggagaatttccacagggtcagacacagcatgaaatgggctaaggaaccctctaaaatggggaaaatgaaacttacaaggtcagagtgagcaagagcagagacccactgtttcctgtccacccttcatctcacagagaggtgtgtcaggagttctgttggaccttctgtgtgggtttgcattcgaggagtgagacttcacctttaatttggcctttactacaaggcaatcttaggtgcagaaaaataatcagaccagtttgcaccagacatttggaactggcagcagctgtttgaagaagttgactaagagcaaaaggtgctggttcttagggagcttggcctttaagaagttacagccactcctatccagaggttctattggcagctgaattaggatgcagtgcctccttccgggagaaggggattcgatgctccatccaacttgctcattgcccaggaatcatagttaggacatctggagtcactttaagacaactgctcactgcaccacagtcctacctggctggtggtagagtccactgtctaatgcagcaacctgtgtgtgtcacaaacctcatggctcagtctccttagccagacatttagggtttccattctttggccatattcctttctgatgtcatctctcatgacttcttgtcacatgttctgtggcctagccaatggaatattgaatgtcctcccacgtgaatccgcttccatccttctacaataccactgtacctgcacctttgcagttcttccctcctggatgcttctctatccttctccctacctcctttccccgcaatgttctctgtctctaagtgtctaaaggccacgaacacctcaaggttcagccaaaacctctggccctttctcatctaggcatttgctcatattttcccctccaactgggaggaacccctccccaacttctttttttccaagcttaatgatttctcataaacttttctctgagcccctaggaaaaaaactgtgttttctttgctgccccccaaccatagtagtcaactttaaaattggcattaacacattcccccttgtcttacacatatacatttctttacactcctatttgatgacaggtccatccaggaaagcaatcatatcttctatgccttattccctagagtaacttgtgtattacaggtgttcaatgatgggtaatgattaagtgaaaagatcagggcatgaggtatgtgtgcaaaaggctgggggctgtcagaggcagattcgtatctctgccttggccagataagctgggtatgtatgtgagccgatgggagcatcccactccgtcctcctccctaatctttctctctaccgacataccctcataccctcacctacgctcagtgactcccaggattatattcaaaagtaagaacaagaagacctgattcatcatgatttaggaatggcttgtaggatagactggggacataaccacacactttttgctttcaaaatgtataactgagcagttagcagttagctgtcttttgtttccaacctaattcaattgagaagtgatataagaggaaagaaatatcccaactgcagagaagtcttcagtcaagtctcaagataatttttttaagtgatgtcaatgacataaaacaaagaggaaaggtctgtgtcgttgcttaacgatttcacgtttttgccttccaggagacagagctactggatctcagccttgtcaaagatgccagatgtgggagacacgccaaagctcccaaggtaggaggttgagtgttgtgcatgcaccagatgctgccttgattgtttggctgtgtcacaatatcaattaattgccccaattaaaagtttctatgttatagatgttgtaaaacacaatagccagtatgccctaaacactttcacttttattaaaagacggaaacaatgaacaaatatgtgggctcttggacagaggggcttgctttatgtcctctaattttgcctttgtttgaaaaaaaaagacaacgacaacaatgcccaagttactgggtaattctaaatgattaaaaagtacttgaaattatttgaaaaaatctttgaacctcgtaaacatatgggaactaaccgttagacatgatgaatagaactcccatatagctgaaatgctctgcaattgaaatgattccatccacaatgccaaaaggtgtatagtcttaattctgcaaatgttactagtaaagatcagcatactttgggatgaattgtgtgcagtgtcatttgttttggtttgaaaaacttactgaagaaatattcaaagaagtgtttgcagtctgtttattttttgaagataatttttaaatattggatgaagaacataattttttaagcttagatgatctggtaggatatagtagcaggatatgttgtcttgccatcaaagttaaaagctattcttcattttatttaaaatttagtactttacatacttcatttctggcagagagggtattggcaaacatagaagtacagttgccatttaggagctcaatgcgtctttccatacttgatataaaactagctattttctatttgagtgtcttcccacaacttttgttttatcttttaaaagtcaaaattctttctctgacattaaaatgatctgttgctttggagatgcaagaaaaaaaaatcacctggaataattattcttcagaggcgtaaaaaggcagtaggtgccagcatattctatgacacagcaaacacacggctgctgggttttttaattttttaatttttattttatttgctgaaagggttaaaatgatctatggtaaaatgtaaaaaacaaagatttttgaaagaaaaattagaactgtattcaagaaggcttctataagtgtttcatatgaaactaatctgttatttacatttatctccttagtaacatggaatttcaatagtttagcctctcagttttgtatcagacttactataattaatgctttgttgatgattcaaaattgctcacagtttttagtataggaaagaatattttttcttcttcccccaacaacatttcagccaaatttcatataagcctgttagttccaagaactatattgataatgcagctatgaaatttatctttgaacctaagtttattggcctaacttgcaatttcaatatcgatattagttttaaagacagttgccgacactgcatcagagccctgtttgtccccaggcattgggagtcaaagtgaattctgctgccacatggagggtttctttcaggcttgaatctgtctcttttattgcggtacacagcttgcttatcagttaagtgtttcgtttatggatgtggtttgataaatgtctactgaacagtgacaaatgaacagcagtagggcctgtactgtgctcagctgataaaccactgttagatcctcaaatgcttctcgtgaggatggatttttaacacttagaatactctgactttgtcagcttttctccatcagctctttcttggagggactgattacttcctctttgaattatctatgctcctggcttcctttttttccctcctatttattgctgatgttcaagaacctcactctcctctaatattttcaaagcctggttctattaaacattacctgtgtggctttcctgagactccagcttcttccttgttggctaaatggtgaagataatgataataataagtacttgaaatggttgctataaggattaaatgaaataattcattaggaaacctttagcacaggagttctcaaatttaattgctcatggaattacctgggaaactttcaaaaatgctgatgtgtgttttccgcctccagaaatgctggtaccataagaatcaaattgatacaggtgtggtgtgggcatgatggatttgaaaaacaaatttgcagcaaaatttgagcaccactgccttaacttactcttggtgtacaataagtacttactaaatattagccaatattgttggtagtaacattgttgcttttgttatcactaaaaaattcaagtcagaattgtagaaagccacttttcatttcactcacttaatttggaaatgtttatgtcagcaaaagggatcagaggaggggcttatctcaaagggggttgtggattgacaggcaagaaagaagttgctattactatcagtttaaaatcttcaaatttccagagaaaacctcagctcaaattggacaaataaaaatataatttattgaaaatgactggaatgtattgaaaatttcagcggaattgccaggttcaggtgaagtttcattccactgctcagttaatgtcaccaaggactaggtgcctctttttttcatcagtatgccatgcaaggttctggtaggggttctgatatggcttggctgtgtccccacccaaaatctcatcttgaattgtaattcccatcatccccatgtgtcgagggagagaccaggtggaggtaattgaatcatgggggcagttcccatgctgttctcgtgaaagtgagtgagttctcacgagatctgatggttttataagtgtttggtagttcctcctgagttcactctctcctgcttccttgtgaagaagatgcctgcctccccgtcgtcttccagcatgattgtaagtttcctgaggcctccccagccatgcaaaactgtgagtcagttaaacctctttgttttgtaaactaccatcttgggaagttctttatagcagtgtgagaacggactattaccgggtccttttccatcttcaggttccccttggatgctaccctctgcacaccacccttggcagctcctggcctccccacctaacagtgtcatatggggtggcccaaaagagagactagctgcctatcagagaattgtatcaggattacagtataactaccttgtagaagaaggtgtagggcctgcaagaggaaaactagaccattgagttggttagaacaaaagcagcaacaggacttagagtagattaaaagtataaagataccaggataaagtgaagaaagcttggaaactggggacagaaaggcaatgtaacaaaaggacagattgagtgcaagactttctgcgggggcttatagaccataaaggaaggaagaacatttgtgaagcagatatttatcaaaatacccaggcaccccacaaatatttatctctatattcatattatttttgttttttacagcatctcattacataaaaattcaagatctggttgaaaatgaactgttttttgtgcctgctgtgatttgaaataacatttacaggaaatggaaaagcttccatgtgttaccctgtttatgaatttaaatgtcaacccccaacacaatacatgaaattccagatcttcttttctgtatataacctttgttcaagttgccagttttaaaatttcacattagagagaacttgggagatctttatccaaatgtaataaccaaaagaaaaacactgtatcctttgaaatctaaaaggtgcttactttttttcttgctctctctctccctccttccggccctcccaggtttgtagagcacacgtaagggcaagatgctgtggtatatatatcttgtctgtgctatgtacatgtactttctgggtcgtcacttcaaaaagatctttgcttttaaaaaaagtgtttatcactgcggcctctgatctattagtagttcctgacccatcagatccattcagtggctcatgtgcagctttcataaaataaaataaacttgataagagtggaaaataatcttgtcttgtacagaaaaagttgttttttgaaacttttttcatgtatgtgactgtatgttctgagtcacagcataaagtgtaatttttactgtgggcaatacatatcggagaagttttaaaaaggatgctgaacaagatcatttcttcagcctcatgattctcagcatgtattgagtgcttaggggtatggaaaagtggggaaagtggagatgtgggttcaagtgccagctttgccattaacaggcgtaaggaagttgtgctgtctgctggcatctctacttcctcatctatgaaatggggcatgggatacatggttttaggtatgtaagttccgttagcccttgattccagcttttaaattgagaagttaaacacccatgactttccaccttacagattgtaaaactgatgttgaataagtttacataacctgaaacttcttacctccttcatcatgcaaaccaagtgaaccaaaaaaaaaaaaaaaaaaaaaggtcacactctagccaaggtaaggtactatgccaacaaaaaggattaaagacttgtgtcaagcttctttatgtgtggcttctcaaaagcattctaggattgcttttggacaccacagggagcgacctcagggtcacagaggctctcccaactttagtacatgaaaactgtgtgctgccaacttccagctctcaagaatgcacgcagcaatgtcattgaaaaatatttttatagttacacaaaataaactgcttgtcatgctgatctgacaactagtttattctattggtaaagggcagttatttcagatatgtagtattaattttaatgtagattctttgtaaatatctaggccgcaattaaattctaggttgtatgtagtatcaccagaatcacataaggtagattagagtaaaatcaaattttaaaaattgattaggcttttctttcctaatctctacataaacatgatagcttttttacttcattctttattgattcattgattgattgatattcaatgacagaagtcattgagtgactctttctgccaggtactgttacaggtgctggaaaacagcaatgaacaaaaagacaaacagctatgctgtcatatagcattttatttaagagtgagaaagtggtggtagttttaaactgggtcttaaaaaagaaaagaaatcagccgggcgcagtggctcacgcctgtaatcccagcactttgggtggctgaggcgggcggatcacgaggtcaggagatcgagaccatcctggctaacacagtgaaaccccgtctctactaaaaatacaaaaaattagctgggcatggtggcaggcgcctgtagtcccagctactcaggaggctgaggcaggagaatggcatgaacctgggaggcagagattgcagtgagccaagatcacaccactgccctccagcctgggcgacagagcgagactccatctcaaaaaaaaaaaagaaaaagaaagagaaagagaaatccctgatttgctgtgttggctgacttcctttgggcaactatttccatggaggcaaatttcaagctaccaacctgatgtcattgaatgaagagttggaaggcaatacacaccatgtccagtagacctatcagcaggttccagcacctcatggggtaggggaaacagataacagataagtcccactgagaagcataaagcgggatcggagacctgagaaaatgagtgctgggaaggggtctgctgctttacagagccatagtggggaaaggtgtcttgataggaggcagttatatgagtagagacatgaacttagtgagggagagcattcctctttgccggggatacagcaagagcaaagcatatttcaggaatagaggaaggccaatgtggctactgtagagttcagaccttttaggccatgaaaatgacttgggcttttcttctgatggaagagggaaggcttctgaaagttctgagcacagaagtgatgggatctgagcttttgaaagttccactggtggctgttgggagtaaactacaaaagagagaagcaagcagaccaactaaatggctgctgcagatatcctggggtgatgatgataactttgcctgaggtggtagctagagaggtggtgaacaaagtgacataatctgaatatgttttaagatagagacacagggtttgataatgtattggatgtgaagtatgagcaaaagaaaagattctagaacaactattagtgttttggcccagaaaattgggagaattgggttgccatgtcctcagataagaaggaaggaagagcatatttaaacagaaaaaaatccagaatttggttctggatatttaaatgttgagatgcctgctagacttttacctgataatgtcaggacagttagacacaagtctggggttcagggaagatgttggccctggagatacaaatgtgggcatttgaggctcaaatcctgggtgaggtctcttaaggaatgtaggtgtaaaagaaagaggtttgagatctgagacatgggattgccagcatttagactttgaggagacttggaggaaacagcaaaagagactgagaatggtatatacgtaaaagaatagaaggcaggaacttgaacagacacttgtgtaccaacgtccatcgatggatgagtggatatacaaaatgtcgcatacacttacaatggaatattgtttagccctaaaacagaatgaaattttgacacatgctacaacctgagggaaccttgaagacattatgctgagtgaaataagccagacataaaaggacaaatatagtatgactctgttcttatatgaggtacaggcataccgcagcagcattgcagatttggttccggaacaacacaatacagtgaatattgaaaaaacataagtaatacacattttttggtttcccactgcatgtaaaagttatgattacactatactgtagtccattacatgtacaatagctttatgtcttaaaaatcagttatttttagacataattttacaattaaattaaataaaaaatattttattggtaaaacatgctaatgatcatctgagtcttcagcaagtcacagagggtcttgcctcgatatcaaaggctgctggccattcagggtagtgattgctgaagattagggtagtggtgacaatttcttaaaataagacaacagtgaagtttgcaacatcagttgactcttcattgcatgaaagatttttctgtaacatgaaatcctgtttgatattttacccacagtagaacagtagaactactttcaaaattggaatccatcctctcaaaccctgcttctgttttagcaactaagtttatataatattctaaatcttttgttgtcgtttcaacactgttcagtgtatcttcaccaggagtagattccatttcaagaaacgactttctttgctcattcataaaagtaaccccttgtctgttcaagttttatttatttatttttacttcttattttgttttatgtttttaattttactttaatttctcggatacatgtgcagaacatgcaggtttgttacataggtatacgcatgccatggtggtttgctatgtctattgactcgtcctgtaagttccctcctctcacctcccccaccccccaacaggccctggtttgtgacattcccctccctgtgtccacatgttctcattgttcaactcccacttatgagtgagaacatgcagtgtttgattttctgttcctgtgttagtttgctgaggataatggcttccaacttcatccatgtccctgcaaaagacattatctcattactttttatggctgcatagtattccatggtttatatgtaccacattttctttatccagtctatcattgatgggtgtttgggttggttccctaactttgctattgtaagtagtgctgcaataaacatatgtgtgcatgcgtctttataatagaatgacttatattcctctggctgtatacccagtaatggaattgctgggtcaaatggtgtttctggttctagatccatgaggaatcaccatactgtcttccacaatggttgatccaatttacattcccaccaacagtataaaagcattcctatttctccacagcctcaccagcatctattgtttcttcactttttaataatcacgattctgactggcatgagatggaatcttactgtggttttgatttgcatttctctaatgatcagtgatgttgagctttttttcatatgtttcttggctgcataaatgtcttcttttggaaagtgtctgttcatatcctttgcccactttttgatggtggtatttgttttgttttgttttttttcttgtaaatttgtttaagttccttgtaaattctggatattagacctttgtcagatcggttgattgcaaacattttctcccattctgtaggttgcctgttcactctgatgatagtttcttttgctgtacagaagctctttagtttagttagatcccatttgtcaagcttggcttttgttgcaattgcttttggcatatttgtcatgaagtctttgcacatacctatgtcctgaatggcattgcctagattttcttccagggatttttatggttttgggttttacatttaagtctttaatccatcttgagttaatttttgtataaggtaggaggaagggatcaagtttcagtttcctgcacatggctagccagttttcccagcaccatttatttaataggagatcctttccccattgtttgtttttgtcaggtttgttgaagatcagatggttgtaggtgtgtggtgttctattccattggttctgtatgtctgttttggtaccagtaccacctgtttcggttactgtagtattgtagtatagtttgaagtcagctagtgtgatgcctccagctttgttctttttgctcaggattgtcttggctatacaaggtcttctttgatcccatatgaaatttaaagtagttttttctaattctgtgaagaatgtcaatggtagtttcatgggtatagtattgaatctataaattattttgggcagtacggacattttcatgatattgattcttcctatccatgatgatggaatctttttccatttgtttgggtcttctcttatttccttgagcagtggtttgtagttcttgacaagatccttcacatccctcgttagctgtattcctaggtattttatgctctttgtagcagttgtgaatgggagttcattcatgatttggctctctgcttgtctattgttggtgtaaaggaatgcttgtgatatttgcacattggttttgtatcctgagacttggctaaagttgcttatcagcttaaggaatattggggttgagatgatgtggttttctaaatatagaatcatgttgctgcagacagagacaagttgacttctctcttcctatttgaataccctttatttctttctcttgcctgattgccctggtcagaacttccaatactaggttgaataggagtggtgagagaggccatccttgtcttgtattggttttcacagagaatgcttccagttttttcccattcaatataatattggctatggctttgtcataaatagctcttattattttgagatatgctctatcaatgcctagtttattgagagtttttagcatgaagtgatgttgaattttatcaaaggccttttctgcatctattgagataatcacatggtttttatcttggttctgtttatgtgatggattacatatattgatttgcatatgttgaaccagccttgcataccagggatgaagctgtcttgatcgtagtggataagttttttgatgtgctgctggatttagtttgcagtattttatcgaggatttttgcatcgatgttcatcagggatattggcctgaagttttttttgttgttgttgtgtctctgccaggttttggtaacaggatgatgctggcttcatgaaatgagttagggaggagtccccccttttcatttgtttggaatagtttcagaaggaatggtaccagctcctctttgtacctctggtagaattcagctatgaatccatctcatgctgtgctttttttggttggtaggctattaattactgcctcaatttcagaacttgttattggtctattcatggatttgacttcttcctggtttagtcttgggaggttgtatgtgtccaggaatttattcatttcttctagattttctagtttattcgcatagaggtgtttatagtattctctgatggtagtttgtatttctatggggtcagtggtgatatcccctttatcattttttagtgtgtccatttgattcttctctcttttcttctttattagtctagccagcagtctatctattttgttaattttttcgggaaaaaaagaagaagctcctggattcattgattttttttggagggtttttcatgtctctatctccttcaggtctgccctgatcttagttatgtcttgtcttctgctagcttttggattagtttggccttgcttctataactcttttaattgtgatgttagggtatcagtttgagatctttctagctttctgatgtgggtacttagtgctataaagttccctcttaacactgctctagctgtgtcccagagattctgatacacgttgtctctttgttctcattggtttcaaagaacttcttgatttctgccttaatttcattatttacccaggagtcattcaggagcaggttgttcaatttccatgtaattgtgtggttttgagtgagtttctttttctttttttttttttttttgagatggagtcttgctctgtcgcccaggctgaagtgcagtggtgtgatctcggctctctgcaagctccgcctcccgggttcacgccattctcctccctcagcctcctgagtagctgggactacaggtgcccaccaccacacctggctaatttttttgtatttttagtagagacggggtttcaccatgttagccaggatggtctcgatctcctgacctcgtaatccacccatcttggcctctcaaagtgtctttttttttttttgagacacagtctcactctgccacccaggctggagtacagtggggcacaatctcagttcactcttgtgctccacctcccgggttcacaccattctcctgcctcagcctcctgagtagctgtgactacaggcacctgccaccatgcctggctaatttttgtatttttagtagagacggggtttcaccatgttagccaggatggtctcgatctcctgacctcatgaccagcccacctcggcctcccaaagtgctgggattacaggcatgagccaccacacctggccttgagtgagtttcttaatcctgagttctaatttgattgcactgtggtctgacagactgttatgatttcagtacttttgcatttgctgaggagtgttttacttccaattatgtagttgattttagagtaaatgccatgtgatactgagaagaatgtatattctgttgatttgggttggagagttctgtagatatctgttaggtcccgttgatccagagctgagttcaagtcctgaatatacttgtaaattttctgtctcattgatctgtctaatattgacagtgggatgttaaagtctccaacaagtattgtatgggaatctctgcgtctctttgtaggtctctaagaacatgttttatgaacctggatgctcctgtattgggtgcatatatatttaggatatttagctcttcttgttgaattgatccctttaccattatgtaatgccctttttttgtctttgttggtttaaagtctgttttgtcagagactaggaatgcaacccctgcttttcttttttcttttggcttccatttgcttggtaaattttcctccatcactttattttgagcctatatgtgtctttgcatgtgagatgggtctcctgaatacggcataccgatgggtcttgactctatccaatttgccagtctgtgtcttttaattgtaacatttatcccatttatatttaaggttagtatggttacatgggaatttgatcctgtcatcattatgctatctggttattttgcacactagttgatgcagtttcttcatagtgtcattcgtctttatattttggtgtgtttttgcaatggctggttttcctttccatatttagtgcttccttcaggagctcttgcaagtcaagcctggactaaatccctcagcatttgcttgtctggaaaggcttttatttctccttcgcttatgaagcttagtttggctggatatgaaattctgggttgaaaagtgttttctttaagaatgttgaatattggcccccaatctcttctggcttatagggtttctactgagaggtctgctgttggtctgatgcgcttccctttgtaggtgacctggcctttctctctggctgctcttaacattttttcctacattttgaccttgaagaatctgaaaattatgtgtcttggggttgatcttcttgtggggtatcttagcggtgttctctgtatttcctgaatttgcatgttggcctatcttgctaggttggggaagttctcctggatgatatcctgaagtgtgttttccagcttcttttcattctccttgtccctgtcacgtactccattcaatcgtaggttcagtctttctacatagtcccatatctcttggaggctttgtttgttccttttcattattttttctctaatcttgtctgcatgccttatttcagcaaggtggtcttcaaactctgatatcctttcttctgcttgattgatttggctattgatacttgtgcatgcttcacaaagttcttgtgctgtatttttcagctccatcaggtcatttatgttcctctctaaactggttttctagttagcagctcctctaaccttttatcaaggttcttagcttctttgcattggattagaacatgctcctttagctcagtggagttttttattatccatcttctgaagcctacttctgtcagttcgtccatctcatcctctgtccagttctgcacccttgctggagaggcattgaggtcctttggaggagaagaggcactctgcattttgggttttcagtgtttttttgttgattctttctcgtctttatgagtttgtctagttttgatctttgaggctgctgacccttggatggagtatttgtggggattttttgttgttgatactgttgttgttgctttctgtttgtttgtttttctttcagtggtcaggtccctcttctatagggctgctgcagtttgctgggggttcacttcaggccctattcatctggtttgctctcgcaccaggagatgtcactcaaggaggctgtaggacagcaaagatgggtgcctgctccttcttctggcatctctgacctcaaggggcaccaacctgatgcgagtaggatcgctcctgtatagggtgtctgacaaccacgttggagggtcttacccagctgggtggcacagggaacaggacccatttaatgaagcactttgactgtcacttggtggaggggatgtgcttcgctggggagaaacccactcttctgggctgcctggattcctcagaactaccaggatgaaaggctaagtctactggtccacagaaactgcggccactcctctccctggggctcaggcccaggaagatcagggttctttccctgagcctctggctggagttggagttcctgcaaggagtccccaccaagtgagaaaggatgagtcagggtcaggcctgaagaggcactctggctgcagtctgccacagctggtgtgttgggctgtgggggaacctcttgggaccaagctgcccagccttcctggccccaggagaggaaaagcatggcctggagctgtagagatggatgctgtccttccccacccagggagcttagcgtgacaggcagttacaagtcccagtgctggctgctgcccctcctccaaggagttcaaatggcttagacagcaggcagccacagctgtggtgctggtggcccctccccctgggaacttggcaggcttaagcagattcgagctgagaggctgttgagaatctgcacagctctggggttgggaccctaggccccagtggcgtgggttcacgagtgggatcttccgatccatgggttgcacagttctgtggaaaaagcatggtttccccggctgggtagcacgctcactcgctgcctcccttggctggggggtgagggctcccctctcccatgtggctctcaggtggaccaccacaccacactgctcttccttcctctccatggatcatgccagctgcctcgtcagttccgatgagagaacctggatatcttgattgctggtggaggattcacacactattatgattctttttgatggagcctctctgatggctgctgctcctagttggccatcttggccctgcctccccgttcaagttttattataagattgcagcaaagcagtcacacctttaggttctaataataattattgtcctctagcaatttctaccacaactacagtgactttctccactgaagtcaaagtcgtccatgaggattggaatcagcttcttccaaactcctcttaatgttgatattttgaccttctcccatgaatcttgaatgttcttaatggcatctagaatggtgaattaaggttttaaatttacttagcccacatccatctgaaaaatccctatctatagcagtgtagccctacctaaagtatttcttgaataataagatttgaaagtcaaatttattgatccatgggctacagaatggatgcgttagctggtataaaacaacattaatctccttgtatatcaccatcagagctcttttgtggccaggtgcattgtcaatgagcattaatattttgaaaggaatcctttctcagcattaggtctcaacagtaagcttaaggtatttagtacaccatgctgtaaacagatatgctgttatcagattttgttgtgctgtttatagagctcacgtgaaataggtttagcataattcttcagggccctaggatttccagaacagtcaatgagcattggcttccacttaaagttaccaactgccttaatgcctaacaagagagtcagcctgtcctttgaagctttgaagtcaggcattgacttctctcaagatatgaaggtactagatggcatcatcttccaacagaaggctgttttgtctacatggaaaatctgttgtttggtgtagccaccttcatcaatgatctcagctagatcttctgggtaatttgctgtagcttctccatcagcacttcctgcttcaccttgcacttgtatgttatggagaaggcttctttctttaaacctcatgaaccaaccactgctagcttcatacttttcttttgcagctttctagcctctctcagttgtcacaggactgaagagagttagggccttgctgtgggttagattttggcttaagggaacattggggctggtttgatcttctatccagatggctcaaactttctccctatcagcaatacgtttgctttgctttcttatcatttgtgtgttcactggagtagcaattttaatttccttcaaggacttttcctttgcattcacaactgggcggctgactgcttggcacaagtggtctagcttttggcctatcttggcttttgacacgccttcctcactcagcttaatcttttctagcttttgacttaaagtgaaaggtgcatgattcttcctttcacttgtacacttagaggccattgtaaggttattaactggcctaatttcaatattgttgtgtctcagagaaaagggtggccccaggagagggagaaagataagggaacagctggccaatggagcagtcagtacccacacaacatttattcattaaattcaacatcttatataggtgcagttcctgatgctccaaaacaattacaatggtaatatcaaagatcactgatcacagatcaccataacagatatattaattattcaaatgttgtgaaaattaccaaaatgtgacacagatacatgaagcatacacatgctttgtaaaaatggcaccaacagacttgctggactcaggaatgccacaaaccttcaatttgtaaaaacaaacaacaaaaaacccccacaatatctgcaaagcacaatgaagcaaagtgcaataaaatgaggtgtgcttgtagctattgtagtcaaatccttagagatagaaagttgcatggtggttgctgggcctgggggaggagaaaatggggagttattgtttagtgggtacagagttttagtttgagaagatgagaaagttctagagatggatggtggtgatggttgcacaacagtgtgaatctacttaatgccactgaactgtacacttaaaaatggtaaattatatattatgtatgttttaccactttttttaaaaaaaaaaaaaaaaaaaagaagaaactgagaaggagcaaccagtgaggagggagaagaaccagaacagtgtatttcctggatgcctaaaaaatatttcatggaggaaatcaaatggtgaattcaggtcaaatgatgaatttccttctagcttttctttttttatggagacttcactttggcacacttgtaactttactgacaatacccttttgtatatgcttttttttcccttatatcatgaccgtttcctgctaatattcaaattaggccgtttatttaagggttgtcaaatctcaaatagctcatcatagaatctggatgccaatatataaatctcataatgagctgttatttggatgttatacaacagtggtttcaatgaatcatccatgaggcctggagttgaaatgaatgctttatttattgtctcccattgctgattataagctgtttccctgactttgtacagatttcaccattatgtgaagccacagtcataaaatttggtatagatatttgaggtttaggaaagaagaagaaaactctttacacaacaaagtaaaggtttctccttttttctcctgattgctaaggagatcaacctttgacccttattcttggttccaactatttcttaatttacctaacatgcttcagtagtttttttggtttgttttttggtttgttttgtcattttgttactataaatgtgtttttatttacatctttactaaatggagcaaaatagggctaacaacttattgaatgatctgtgtgtgtgcgtgcatgtgtgtgtgtgatggttttgacagctattcacatttatctttagatgtaaattatatggcatagttccttttttatgttcattaaattccatagatgtcagtggtttccttggaaacaaaaacctttatataactagtcagagatttggtagcagaaatatcaggatgctggcaggggttcaggggtggttaaggaatggttcccttggcagatgtttgcatttaaaactcttctgacttttctccctgccccttaccatcatggccattcaatagtgcacaagataagatttttaaagctactattaaaatgtagaatattttctttaatggctaaaagctttttactttaaaaaaaaatcgcagatatgttaagtcttttctggggtggtataatttcccaaatttgagaagaggttggtgtatctcctatcaacagttaaatctgcatgtttaggcaatgcctacatttttcagtatatatggtgtccatttgtaaaatacagtgaactgcatatgtgtgtggttgaatcaagattctatgtcatttataatggccagcatctgtcctattaccttattgccaaagggttctaaaggacctggagaggttgtagagaaggtaagggaaaggtcacggttctgctcaagggtaatagtaggtgaaaggcctggcagccaagaacattctcacggaggcccagagtggacctgttgttgaagacagaattagtaccatgagttaatgaaacccaggtcttttcagaagattgtgactcatttttatcattgcccctgtctggtgtaatttcaacgtaaatccaatttgttctacatgcaatggtacatagttgcatttgggaaacatttctcaattttaattcttttaaacgcaataatgcgccatcttgtggacatatccgatattaaattcttaaattaattctacatagtgaactgctctctaagccagggttttcaatcatgggttctaatatagagatatgagaagcacttggggagcttttaaaatcctgatgtgcaggccacaccccaatcaattaaattgaaatgtctgctgtggggctccaacactgatattttctttaaagttcccaagagattccagtgttcaaccaagtttcaaaaccattcgtctaagtaaaaagagtaccagcttaaatggatgatttctcttttgaaaatagagattttacacagaaaagcattgagaattttcctacaaaatatgcttgtcaaaaggaccacttttcagtcaagttttccttaaacttgaccactatacttaatgtagagaagtacaccacggtacttgtatcagtcttctctggttaccacagcaaagtaccacaggctaagtggcttaaagcttaaacaacagaagtttattctctcacaattctgggagcgggaagtctgagacaaaagtgccagcagggttattttctttggaggcctttctcctcggcttacagatggctgccttccccgcatcttcacgtggtcctccctctgtttctattcctaatttcctcttctaataaggaacaagttgtattgcattagggcccaccctcatgaatgcatttaacttaattacctctttaaagcactattgctaaatactattaccttctaaattactgggggttaatacttcaacatataaatgttgaggggacacaagtcagcccttaacagtgttccctcattacattacaaagcctagcttaggatttgcttctttataaggagtagcagtgtatgattattttgctgttggtttaatatagaaaagtagatttttttctttataatcaatacaatggtcaatgtggataaaactgcatagtcagaatcatttcagaaatacacaattgcttttgcagagtggctttagtacagaatatgttgatttggcattatcagcactaatttctgcatgccccagggcacccagtatgtgtctttgtgtattgcaagtgcctataagagtatagttattaaggtcacaagctcttgggtcagaaagccaagccacaacaccaataacaagctgtataatcctgcaagttatatcatgtctctgagacttagtttcttcatctgaattacaggaataatcgccatgtttatatcatctagttgcggtaaggactaaatgacaaaatgcacgtaaggcacctaacacaattgtcacatccattgtttgtctaaatgcattttgccatcattattaagtaaataaaatatataacttacatgtatgtgatgtagtgggaaaaagcaagttaaataggcataatttacctatttaccatagaattccatgcactaatatagattgtcactataatctatatttatatatatagattgtcactataatctatgtataagagatttatacttttgtagctgtggcatttaaacctactgattaaaatctaacttctatgtattagctatagaaaaatgaacttgaggcatatttctctttgcagccaaacacctacccccagagaactatcacagcaatattgttgtactaagacttacagttcttatttagaaaactgtctagatttgccaacagttaaatagattttccaaccatcaaaataattttagagcaatttactttcagttaagaacatgcgggtatctttttctgcactatgaagtcattgaagcaaaatccaaagcactgttttgaaatggaataacaaggttaggggtcagagagacccagattcaaactccagtgcacttattagctgagagaacccaggaaggtttattggtttccctgtgaatgataatacttgctgtattgatttgtcttgctagttggattttaactggtaacaagacataaatcataatgtttgatactacttacttccctatgggccttaagttcacttttcagtgtattcttcttaatgttctgtgagactggtaaataatgaagtatatatatatatatgtgtgtgtatatatatatatatatatatatatatatatatatatatacacacacatatatatatattacttgaacttcctcaattttggagattaggtcataaactaatgtggcatgtaatttgatacatgttccagcaggggaaaatactgggatgtaatttaacgaaagaaacattttgaaatgggaatattctctgaaaatatggagtatatcattacaattccttttcagctttaggactcataataaactgggcactgtccagtttatgagcagcgagttcctatagtttgaaagtttgcgtcccctccaatattcatgttgaaacttaatcgccgatgcaatagtatttaaagttgtggccttttgaaggtgattaggcaatgagaactcctccctcatgaatgtgattaaggtccttataaaagagatttcactcaaggttcagtcttttttgcccttcctccttggcccatctgaggacacagcattcgaaatgccaccttgaaacagagagcatccctcaccagacacggaacctgtctacgccttgattttgagcctcccagccttcacatctgtggaaaataaatttctgtaaatatttcccacctgacagatctttgcttataaattggccggtctgtttgttatagtagcacacatagactaagatactagtttttaatttgggtactgcagctgatggaataacctgggtagagtcataccatcttttaggaatctcaccttcctcataaaaaatgaaagagacaagcaggatgatccctggggactaaaggtaatatttgtatccatcatggagctattgggagaactaaatgatatacatctctcaaatggatttgccagccataatgtgtgatatagtaatatcaatttgtgagtaagttgggtagagtggaaggaacttaggaatgtataccagtttattctgagaaatttgtgttttgtcttctttgaatgggaaatggctgaaaattcttaaattccttcaatgtaccataaaaaagtgaaatcctatatcactgcctttggatgtgatacatgacccatagtaggtattttcgtagatgaaagaattcctatctatggcatttatcttatgtgaaaagtggcaattaagatagtaacatatttgccacttaacagatatttgttaatgatgaaataaagttttccggaactcctgaaattaatgtccatagagatttcaagaagatggaataacctaactaattagacagtatgtttgttggtgtttaaaggtgagacaagaccactgagattaaaagatcagaaaattctcctcacacacctaatacattttctctatgccacctggtacttctgtactcaaatgctgcttgatttttatatttatacccaagaattactgatttcaggtaagaacagagggcttgagagaagaatttgctcatcactgcctgccatgaatgggcatagctctgtgaacagttattgtatttttttttcctcaggtatatagaatactttatcaaaaccaaaactcactgtttctccaagtgagttccttggaatactaatagatgctataaaaatgtcatctaggtgtggtggctcacatctgtaataccagcactttggaaggccgaagcaggaggattgcttgaggccaggagtttgagacccaaagccctatctcttaaaaaaaatataggtggatgcagtggtgcatgcctgcctatactcccagctactcagtataggctgaggcgggaggatttcttgagtccagagttcaaggctgcagtgaactgtgattgcaccactgcactccggcctgggtgactggtcaaataagtttgggaaatgctaagggttcctttattgcaggatttctcacagcttttgatgtgttggacatgggttagtgtcacttctttcttttttctttaactatgggtctcttggtcacaagcatctcataggattaatataaatgttctaaaagccatttattatgaagttaaccacacttaataaactagaacaccagtttatgagtgatgcttgtcttcacagtagtgcagatcctattaaagatgtttagagaacaggttcttaggtgatctaaaccagaaaggcctttttcatatatcttgataatattaatataatgttgaattttgtcttgtattatattatgatgttttgaattttaaagtttactatttgcattcttcccacctaattaatttttttaatttgagaccttatgacagaaaaccatcagcattgcccacatattactcaaaacacaagaatttcatttattcccatagcacctggaatctatgctggcatttagacaagcctaatgcctagtgtaccactagagtgagattctctgtccactcttaactatttctagagcctatttttctatggtttcacatcttatgacttatataaaattggtactacttggcctttgtggaaggattttaagtcaaggtaaaccttgaattgaggttagattaaaagtggtagaacttacttagggagcaataacttttaatagtcatagtttcttttcggttcctggtgtgtgtgtgcagaaagaaagaagtctgatgattctctggttcatgggagttgacttttatgccctgaaagtgaggctttgcttctgtatcctcacactggggaacagcagtggttaagaggctccaccagtattactcatgtggtcacaatcaagttgcttaacttcatgtcttgctttcttcatccataaaatgaagttaatagtactatttctcagggttattgtgaggactaaaggccataacatatatttcataataggggatctgtaagttgtagttactgttatccttaaaactataggccattagtgcatatgtttaataggcttgaagctgtgccattatttgacaagttaaactcttggttgcatcatccatattctcaatgtttttctttaggtatttgcatttgccatctatagtatataggcttctatctggcaaagttttcacttttaatggtatctttaacaatatttttcaaaagctttgagcatcactcatatttcaaaaatagtaaggtcatgttaaacttttaaattaaatcgtttcttcctagactatttcaagatttgtaatacctggttaaaattgtttagcaaacacaatttttctttctatgaatgttaattaaaaattaaatttgactctctttagttgaaattagtcattttgtatctgtgcatgaattacattttccttgattcttatagtaccttagtataaataaatttagtaagagtttaaaaagaagtttccttggttgaggtacatacaaacaatatgggaaattgaacacctattgactttattatttttgccatagataaatctctactgtcgaaagcagtagttaatgagacatttattttattttatgggtctctgaaacatgcttctctattaatcaatttgcttgcaattttgtttgaagattaaagattctttagaaggcattgtctacatattattacttatggataccagatgaaaatctaaataaaattaatttaagatctcttatattagttctgtcctacacatataccaaagaatgtggaatggctgaataaggaaaattaaattttaagtttacacaattttaaagtcaataatgctttcaaataaattatctatacataatattgaaaaggaatagctcttagaatatctaaaataaaaatagatgattgagtgggatatttcacatgagttggtggtttataaaactttgagaaagtatgttaaagaataaattgtgtaagtaatagcgaactagactcagtatttaattttatgcttagctgctcaaaatttcatggtttgagttgagaattcttaagtcaaataatttatttgaaggatactgtagagcatttgaaatactgtgaaggtgtgactagaaatctgtttttcccattttaaaaaaaaaacaaattgttattctagactataaaatatagaaagtcataatagatggatactcttctctgtaaatatattttcccctgatacttaactgtaccatgttattctaaattattcctggtaaatgcttacaactcttccaagtgtctggaaactcatcaagcttcttttaatcatgtccctcaaatattcggcttgtaatttactaatattcatgccctgtttagattgtaaacagagaaactacaaagttgtaacagaaaagtaatatattgagctgaatcatgccttacttttgtaagttgagcttgtttctctggcaacaagatgttagataataaatcatatatctaaaaccatataactacagaagtggggagctgaaagttcagaagtatcatctgactgtgttgatggcatctttacctcaattaataaggtgtggcaacgttcactcaaggacagaaattcaatctgtggtggatccaaggggattcaaaatatttcttttaatccaaccaaaacatattgctttaatggcattagttggtattagttgcatgtggcaaaaatttcatgcactattaatcctagcactacactgcaacactagaattatgtgtccttggccttaaataaattattcggttgtatgattgagaagagaaaaaccaattattttagaggccagtcctgaattattgccttaataaaggttcaatttcaaaaaaatgggaagttgctcagtccagttgaaaaacaaggtgggaagagtaacagcaagtgagtctttaattttgtcaacatctgatgctactgttaacacaaaaagttgctttgaaaaaaattcaactaaataagttgccttcgtggtttagtaattccagatatacacaatcgtctgtttattttcccaaagatcaaactgtgttcatctatatatttgcatacgtaacatattaaagttttctcatctaacatgacactgtaagcatggccatgattctaaatatttttaatatttatcagttgtatagctgaataataatgcattgattggaaatcatattaactacttactatttacttttgagtagacaatttctgttttatttttgctattataggtaaatctgaagcagatatctcttcttcatttggcgtttttattctttggtaatgcctcaaattgtaatcctagcagtgagattacagatccaaatagatctaattcaatccattatcacaggtttcttcctcatttcctcttctttcatgtatatctgtttttgtatagtggcaattttgattccttactgcattaatgtattcacttctttgtcatagtctacacaaaataattctagaataaaaatactgttgctactaatacaagtccactagagaaaatccaacgtttctttgcaattatctttattccttattgtatgcttcactaagaatatatactccaagattattaaaattattttctatagagttatattattaatttgctatacacttagatttatatatttatagttacgttcagttttagagattaaaatgctctattgcttttatcaattttacatttggaaagtataaaatattcctttgcctcagcattcaaaattatataaagaagaatgctcagggaagtcactctcatccatatccttccaccctattcctacccaccttctggttttccttaccatgtttctgtttacaaaaataaggaaacacacacacaaacccatacctagctacccagtcctctcatctcatttaataaaaagtccatctttccccagtgaattgagacaccagttttttcaaaatatatgtaaattgcctcagtctttcttacacaaaatgtaacattctatctatgtgcttttataggttgcctgttttacttaatataacgtcaatacctcttcatatgggtcatgggaatctttttcattcttttgtacagctgcatattgctccactatatggaggttctgtagttttttcagtcttctgtgaatgagcatttaggttgtttccattattttttattatgcataaggctacaattttttttttaaatgccttcctttacatatgcaaaagttcagtttcaggataaattcctagatttgtttgttttgctaacatcttcatagactttttctttgtttagattttaccattttctaccccccttgcagtgtattacagaatctttattcacacagtctcaccacaaagtgtattgttaagcttgttatttttgccactttgacaggaaatgtgatcaatacattttaacttacctttttcttacctatgcatgaaactaagcctcctttcacatgtttaaggaccatgcatgtatatacatacatatatttctaaaacatatataaatatgtatttatacacacatatatgtcttaataaatatatgtcatatgttttaatatgtcataatatatgtcttaatatacataaatatgtcttagtcactttggacttctataacaaattataaatatgtcttagtcactttgggcttctgtaacaaattaccatagactggtggctgaaataaaaacattacccacagttctggaggctgggtagtccaagggcaaggtgccagcaaatctcatgtctgctgagggcccacttcttggtttgcagttggctgcattctcattgagtcctcacataggggaaagcagagagagggagagttgactctctagtctctttttccaaagacactaatcccattttgagggctccaccctcatggcctaatcacttcccaaagtccctacctccaacgccctatcacgttggggtttaagcgtccatatatgaattttgaagggagacaaacattcacttaatagcacaatgctcatttgcataatttgcactttttttttttcatctggtatttcgtcctttttttctccccttggtttttttgagctctttatatatcaggagaattagctctctatcgtaccctagaggtgcaaaaatgttctcccggtttattttttcccttttgattttgcttttggtgtttttttgttgctgttgttgatgttgtttctgccttgtaagtttttgtttttatttttatctagtcaatttatcaatattttatcttattgcttttggcatttgagtcacagttagtaagtctttattcatgcctagtttataaagaaaattcacctatagcttctttttttttttctagtatgacttcgtgattttccatttagatcttggagcatcttggaggttttttttgtttgtttgtcatgaggtatgaacccaattttatttttctaacttaccgttcttttgtcccaacactatttttttcagaccatcttttgccctatcctggtatctaggtgttccaataacatttatttaaaagtccaattgtatatctctttttatttgcaatccagttgtgccaacaccacttatttaaaagtctatcttttgtactacttatcaaaaagtccaacttttgtctaggtgagttaaaatacttacctttttcatatataatgtttccttccatgtgtacctggatctatttctggaatattttttactatttcattgttcagtgtgtctattaatgcttactgaaatactttaaattcaagttctataagggaaaagtggattcttattctagaataacaaaacaattagaaattggcattttttaccaacccattatatcaaatattactctcaatactattctctgctttccaacaaccacctcccaagaaaaaactatttttccctaagacaatttttgtttgtttcatatattttatgtaggtagagaatgccattttctagttttcaaaactttattttttttactttattttttcaaattcctagaaaatgacaaaatcattactagttaaacaattagcaatatcttgtagatttacccacaaagtcccgaaaataaaaataagaaaaaaaaccttttggttattctgccttataaactttcatttttagaaatccatgccatcatataagttgtttgttctataatttctgagctcattttatgtaaaaataactcctgtgcattattcatgttgacaggccctttaaatagccataaagcctgtgggaacagattaatgctgcatctgccctgtgctttttaagtctatcatttttatggaatggaaatcttgcataatgtcagaagttttctgacattgtcaactgcttgtggtggcatagggaagtaccttagctgcactatgtgggtgacaatgtcatatttcctgattggatttttatctgaggagggtgagaactgtcagtttcacttcctcttagaaagatattttaagttgaataagttttcctttaagtgacttgtcacaggtggcaactgtctgagcctgtgtattctattctttgtgccagaattttcttaccactgattaccaggcacataatcactcttgccatttatgacctttgggaaatgaaaattaaaatgttattagtccatgtgggtagcagtggaattggtctgatgtaatgtttttaaattgtttttattttttgaaataaatgatttttacatctactaaaaagtaaattacaactattaaaggttatcttattaaaaagtatttccccttctccatttcttctgttcccttcccctgaggcaaggattcatagtactgcagtttcttgttttcgtttcccagaaaacctgtaaatgatgacatgctatcaaatgctatttaaacttagcaatttgttgcagaaattatgccgtgtcagcacaaatacaagtcctcattctttttctagaggttgtagagtattatttcattttatagatgtgccataatttatgtacttagtcatttgttaataggcattttattgtttccggttttttgctgcctcaaacaatgctttgatgtgtatatatatgtatatataaaatatcatctttgggcacaatacaggtatattcgaatttcctgttggtgaaattgctaagtccaaatatatgtgcatttttaattatgaaatgcattgccaaatggctcagcgaagagattatataaattaatcaattacacttccaccaacaacaatcaagattacctgtttcttcatactcttgccaacaccatgtttgattgaatttttttgatctttgaaatgttatagatgaaaaattgggagctctttattacttaaatttgaatttcttctactgtgagtggagaggaaacttttcatattgtgttgtttgtatttctaaccatatcctttgcccattttccaatatatagttcttctcactgtttcgtaagatattttgatatattaagagctatcatatactggaaatatgatctccagcttttaattttaatttgaccttgtagaattattgccttccagaattatgttttgtagtcaaatttattagtccctttttaaaaactgtacttccaaacagagcaccgcttggaataactattctaaaataataaagattattttgtgatttcttccagtgtttttatgattttaatttttatggttgtatctttgagctatctggaccttattttatgacagtgacaaaggaatctttattagtcaggattaaagtagtccatgataacaaacaactcccaaatgtcagtggaataacacatcaaaaatacatctcttgctcaaaccatctgctgaaggtctgcaaaaacattccaagatagctatcctcagtgatctagggatgtttctgtcttgagctcaaccatctcagcaagaggccttgcatttgctgtggcaggagaaaacagctagagaatcaaagaggattcctcaatgcctcagcctagaagtgacatgcatcccttctgcttattgaccatgtccaagtcacatggcccagcccaattcaaggaggctgggacatacagattccagtatgcccaggggtgaaaggagaaccagtgattagtgagctcataatgtttaccataatatctattttatgttactctagatggctgccaggtcatctaacattacttattgcataacctatttttttctcattgatttggaatgctatcttggttatacactgaaagcttctgtatctttccattttcccctgagatcattgacttttctatatatttttagactagtaataaaatgttttaattattgtggctttacaatatatattacttggtatagtcctgctttatcaagttttatttacatttatattaattttcatttgaatttcagaatcaatttatattgttctcctaaaaaccatgtgtattttttattggtatttctttaagtgatgagattaatgttataacactttatgtctttagcatactacttttatgcaagcagaaaatatgtcttcatttatattcaggttgtcttttgtattccttagtaatgttttaaggtctttatcatatagatcttacagttaaagttaagcttccgctgagtgttacatcactttgatgttttaagtggagcttttatttacatttctaaccaccttttattaaataaaaggaaactaatttttgacataatattatgtatccatgtacttcaccgaatcttttaaaaaatagtttccaggccgggcgtggtggctcatgtctgtaatcccagcactttgggaggccgaggcaggcggatcacaaggtcgggagatggagaccagcctggctaacatggtgaaatcccgtccctactaaaaatacaaaaaaaaaaaaaaaaattagccaggcgtggtggtgggcgcctgtagtcctagctactcgggaggctgaggcaggagaatggagtgaacctgggaggcggagcttgcagtcagccgagatcgtgccactgcactccagcctgggcaacagagcaagactccatctcaaaaaaataaaaaaaaaatttaaaaaaagttttcatttgatttttttcattttaactcatactctctgtaacaattacagtgtcacctccttatttctaaattttatatctatttttgtctttgaatttaagtttatgtattttgatgacttggtaaaattctcatccctttgcagttgggcaaaaattaatcagtgttgtatatgatatcattttattagattctaaactctttgtgagttagaactatttaattaaataaaaatagttgacatctcttataggaaaatcactgtgtgaagtcccaaatgatataaaaaaagaaataaaacatagttcttatgctcatgattcttacctttgaaaccctccctcctcagccccacaaagccaggcacagtggctcatgactgtaatcctaaggctttgaggggctgaggatgggaggattacttgagcccaggagttcaaggcttccatgagctatgatcgcaccacagcactcctgtctgggtcaatgaagcaagactgtgtctcaaaaaccaaccaaacaaaaaacaacagggagtgtccaaaggctgtaatacaaggtcaaatgtagtaaatgatgtaattgggaatcgtaagaagtgtttggaaatattagattttaatttgcccagtggtgccgtaggttggaatggagggaatgcaggaagatgggcaaggcttcacagagaaggaagcatttaagtgatatgttgatgttcagaaacaagatagcatgtgagcagggtgtagtgacacgtacctgtagtcccagctacttggaagcctgaagcaggaggatcacttgagcccaggaagttgaggcttcagtgagctctgatagtgccactgcaagacagattgtggattgcagaaatggccattgcattcctcaggggaaaatctatactcatttttaaagcttaatttttttcagcatctagaataggtgcacccatgaacattcagtatcttcaggagactaaccatatgggaatggtttactagtaactcatttgtacttgagtatccattatattggaaactaggaccatttctttctcattaattgagagtcatgatttgtctataatgtcctttatgatgcagaatttatctgatactttgagttaaatcaggcttgctttttggctcataagtatttatgtatagacagaaattgtggcttttatctatttttattaagtaaaattgtgactgattttatagcaattaagatgaatttttctttgcagacaaattttattgaaggaatattgacaatcaactttcattgaaagcaatgggttttgtgatttcatggaataaatgctctgttctaagagttaactgacctatgtttttgtttcagggttttggctaaatagctgcacatctgtagcacaaagccatttttcctcagtttcctattgtgtagaaaaaacatttgggatcacaaaattcctaggttccttccattctgaaaatttttacactaattccaactttgccttgaatgtctaatgatttgcatttctctatgtaaagcacatctcctggcaccgaactgaaaatgagattagaaaacacctagtagagaggataaaaggtacaagtcctaagcttattttgcattccccttcttccttttttctcccctgagaagcaggatgtcaagctccttggaaaactaatatttcaaaggaaatatcaatttgcaactgaagtatgggattgaatgatttcattgtctcaaaatgatatggtggtgagggtaacattctataatttaaatattcaaagttttgaaaatgtacagattcttttagtaattcttccccagaaatactagtatttactagtagtattttttaaaagcaagtcttctttgcaagatataatcagtattgaatccataaaacagaatattttggaagtatggctttaacaccatggcataattatagctgattatgaccagagttttgaattcaagtaacattaacacaccacaattattgaagttgtatgtatccagattagcaaaatgagcaatatttttctctcaacccttaattcctacatgttagtcctatttcctctgatattttcaggagtcctctttgctttcagtaggtattcaaatgatgactctttcagttctccatatagaagacagaaattagtcttattctcaagctctaacaaaccttcccaaaacccagtgacataaaacaataaacatttgttattgctaatgagtttgcaggtcagctgagtggttctgggttcatgtatgtgtctgtggtcagctgtgggttgatgaagtggctctgctgatttgggctggggtctctcacatgtttcgaggtcatctggctctagactagtctagagttgtccctactcatctccgcgtgttttgttcagctctcccttaaaatcagcactcttctggtttctccaccctggggatatcctcacagtgaaagcagaacagtaagagacagagtggaaacacacaaggcctcttgaggcctagacttggaacaggcactccatcaattacgccacatgctttcgcccaaagcaagtctcaaggtcaagccagttttcccccgatttagcagtagggaaatagaaggagctacagtcatgttgcaaaaggatgtggatacagggaaggtgaagaattgtggccacttttgcaatcaatctaccccactttccttctgagaagctggttgtttccagtgaaatcaaagccagctgaaacctggacaatcaagtagccaaaaaccttccctgttagacttcagcatattgaatttggcttgtaccaatttacagagccagttgttaaacacagctattaaactacataaacttcaatctaaatacattatattgaaaaaagatgatcatgttaatactgtcacttcctactttttattattatccatgttctcaaagttatttataatcattatatccaaatggtaggaatgctatataatgatgctactgacatctctgcccaaatctgtgctcagtgacaccatgttgatagattgaaattggccatgagagtatttacacaagataaattgacaaacactactaattagggctttttttcttcctttttttttttgatagctgcttgttaacatttaccagcccatcattgcctgtatgtgtgatggaggatttgaaggcccaagtcaagtcattcctgcattttatagcatgagttacagatttactttattgacttttatgtgttctatggctttgatggaagaaggaaaatatgtggatagagtaattgaagaaacgaaattgcttaaagctacattttaaaatcagtaatgaccatagtgataaaagctgtttctctctttctttagtaaactttactggatgtaatgaaaacaaatttattcaacttactagtgtcagtgtacaagaataaccttaaggaaaaatggaagaacatgcaggtaatgttttaaattacagcttcagtcattaaaatatggcatatgcattcaggcaaaaattgtcttgtgttaagtgttttcaacacataataatttcaagatgaaattattgtgaattgaaaagcaacaaaaggaaagtgaggttcactatcttctatctccttgctaatggaggccagaacttatttagttttgtgagtcagatgagttgaaatttgccttccagtattccaaggcagcaaaaggtcattccatctacataagagcctgtcgagcagagagcccttttcataaagaaaattcattgaagaagcactagaaaatgaatataatgcaaagagtaaggctgttcaaattctattattcagttttaccagtattacagtaaattcccagaaaaaacaagaattatagtgattttatgtgagggatcaacttacctgggctctttctggctttttaaaatccgtttattgggggtattttaatgaattgttagaatgtggtattggacagtgggaacttataatgaatatttgagatgtggtgtttcagagtaggaaaaatgagactgctaagtaagtaaagaatcaggattctatttataagcccctgacaatccaaagaagattgttttaactttcagtgtaacttctgaggctacacagcccattgcctcctgatattttaactgttacacataaccaagggaggaaagctagaatgaatcatgtgatactaaaatgagacatgcatagcttaatttaacaaatggataaatttgaaaataaaattttttttaatgtgagcaaataagaaatctttcatacagaatagtcccaagtaacttatgtggttaatgcacccttgataggctggaaaaaaactccccagcctttaaatcacagataacgagtatcttccaaagagtacaatatggaaaaagggaaaaagagtaactttctcagtggagaaacctgacaaacactctgtattagtccattttcacattgctgataaagacacacccaaaacttggaacaaaaagaggtttaattggacttacagttctacatggctggggaggcctcagaattatgcaggaggcaaaaggaacttcttacatggtggcggcaagagaaaaatgaggaagaagcaaaagcggaaacccctgataaactcgtcagatctcttaagacttattcgctatcacgagaatagcatgggaaagacaggcccccatgattcagtgatcttcccttgggtcccttccacaatatgtgggaattctgagagatacaaatcaggttgagatttgggtggggacacagccaaaccaaatcacactccctcagccggtgatcaggtcaacattttcagtattaagtcatgttgctggtttgtaaccttggtgtgatgtaataatgacattatctgctggtcttcttccccagaaccgaaaattccagtctaatcatgagaaaatcatcagacaaatccagattaagggatattttgcaaaatacctgagcaggattccttaaaacagtcaaggttttcaaaaacaaggaaagtctgagaaaactcgtggtataggggaacgtaagaaggcatgatgagtaaatgcaatgtggtatcctaaatgggatcctggaacaaggaaaggacactaggtcaaaactaaggaaatatgaatagaatatggacattagttttttaaaaatatcaatattggttgattgactgtgacaaatatatcatactaatgtaagatattaacaacagcagaaacagtttcccctgttgtagaaggtatagataggagtattctgtctattctctttgcaacttttctgtaaatctatttatagacatctaaaatagttgctgtagtagggcatggtggtgtgaacctatagtcccagctaatcatgaagctgaggtgggaagattaccgggggccaggagttcaaggctgcagtacatgaggatcacacctgtgaatagccactgcaccactccagcagcctgggcaagaccccttcttaaaaaaaggaaaaaagaaagaaaaggaaagaaagaaagaaaaaggaaaaatgaaataggtactgtaaaactgttctgaattggaagttttttttaaaaaaaaaaatcagattatggcgacataaatattagacatcccttagcaaattctctgatattttaaatcagatgcatgggacatactgtaaatttgtagatagctgaatgcaacacatatttaatacaatgattcttaactctggatagctttacacctttaagcatattagcatttttgtctgagtagctgaaatcacactgtaaaaaaagtcaactgtgttagggtctatttctagctgtgccactgcccagctgtggcatctgaaacaaattacttcatctcacattcggcagcctttctgcccacgccacaaatatagtgctgtgtgttcaggacacttaagaagtcatgtaacagtaataatttttttttattgctaatagctatgtaatcttatcaaggtctatttgaataaagggctctacaatccaaaatatagttgatttactatcaaataaatttaattttcagtattttacatggtattcaacattgtaatttaaacatttcgtttagaaacaagtagcatttctgtgggttagagactgatttggagagaccacatccacattcacttaccatgtgttcccaactaaattagctgaagatgcaaaaacccagtggacataaagtcagggctaagggagagaaagtgtgtattatctaggctttacctgggtaaggaaagggcttttctgtgatggcatgcaactgcctatgacattctttctacaagtagggtcttgatggaattaaagaccataactcgaacttgctatgctacaagccttttctatgggggactatattcccattccacataaacaacattagcaatcaggggtctgcagatattttcttgaatgaaatttgacatctctgaggaccgacaaggatactgctcatatggaatgtatattatttttattattattattattattgttattattaattttgagatggagtttcgctcttgtggctcaggctgaagtgcaatggcatggtcttggctcactgcaacctctgcctcccaggttcaagtaattctccttcctcagcctcccaactaactgggattacaggcgcccaccaccacgcctggctaatttttgtatttttagtagagatcgggtttcaccatgttggccaggctggtcccaaactcctgacctcaggtgatccacccacctcagcctcccaaagtgctgagattacaggcatgagccactgcacccagctggattgtatattctgttaagagtggggatcaataataggagacaataaacaagcaaataaataatattatttaagaaattgatatgaactatgaagaaaactaaagcagagtcacaggaaagaagatgctgggggatgaggtccccccattgaatctgatttaatacacttttatttgggtggtgcagataatgagttgagtctgaggaaaatgatcataaatccattttcctgatagctaaaaaaaaattagaactaataaaaactgtaattttttataaataaattcacactgtgtatgctttttttctctctgggttggttcactcaacattatatgcatatattgttgggtgttactgtagattgtccattttctttgctgtgtagagttttattgtatgaatataccaaatgtatttatccattatacaattgacagtcttttgtatagttctcggtttggtgctatgacaaagagtgttgctttcaacatcctaacacatgagtctgacacaaacacctatgggtggaattgctgagtcctagagtgtgcttatattcaatagagcaaagtattttctcaaagtagttgccctaatctacattcctattaagagtacaagagagatcttgttctccacatcctcaccaaaagttgattagtgatccttttattcatttatgtctttctagtgagtgttccatggtaacacctaataaacgatccttttattattaaattaaatttatataatttatttttattgaatttgatgtgcgtattatgcccagttataagtcctgatgcatgaaccacacttgacacgtgagcctctactcataggcccatgcaacctgcttttttttatttttaagttaatttgtaatttttaattgtaatgggttgaatagcagtccccaaaaagatatgtccatgtcctaattctcagaacctatgaatgacaccttatttggaaaaaggctccttgcagatataattaagtatcttgagaggaaaagatcatcctgaattacccaggtgtgtcctaaatccagtgacaagtgtccttgtaagagacatactaggaagatttgacacagacagaggaggaggaggcaatgtgaagatggaggcagaggttagagcaatgccaaggaatgcctggaaccaccagaggctgaaagaggcagggacctgaatctcccgtagcagcgtgacactgatgacactttaattgtggacttttgatctccaaaactttgagagtcaatgtctgttcttttaaaccaccaagtatgtggcaatttgttatggcagcctcaggaatctaatacattgaaagagacaatttatcacatcatctaaaactgcaccagtgtgctaaccagcagccaaatttaaaatgtagctggtccacactggatgtactgtaagtgcaaaatacacagtgaattttgaagtcttagtatgaaaaaagggatgcaaaatatatcatgaatacctttgcatgttattaataggttgaaatgataatatattggaaatattgagttaaatacatcttagtgttaaaattaatttcacccatgcctctttacctttttaaaaaatgtgactactggaacattttaaaatatatgtataactcacatattctattagatagtgctacctaaacaagagtgggaacatttagaggtctgtctataagaattacagcctaactgttgtcagtacatcataaattcattcttttagtctttgttcacccaatgaaagagtagacttttattgggcttctgttttcaagttctgttgcacagattggggtataaatatagagatcctgcattccatttgtgtaaactattggggtctatacagagaccccaatagcagaagagcatgtggatctgctacctgacaaacagaggcattttcctgcataaccctttcaaataggagacaatttcctggccgggcacggtggctcactcctgaagtcccagcgctttgggaggccaaggccagtggatcacctgtggtcaggagtttgagaccagcctgaccaacatgatgaaaccccatctctactaaatacaaaaaattagccaggtgtggtggcgcatgcctgtaattccagcttcttgagagactgaggcaggagaatcgcttgagcccaggaggcagaggttgcagtgagctgagattgcaccattgcactccaacctgggcaacaacagcaaagactccgtctcagaaaaaagaaaaaaaaagaagacaatttcctcagtaaagaaattgacgcttataaataataaaattatggatcagcttaccctagttattgcatgtggaggaatacattgtaaggtattattagttattgctacagtaaagctgcataacaaaacccatcaagcacaatagtttacaacaacatgcatttattttattgttcaggtacatatatgctggtgagttatgctgtgtgctggctgagtttggatccagatagccaggatccagttagccaaaaccagtcacatggtctaaccccaaatcagtgggcagagatgtacacaaccccctacttgaccccactgtggggttccagagggtgggactgaggatttgagaacaattatcacatccactacacaagaaaacatcattttcctcttctatctgactgtcatttcaatagcaggttcacattcattgattatctaagatgtgatcaaattatgcagtaagagaagcaggaagtcagagatgagtaactagctaggccctgtcttagaggattttatggtctaatagaggacacaggtccattatttgacctccttgtgcttcctcatccataaagcagatagcactactgcttgctttacatggttatcctgaagattcatatgaagggcaactcatcaagattataagattataaagatatagctgttgtctgtatctgtctatctagttgtccatctagttatttggtttggccttgatttttaaaaactagctgcagctatattgatatgtgctttggaaataaaacaacatggaggaaacacagcatgttaacgatgcctatatttgggttttggcataatgaagaatttgtttttctttttatatgtttcagtatttcctaaaatttctttcatgatcatctgtgaccaaaaaaaaaaaaaaaccaatatacattttaaaagataatttacccagcgaattggtttaactggggaattctagctccaaaatttgttttatttgctaaagactttgaccaaattgtgtagataattatgcaaacattaatgtttactttgttttcatagctaccaccttggaattttctagaaaatgttttatttttaatatacatttatggatttgatttctaataatttgcattatttttattttaatattacatatgtttaaactataaacaaggaagtcagacatgtttttcttgcctcagccttactgttatttagaattgtcaagtattaatgtttccctttcgttgacaaagatggggtgtgctgccacaggaaacccttgttatatggaggctcttccagctttatttaaattgtgaacatttgtacttaataacacgaacaatgagcagtctggatttttctttttcaagttgtcagtgcaagtaaaggcattttaaaatccgaatctgcttccaccagcagttttgataattaaagtacacaaaatgtatcaaacatttgagataggccaagtattccgttgaatttgttacagatcttgaagtggactcaatcactacttgctacttttcagagaacctttccaggtatactagctaggtatgaatatcagaaggctattaccactgtttgaccacaaaggtaaagaacatccaatagacaactaaattctagatctttctttatttgcggtatgggaaattttttaacatattctgaatcttttattttttgcaactttcactgtctcagattagactttaaaactcaagagctagaataattggtctagcaccatctctggtgtcttctatggatgcgttgcctacagtatattctgtcatcatctgtggttttctaaactgaattgcatttaatttcaatcaagcaattcatgctgtatttgaacttcaggcatatctttattttccagaaagcctgtttatcatatggccactcctgacttcctgaaactctaacagattaactgagaagaaaacaagtattatatttctaaggcattttcagctagtggaaaagataaatgactatatgagtcaataaaaaagtataattttcattgaaaggtagattggaagagcactatcaagacaaaaaaaaaagaatctgtttttaatgaaaatgaagagatctgttttctcaatcgtcatactaaaaaatgagtggtgtctgcacatatttttatttgggataataaaattgaacaagattattgctaagccagcatactaaggaaagaggacatataagccatatcaaatttaatgtaattgccccacactatcttctacaagaaacaaaaacaaaaaacaaacaaacaaaaacttggaaataagatttgtgaagtgcacattgtcttgatgacccatggaatttcaaccagctcttttaaaagaagtttacctataagatgccttagacacaccctccctttctgaatcctgtatgaatgcgtaagagaagaaaaaatgccacaaacagcatgggatgttggaaagaattggggaatgtgagaaatagaaaggaaagattaaaacaatcaaaaatcaaagaaatgtaaagtattacttgagaacatttctctgatgtttaatctaatattctatccaaagctttctgcactgctagaaatgttctgtatctgtgttgtctgtatagtagccattagccacatgtagctgtggagcattggaaatgtgacttttgtaactgaggaaatgaatttctagttttatttcattttaagtgtaaatagccacatgtggctagtggctgccttatgggaaagcacatgttcacagctctacctctcaaagtatgtttgggagtttattagaaatatagcatcttggctcccacccagacctactgactcagaatatgcattttaacaagatctccaggcaagtggtttgctcctgaaagttccagaggccctgccctagagcaatgttcacttgctaattaaccacccattcagaaacactgagaattctttattgttatcatgggtgagtgaatattagcagtgtgttcattttatccacagaggagtccttgatgcaatagggtgagtcataatagtgcttgaactgcttactttaaatcttttcccaaatgtgaacaaaacttaccctgctgattgatctgttgattttcccattcatgaaacaaacagagtccttacatggcaggtggaagggcattaaggtttactcagcatctctagttgcagctggatgtgtaccttatttctctgtagtaaaagaagtcttgacacctgaattaaaaaattatcattaaaaagtttaaaggaaggaaacattataagtgttcgaactagaaaatgatgttgacaatttattgcatttggcccctttccataggtcttaatttggaatcctgcaaaagctgactctgagaaaagcacttgtatacaggtggattatttgaaagtgatcccaggtaccatagtgagtggagtagggggagtgaagcagagaaaggagaaaggtcattaaagtgtacttggatgagtgggccactgatacgaacaactggggttcaacccctcttggggccatctgagaggctgggcatgtaagggaggaagacatcagcatgtgtgggaactgtgcacctaagctgcaggagtcaccttagatggtggacatggtgtaggacaccaacagggtcttgtacaccataataggaattgcttatgtaatgggatcctacccttcatgtggggcagaaaaatatcaatgtctgctggggaatgaaaaccaagatccagggcaacaccatgaatctggtaaaagtctgctagtggtcagtttgccttaggtaggttgttgctcttggccacagggtgtaaaggaggctttggacttagtgatcccagaggttattccctgctctcatgccagtattcttctgcagctttcctcatcaatgtttatatatttctttcttttttctgaaacttgctctttcactctgtctctcccctagggaacactaaaaatagcctgtaggttaaggaatctccaaaacacaggtgtgatttgtttgaaattctgtttgactcatgtgtgttgagttacttctaaattcaaggtattgtgactacttgaatgatattttttagaaacaaaataatgagaaaacttggtctgacaagggagatttttctgatctttgtatgcatttatttatgattatctgaagcgtgatgtaaaataacttatgtatatacatagcacagtgagttctggatggagagaagactaattatttatagaaaaagtctttttaatgtaaaaatattacattgaattagatttagttacatatgatcaaattgtcatttctaaataaaacaaaattctgaaggctgtccttgaaaatcaaagagatgtgtcacactagctgcggggggtgcaaaggtatgctcactaacattaagtaatttactgtccctttggaaggtaatatatattcccctaaacaggaaaagtaagtttgcaagggagcatggtttatgtacagtcacaggagtagggcttgtaaaagattctgtagatattgaggaggaggtatgtgtgagacagagcatgggatttaacatgtatagtaatgacctgcttggagatggaaggatttgagccaagttttgaaatgtgagggttttgtttagagactctttcaggaaaatgaagcaaacagagctgagcatcatcctggtagcctgactgaagagtacttggcaaattagagaagatatagttgcaaatggcagggaagaatgtgaatgctacgcatagtgcttttgggaaatagtccttgatggtgtctcttttacagttgaagagacagaatacacacacacacacacacacacacacacacacacacacacagagtcgcttcagctgtaaacacatatatatgtagttttaaatacatatatgtgtatacacacacacacacacacacacacacacatatatatatatatatatatttttttttttttttttttttttttttttttgagatggagtctcactctgtcgcccaggctggagtgcagtggcgcaatctcggctcaccacaagctccgcctcccaggttcacgccattcttctgcttcagcctcctgagtagctgggactacaggcgcccaccaccatgcccagctaattttttgtatttttagtggagacagggtttcaccatgatacacttatatattttttgtctctggtgtgtgtatatattatgtatacacacacatatataacatacgcacccacatttataacacacacatatatatgtatataacaaatcaaatttgatcttagcactaggactctgttgtaccaataattcagggttttttttttttagttctaggtaaaaacagtgtcattgatttactatcagtgaattcatgcaaattcatatatttgcattggtcgagtgccttgtactacaactacaatgttgaatagaacatgttctctcttttaggggagctcaagatacaggcaaacaaatgactacacttcagagccatgtcataataaaagtgcccatgaaatgatatacaatctaattctaatcagattctccaattgacttgctattttattcctgttctcaatggactcccatgtactttgtaaggagacagaatgtctgagcagagaatctttagagagaaaatcgtcaaataccatcttggataccaaatgtccatcttgtacttgtgaataataattcagtctagcaggatgtcctcttgcaaactgaaatgagcctacagtcccatctgtgggaaaacaagaggactcctaagtgttacacacaggatgttgctgatcttgggtcacctggctagcacagggcagctgtctgcagtcctttacctctggctggatttcctccttcaacttctaaaagtccaaggcttgaggacagttccctggtgaagatcaccagcatcttctgtgggccaactgaattgctgaggtgggaagtagtaaaagtcagagttagggtctagtttgtcctccctctctctcattttgtgtccagctttctttcccaactgccaaccttgatttacagttcagttaagtcccaaaagtagatgcaacagcaacaatcttcagtggacttcaacagttccctcagttttgtaagagtgaattgctctgaaaatccccgattctgtgtcactctaagtggctctgcctccctgatcatgtgtcagctgcattcaatcctagcaccagcccaaccttcaggccacctccaccatcactcactgggcgatgtgttctgtgcttgaatatcttcagaacatgcagatttgtcctaaacaggcctaggaaatgaatatacaattatacataaatttttattttatcgaaatttgttgtgagtaaaatggcagtcccttatctactgatggagtaccttctaaaagctttccttcttattctttatcaaattattcatttaatataaattacttatatatttttatgtattttatgtattttttcagagatgatcatttgggttttgaaaaattatattgtaataaaaaatcaaaatatttacatttatatgaggataattcctttgtccatgaatttatggacttatttaatggtagtctaattttcttaaagcactaaactctagaggcatgggttggctgaaacacacagatgactttgttgactctaacccaactatcctagagtaagattggttctactgggtgaaatgatccctcttctccaatgcttctgataccccatttcattgtctgcctacacagaggggagagggcaacagctgaggtttcttacagtcccaagagaaccatttttaaaactcagtctatataaaatatttcctggatgttttcaccaaagctcattaatgtaattttcacatcattattgcagctaatgatcatgtaagcgttcctgatcatgtggaaaattaaagatgttaaattaaaatattgacactgatgttagtaagtaatgattgtttataagatgtctggatttaaaagctttgtttacttaatttgttaaaaatggaagtttacttgtctttggtgtagaaaattaaacatgtgactctgaactttgtagagtgcttaacagcttttataatacttttataggggatttacatttgttatgggaatagtctttttactgactctgcttatattttcagaaatgtgtctttagccactagccgaggacagaccaataaacagcatccaaaaatgttaatgattatatatggttccagaatttacaatggtttgtgttatgattttttttaattttacagtggctggaaagtgaaacacattcaataaaaactgtatttcaaatacccatacaatgattctacttttcactttcagcacagtattcaataagttgcgagagatattcacatttcactataaaataggctttgtgttagataattctccccaactgtaggctaatgtaagtgttctgagcatgtttaaggtgggccagactaagatacgatgctcagaagattaggtataataaatgcattttgatttataatattttcaacttacaatgggtttatcggaacatagccccaacataagtagagaagcatttttattatagtgattttacatggaggcaatggcaggaaatggaaccagctgttcaaaagcatactttgtttgtaacttaaatgtttatacatccaatcttcttataaagtttgaatttttttaagataactatactagacttaatgttgtggtgggtttgtgactgtccttgattttagtcctcaaatatctatagcagcagcagtttgtatctgaaattattacaaggggatttgcctattagaaatatgcctaagttccattattcattaaggtcacagcagcaattctgattaatggagctgattcttgatagctgtgaggatacttccaatacatattataacttttacaacagagaaagcccttaatttccttacctgtaaaatctgagtaataattcctgccctatgaattgtaatgaaaatgagagaagctcccaaaatgatctagatgagacaatcaggtggagataagaccaagatgctaggaagtcagctagccactttctcacatctagcaaactgctcctacctactatccttgcaagaggcagaactcagatttgtcatttttaaatattcagtgaaccactgggcttattcaggattatttgaaactataaatacatatattttttaaaattcttggattcaaggggtacgtgtacaggtttgttacatggatgtgttgcatgatggtgacgtttaggtttctaataatcccatggcccagatagtgaacacagagcccaatagataatttgcctaccttaactccccaccctcttttggaatccccagtatttactgttgccatctttgtgttcatctttacccaatgtttagctcccactcataagagagaacacgtagtgtttagttttctgtgaaaccataaatattaaatgtaagagtaacaagagtctactgaatagctacagcagcattccttaatgttatctttttgaataaatacaattttgaaagcttcagccctgcacatcaggtcaatgcacttaagtagctaaacaagaatgtcataatttggtgcaagactgcacttcaggtattccaagtatatctgtgagagtagcagaaaggtccaaatcagaagagaaaatttgccatcttcattcagaatttcttaatcttactggaagtacataaaatctgtttttgttttaaataccctgatggaatagaccaatttggcagtctgaaaaagaactaaaaaagcccagctgtccaacaaagtcatgtctctaggaagagacacactgagggaaggatgtaactgagagaaataagacataggcctcagatttcctagttgggccaatgagaagagtgaacagcatcattatgtggagaaagtgaattatagaacctgatcgttatttgtgagctcattgatgtaatgaatttgcttacacagtttatatgtgacaaagttttgtatgtacccacttctccttgtccttaggcaataaattgccaagagtgtacagacttggccttcttgccgagaaaatttgtggaaactgccttttcagaaagaagcaaaaattagtacaaaacattgggactattttttttgttttgccttgtttaatttctttttttaagacagtcaaacccctgagggtgcacccttggaataacagaagtttaggataggaaagagtctctatggtcagcttgccctattgaaggagcacccaagaccatcagatggtctgcagagaaagtgtttatgatgtaatatcaatacatttgtgaaacctcatatgtcataatgctctcttgaagagtgacaattcatattatcatgttaaagactttaagtcctacattaaagaaaacactttaagtttaacccagtggttcccaaacttttttggccaaagatccctttaatccctaaaacctttgcatacttgtaaatgtttatttaatccaagcctgaatttgtctttagtaacttcctgcttaacatatggtccttagacgaacggcatcagcatcaccaagggcttattagaaatgccagttctcaggtccagtcttatatctatcaaatcagaatctgcattttaacaagattctcaggtaaaatgaatatgcatgctgaagtttgagaagcacaggctcagtattccttctgactcaccatcttcacttcgttgaagttaaagacctgctgaggaaatgtcttatgcacagcatttaagcaatattacaactacaggcaagttgtacctgcaaatagtatttgcacatgctgcctctctagtttctgtgatgctgggagatgtctttcagaggcctgagtgagtctttacaacctgctcaatttgttttgtgaattatgagtgatgaaattctagattacaaattgcagacaaagaagtctgtgccttttcccaggcatagcgtcagctggtgaagtttatagagccagatgtatttagtagaaatcagagcgtgactaacacttcaagaagaagatttgcagatgcacaaaaaagagcagagaagtccagaattgcagcttggctttcaaatatgattattggttttttctgacaggtgaaacatttataaggaatcaaaatgctactcattatgcaaaatgcctgcagaaatatctctatcagaagcaactaaaacgtatacagttgacccagacggagaacaagggccccttctcaggtattagaaatggtctatatattgataggggttacatgggtctatgcatctgtcaaactcagcaaattatttaaggtctgtatgtgatttcactgtctatgaattatacctcaataaaaacgtataacgtttatcttatgaaatttgagtgcagctgatattagatacagcaatgtgggctgtcaagaatactttaatggagatgtgcatttggaaataaatgcccttcacctggtatatggagatatttttatgggagggaatagccattgagtaggctgggttccagtgacttcatggtcatgccagtcagcgttaccagcaatccagatggcagagggggctgtagcatagactctgaattattgattctgggttcaaatctgagcctagttcccagtgacccagcacatgtgatttgacctttctgtgccttagtttccctatttataaatggcaatgataaaaatatttccttcacaggaacgtttggaagaccaaatgatttaatatttgtgaagaacttagtatagttctggcacagagcaaacactatatacatatttatcagataaacaaagtgactccaataagctagctgcaaccaccgcaactgtcatctacaacttaaccagttttatttttttacagcacttatccttctttaagatgatcttattttgaataatttatttgcatgtcattgtcagttgcccacccacctacttcataagccccaagacataagggactgatctgttttgttcttccctgtactcctagaacagtgcctgacacacaatagatcataacacactgaatgaatgaataaaggaatgatgtttaaagcaaaacaggttcttaaagaagtgagtcctatgatattaatgttccaccaaaatcatttccttaattactggttaaattgttatgtgcctatcctgtgtgctgagtggtacgtaaacagcttactggggatgaggtatctggattgatatgaccaaggaaatttcttgagtgagaaggagccaataattggaaaacccctgattacctaatgcttgtagcatgtcccaggatctgaagaattttttatatatcaatattttgaataaaattcgtatttgtcctcagagagacaaaaacttctgcttttaagaatactcagaagctaaactaagacattcattataccatctaattgtgctagattgacattttttccttcaggataataaatcaagtaagattaagcaatttatactatgactgggaggaaactcaaattaacaacagactagttctgccccttaaatttggcagatgctctatttccattaatctctgcacctggcttcaaatttcatgaggcagggtcctaatcacactcatctatgcatcgctcagagcttcctagagtgtcttgtatttaatacacacaataaatagatgagcaagctaaatgaattgaatttgaaagtgtaaatacatgcacaagagcttgagaccaaggatttaaagtaaggctttgtgttttaccaagactgccctctggaagaacagaggggtcacccacacaatctggaaattaggctcactccttccattttacaattccttattggccttggtaggcctacaggttattctcaaaaacctgacacacacacagaaacactcccacacccctcctcccccaccacacacagtgtagtgatggatttacttcaaggaccatgagttacgagataagccacacagagcagagcaagagtgtacaatactgaaaaatatgttgtggtgaagattcatgtttgagtcataggacgggaatccagatgtttatttttaggggtctcagataacatatctttacatttgaaaggcaacagggtatttgtttggttacactataagcatgtattattttgttgagactaaattacttttttttatttctatgatgcagcactcttttagtatggagaggctcatttggcaattccctcacctttttagtagaaatgaattttgatacaagaccaaatgagtgtctctttcttttcactaactcccatgacctgcattctgagttgttgttgttttttaacttgagatacatgagtcctctgtgctgcattctgtcatccccaatatcatttctacagaatgaattgagcaaagatggcctagcattcgtatttagcaagcaaatactatgtgtttagcaagtcttccaccaaaatacttagaaagatcatgttaacagtagagggtggtgactgcaagttgtccaggttcttggcgttttgcacaaagaattggacaaaacgtctagcagagcaaagaaagaatgaaggaacaaagaaggaaagcagggatttattgaaaacaaaagtacactccacagtgtgggaatggactcgagccacaagcagcagctcaggggcccaaatacagaatcttcttgggttcaaataccccctagaagtttcccattggccacttcgtgctcacctcatgtaactgaagcagtagcctgcaatcggtctgattggttgcagaaaacagccaaccagaggctgaagtgaagttacaaaggtcacactcccgtgcaaacatctgattggttgctttttgcaaccaatgacctgcattctgaggtgttttttttttttttttaacttaagatacatgaatcctctgggctgcgttctgtccttggctgctttttgcaaccaatcagaggctagggtgaagttacaaagttgccaaggaagactggacctgcaatcagtctgatttattgcagacagccaacttcccatctgccgcatagaaaaggtcaacttaggcgtggaaagttagggttttcctttcaatttagttccaggaaattggcatgaaacagtcttaggttccctgcctccaggccctattctcctgcctcaatcatgttatctatggcagtgcttctaaaactataaagtgcatccacatccctgtatgtgccagtgtggattcaccaggtctagggggcacctgagattctgtatctcaaactgggccctgggtgttgctatagaccacactctgagtagcaaagttctaaagggaaatatatttatcacccttccacaaacggattctatttaaaaaaagaaaaaagaaagaaaagaaaaaaatcatgttatcttccttaaaacatagtttcatattctttgcctctaaattaggtgactgtaaactccctaggcaatgaggagattcccagctatggtggtctaagtgcaaaacaattttttccacaccatcagcagcaatgtccacgctcattaaggctgtatttctggattttcctttgcaatgggcttccatgttagatcttcactacatccaatttcagaaaaaaaaaaaagttttgagaaaagttctccatgtgagagcacttctgtgctgtttttgaaacttccttctcatttttctggtatcttccagcaggcaatggggaaacctgcttaagctcacccctctttcactttgagctttatggtgacacttttctggcacatatgtcagcagagcccactttttagctgagttgaaaggaacatgggaagcactgcttcatttctgcctggaaaagccagggacacgatgaaatgtgattttgtttcctgaaacgtggaaggatggttggcgaaaaatgaaacatagcacagccatcgctcttcactaagggccaactccttgagaaatgtgctactttaactctcagtagtttctggacaaggcctaaaatcaatcataatcctaaaagaaaaaaaagttctatttcttttccagtggtatttcagagaataggaactctgttacaatttgatttgcactctgttcgcagaaaaccgaccacgcgcactggttttgcttattggtatgtttggatacacacgtgcgtgcacctgctcagaccacaaaattgaagctcagaatggaaaacagaggtttccattgaggtttcagctaaaataaatttaaatttaagcctttctttgccagtttgtgcttcaaaacttcagaaagtgaggagatgcaggtcaaagggcacagagcagcagatatgtaggatgagcaagtctagaaatctcatttacaacatgaggactgtagttagtaaaactgtatggtattggggttctttgttaaataagtaggttttagctgctcttgtcacagactcacaaagtaaccatgtgagatgatagatatgttaatttgctttaaagtagcaatgattttactgtctgtgtatctcataacatcgtgtcataaacctcaaatatatacaataaaatatatttaaaaatacatataggctgagtttttcaggacatagaaaagaaatatgaactggatgagaatgagaaactcacataaaatggaagaagattaccattattattattactttgagacagagtctcgttgtgtcacccaggctggagtgcagtgtcgtgatctcagctcactgcagcctcctgagctcaagggattctctgacctcagcctctcaagtaactgggattacaggcacctgctaccacatctgggtaatcttgtatttttggtagagatggggtttcaccatgttggacgggctggtctcgaactgctgacctcaggtgatctgcccgtctcagcctcccaaagtgctgagattacacgcatgagccactgtgcccagccagaaaaagattattatatcaagatggttttataataatgaagaatagaaatctggacatactcagatttgtagcatagactgatggacagtcctgtttgctctcccaagcagaaaatctaaaaggaaacctggcttctaagggtttggagattcaaaccttgaattctgattctctaattacaagtggacttcagtgagttaaaaatacagacatcagctggaacttgaatggagggtaggggctttgctgggagttgcctggtgagggaaatattttaaaaagactttgagtaaaactgttgtaagaccaacaggttcgtatgcccatttgcacagtaacaaatcatttgcagcagagaaagagtttaatcattgcaagtgcagatcagggagataagaggaaaccctcaaatccatctccctgaaggagttctgggctgggatttttaaagggattatgaagagtgaggggctggaaatttgggattcttgattggttggagtaaggaggataaaatcatcaggttttggaaaatgaattatttggtaagtcagcttctcttggagccctatagaccagctggcgtcagtagttttactggtatgcaggacctgaaagaatatcttaaaggaaaaactgaatgtttcataatgttcaagttgttatctgtacagcagttgagggaaactatatcttgtgtaacagggtctatgtgattctagaacaatacacaaacatctatgaggaagcaggtcagaggaagctgacctaataatttgtgctgaatgtgtggcaagtttggtttattttcttcccccacaaccttcttccctgattaattttataaagtttatagggatggtttcaaaacaaaggaaaacagatacaaccaggttgggtccaaatgattcaggacattctcagcaacaacagcccccatgacttgagtctctctaataaaaaaagaaaagaaaaaatctgaggacaactgtaagggtagtcagggttttcattttttttttttctgtgacagagtctcactctgttgcccaggctggaatccagtggtgcaatctcggctcactgcaacctctgtctcccgggttcaagcgattcacctgcctcagcctctcgagtagctgggactacaggtgtgtgccaccacactcagctaatttttgaatttttagtagagatgtggttttgccatgttggccaggctggtctccaactcctgacctcaggtgatccacccaccttggcctcccaaagtgttgggattataggcatgagccaccatgcccagccaactgtaagggtttttatagatgtgtttacataaaagaaaatagcacagggaaaaagtgtgcagtgtcaataaatgggacaggattattcactcctggtttgtattccccatcccaagagaacgacgatttcactgcaaaggcattttaagagccatgtagaggaattgtggccgattgaataggaagttctacctggttcaaatgagctcacatctctcggggaagctggtgactgtggacccaggtagtccaggtcatctttgagaaatgatggagaacgtagtgtcagaggtgaggggattctgtggcctccatctagcattctgcttggcatctcctacaaaaacttctcagaaatatgagaaatacaggggaaaatgtttgaatgctatcccatggcagttaatatggaatctgttgtggtttgtggattagttgtgtgattcaggtgccattggaggtttctggaagagaagggccttttaaaagcctctgagaggccagtattatccccagaaagaatgagaggaggtttattgtatgcacgcaagcaatatctatgaatccctttacttgcttgtatcttaccctcttctgccctaggaacaggctcgtgggagaagtgacccaactacaccttcctgccagtctcgagcattttaggtgttaaccaccaaagtggctgacacatgtacttactcacttggttttaatttgcagagtaggaacaatggacttagatttttttaaacttctctaactctttaatcactgaatgaaataactcatgttggaaagacaaagaatttcctggtagaccttttgaacaagagctcatagatttcagtgccattggtagccaatgtgataccatggcattgttgtctattgtgttttttaggttgtgacctatttgtgggttatgaattcaattttgtggattgggacctgcaatttaaaaaaaagatgaaggaaatagaacataatagagtcaagcgccatgcaatacaaaatgtcagaggtatcccaactaacaagggtgaatgatggtttgtaaaacttcagttacgtatgtatacgtgcatgtatgagtgttctgagtgataatataaaatgcattttttactgaggagcatgatcagaacaatatcaaaccattgaccaacatcaacatatttctattagaaagatatttaaatgaagtttgtatagtaaaaggaagaaagaacactaaaatatttgcaaatctaccctgcacagtcactttaatcttttcagcttctaattgagatagatgctctatattaccctgtttattaataaaccctcaaagatctaaaaaggtgaattaactctcaggggctttaacagataaattaacttgaacctgcctagttgtctgtttcagagccagaattcgaacatggattcattttagccgcagtaagcacctgtgttagtcagaattcagtgtgggtaacagaagggcaggccagattggagagagctggaaacatattccaggtagagacaatggtgcctgatgaagcctaagggtctgaatgctggagtaaagccaggggttatttacactgtgactgggtgtgaatctacagatagatctgaaactagaagataagcccatgaaggaaatgggaaaatgtgccctgattttgagttacattagcaaaaaaaatcaaagctgagtccaagatggaagaacatctacataattagagaggacagaagtgatcacgaagacctaggggacagggagaggcctcaggtaatgcaaaatctgtacataatgattgaggtcaggagaacagatgctcttcccgggtcagttttaaggctgaaatgtttcaggaaaactgggaacaaagcatggttggaaatagcaggctaagctgatgcatcaggagactgcagatctcagtgttaccttgcctgggaacaggatgggccccaagtatggctgagaatgcaagtctcatgggtatatgtttaatgaacctagttgggagatgttaggaggaagactggttctgatgtgaaagtttccttccaaagaataggccaacctaactgcagcagtgctgattatgatggaaatttcctattttgattcttcatcaaaagaaagaagagccggtaccatggttcttgcctgtaatcccagcactttgggaggccaaggtgggaggatcacttgaggccaggagtttgataccagcccctataggaaacataacaagaccccatctctactaaaaattaaaaaattagcctggcatggtggctatgtgtctttagtcctagctactcaggaggctgaggcaggaggctctcttgagcccagaagtaggagacagcagtgagctatgatcacaccacttgcgctctagcctgggtgacagagcaagaccatgtctcaaaaaaaagaagaaaaaggagaaattaaaaagtttttccttatggtttatctttagtagtttgacgtattaaagaggtttatattttattattatatatgcattaatatataatcagatattaattaaatatgtattagtatattatacattaacaaacttacattgtcatcttcttcaactaattctaagcctcaaacgaagtgtaaaagaaaactgaagcatcaaaaaattagtcagcttcaggcactatcccaaatgttgaagttttccatgtaaataaataaaacctctaaaattaacaagaggctattttcactgttgcctgttggacacaagccttaattatgacagtgatctgaatagccaagttacactgtaaggctgtttccctgaatggaaacaccaaccttttttgcttttttgaaaaagaagcagaaacagaagcagaaggagagggagagggaaaagaattctttcggacaaaatgtatcaaatgtttgacttcactccagaggcaatttttaaataccaaaaattgtttcacatctattcccaataaggtttgccaccaaaggagtttgctctaaatttgtgactggatgtttggttttcagaggtttcaggatttcagaatcatggtaagggattatagacatgtatttggtatgtgcaatattgggggacttgaatattaagtctgattgggaacatctctgggtttctgtatgtgtacacattctacacaatagtgtaaagttttctagaaaatttagtgtcagcaaaaattacgctggggtctgagtttttatgtgagaatcttataaagatcaaaatattagctaaaatttaaaatttgagttgaaagggcttgaatgctgtattagtctgcttgggctgccataataaaatgctgtagattaggtggcttaaacaacaaacatttcagtttggaaggctgggaagtccactatctgggtgctggcaaggtaggtttcagaacattccttcttttggcttgtcggcaaccaccatgtcactgtgtgctcagatgacctcttctttgtatgtggtggtgggggtgggagctgggaggtctctctaatatctctgttgtgggatttttccttagttcagctgaagacaggggtccttatcacatggccacgaaaaatctggcttgcagacaatctgaagcgtgaggagggccgggtttattgggtgaaagagggaaacagggacgctccgcaaggccagaatccctgctacagcgcttcctgcctgaagattgaatcccaggttccacccaggaataggaggggccaggcttcccccgctgcaaacagcaccaactcccgtggctccatgccagtgcgcaatcctcccagtgtgcaggctggttggagtttttccaaggacctcttcccacctggctgtctcatctcattttgtaaggacataaatccaatcctatcctatcctattctatccgagccccacccttatgaccttatttaaccttaattacttctttctagaccctatctccaactactactgctttaacatgtgaatctgggagtgggggagaaaattctatccttagcagatgctaaaactcaggacttgaaactgctttaccaaatgattatgtgctgtggtctgaagcagtattattttttaacccagtgtttttcattcccatgtttttttcttttctaagaaattattttcttcaggatcaaagcgacagaaacttagaagtggcatttgaagttgccaacattaaacctttgatcagtccggcctagtcaccagccaaacaaggaggagagagattgttgctcatccatctaaattcacagctcaaaggtgcagaaatccagctggagtagaaaacatttcctgtactgagttaaatttaactgaactccatgcctggatgatttctgccagtggcgcccgtgggattgtgtgaccccctctggctttgctatctgcaggtttcttgatcacacgtggtatccatttatcagtcctggctggagccagtttcccagagcaaacagattcaggatgatccgcactatcagcagaggttcaccaaagttctaattagaccaggaaggtttattaatacaattagctttagggaggacagttacaacaggaagcaaattccttgcagcatccggtcctctcttagccatgttagttgattaagaggaaagcctcagacttcaaaatcaagagcaaaattgaaaatgtctgggaatttaactttccagtaactgtaaagttttaaccgtgaactttctattaactgtaaagtataatttaactttctaataactgtagaacaagaaaggattctagaaaaatcttgggaaaaattattaatgaggggcctgagggcttaagtttggggagagtgggcttcttttgatttgcaatgtggaagctgcttttgctcatgctttctgaagatcttccataaagaggggaactgcgaattgcaaagtaaagcccctgctgtggagtgaatttgcttatgtcacactctatctgagtgacccttaggaagttccctaatctcccatgcctgttttctgggttgtaaatgcaagtaataaaagtaactgcctcataggtttgttgcaagtattaaataagaaaatttataacggacataaaagggagttggcatagagttaatgttcagtaaatgacgagtgtatccttctcctcttcctcctcctcctcctcatcctcctcctcctcctcctcatggacaattggtttcatccatctgataatgaaacactgtgaattgcccccaggagtgctttaaatgatgtctacttgtacatagatgctcaaaatttttgaattctatcagtatgacatctagaagagtcatgggtagcaccaagggataagctctttctctggaagaatagtacatttctttctattaaaaaaacatgaattagtcaacccattatgtgtttgttttttgcccttattaccagaaaactacaagatgattttcaatcacagtgaggattagtttctgtgactaacatgtttctttctttctcattcttatgagtttgatttcccattcttaagcaaaaaagcacaataggtgtgattgtgtgtaccatttttttgaatgaggcaggaagatagttgacagttggttaattcatgtattcattctagttagttttgtgtctgcacttccttctggaatttaaacatttttgaaaatacggtctctgttctattttttatttttcattcctataaagttttattgaatgcctatatgtgtccaacataccagatcctaaggtttcacataagtcagattggtctctgtccttaatggtgttatcatatagcagaggacaaaatcataaaataataataatatatgaaagatatgtaagcatgtaaggtcaagagggtggaaatttcttctgtcttattcactgctttattgctactcctaagggagtgcctaaaacagattagatgtccaattagtatttattctatcaattactgtcccaggcattttacacatattagaaatatgagaactaatgtttattgagcaattcatatctgtataccaaacattctactggtatttcaacaccgtgaactagaaacaattactaaggttatgaaataggagttaacactgaagtctagagaggttatgcaatttgcttatggtcacacagctaataagagctagatagaggtctcctctagagctcatgagcttaaccagtacctccatccatgacactgtcttaccctaatactggaggagttgaggaataggcttccccacatcgtggataataaagctaaaattttctaaggcagggcctggttaatggagggcacatgcaagctgacactctcaggactccaaagtgtacacacttttcactataccacacagcctctcatgcacgtagacaatcacacacatacaaacattctaacaaaagtttgtaggaattgtgctgggaccatgctgtatagctgtagtccatggtgtataacatgcctgcagtagaatatctattgaaatgaatagagctacaaggttaatccattggagaaggaatttggtgtgatacttacaagctccccagtggcatgaatgtgtcactcttcacaacactgcctagttcttgtgtagatacactataagcattaagacaatttatccttactgtacaagactatggagtgtagatgtggtagacctaattctgagatggccttcagaatcccatccgttggtgtccatgccctgcccattaagtgtgggcaaaacctaaggtttgcttctacccggtagaatatgacaaaggtgaagggattttgcagctataattaaagtgtcatgtcagttgattttgagtaaatcaaaagggagattatcctgggtgagcctgacttaattaggtgaaagcccttaaaaaaggaactgggcccttctggaggcaatagactgttcttgaagacttgctgaagttagtggctcttttggagaagcctacatatcaaggaaatatgacagcctccggaactgcaagcagcctctggtatccaaggccccaacaaaaagccagagccctcagtcacagagctcaagaaattgaattctaccgtcaacctgaatgagcttggaagtggattattccccaatcaagcctccagactttaacccaatctggctgatcccttagttacagtcttatgagacattgacaggagagtgggtttagacgttaatatcccatttccgttaccagatatactgcaaagacagagatcattttttcaaggaagttgtgactaagcaccatttgaaatatcactattgtggttttgactgaccccagatgaaaagatgaactctcctaagatttcaggcatctttaaggatagattgtaatgatgccaggtgattcctagatgagatacactaaaattcctctccacacaaggaaaataacagtgtgttctctacttctcttggaagttccatcattaaggatattgaatatgaccaggcacagtggctcacgcctgtaatcccagcactttgggaggctgaggcaggtggatcagttgaggccaggagttcgagaccagcctggccatgacgaaacctgtctctactaaaaacacaaaaaagttagccaggcatggttaattagccctgctacttgagaggctgaggcacaagaatcaagaatcactttaacctggaaggcagaggttgcactgagatcgcgccaccgaactccagtctgggtgacagagtgagaccctgtcaaaaaaaaaaaaaaaaagaatattgaacatatgtttacataaattaattattttgagcaatgactatttctgcttcagaaaatctggacttcttaagttgtgttcaagaaaaaaaaaacaagacaacaaacacttcaggtttatccttttatgttgtgactatgtgggaagagattgttaatttaaaaaatctgttaacaccaaactctcttttttctcttttcctcttttttttctctcttctctgtctctcctcattttataggttttggtgtctatttattttttctccatgtattgccaccctttgctctaggcttacatacttttaactacaaatccaggaaggatccctgattccacctgttccagtgaaaaccctgatgtagctttcattagaccaacatagaatatgtgccaacacttgacctagccaccgtagccatggaattttatttatttatttatttattattttctgaaacagagtctcactctgttgcccaggctggagtgcaggggtacgatctttgctcactgcaacctccacctcccggtttcaagtgattctcctgcttcagcctcccaagtagctgagatcacaggcgtgtgccaccacacccagctaatttttgtatttttagtagagatgagctttcaccatattggccaggctggtctcaaactcctaacctcaagtgatccacccaccttggcctcctaaagtgccgggattacaggcatgagccaccgagcctggtccgtaaccatggattttaatgatctgttcagccaggcctggaatgcacgccttcccctgtagccaggagtaaaataagcctatcagaaccatgcaggctggagttacattttcaaagaggaaaatggataaaaacgttccattactgagacaacctcagatattttcctcagagtggaaatcaggaaaccaacttagagtcatctcaagattagagggaatttgggctagaaggagaatattctaaagctactatttactaaaatattacctaatagtacaggaatagacaactgtatcaatggagtagaagagattagaaagtgttcaaacaagcataactcatttagaatggatgcatgaaatgctatttcattgtagcactattgttttagaaatggttttattaaactatacacaaatatatgaacacaaatccattacagtactgagtagtggaatcactatttctcaaataactagtcatccagtacagtagactgacatcttactgtttttaccatctatttgttctctctggtatggtgtttatttctaccattatttgtacttatatgaacatttttgggctgagatggctatcaaaaatgtgcaccagagtggcaaagaaaaattccctattcaatataaaaataccacttttactggggctctgggaaccttcaagacagtgagcaaggaagtattaggtaaaattaccaattatgtagctaattagatatgaggggaaatccttgaaaacttagtaggccacatacatatcactgcagcctctaaagattgacaagtagagggaaataaattgccaataaatgatactgagaatatatgtccaaacagactatgccattataaggtaatcactccctgaaacataaaaaaagtctattttatgaattttatatacttatagtttattttattatttgtagaacttttaaaatttatatcttcatatatgaatttcatttttattttgtgtgttctatcttatatatttgtagataatttcataaatgtttatttttgctagttaagcatctgatataaatgacatttccaattaatagtgaaatggtgtttccaggaaagatattggaacaatgaatatccgtatataaaagtaattttggcaacctacttcacaccatataagcaaataatttccatattatatacatacctaaatattgagggaaaaccaaaattgctagaatatacataatatactttttataactgtagagtgggagaaaacatttttagacatagcgcaaaacccagaagcaaagtaaaacactggtaggttatctgcttaacactgttaaacttctaatgggcaaaagacaaagcagacaaaggtaaagacaagttacaggctgggagaaaacagttacaagatatatcagaaaaagggaaacatataccatctctaacatactcttacatggctcttacaacccaataagaaagtgaagttctcaggtatctgtgaatgcaagccacagttgtctcttagccacaatgtctagggtgcgtcaggattcagacgactgcagttcctggccaagtaccccctagctttgctgaatgacatgcctctttatggcttatggacagcaaccattgggttcaggtctttgccccatttcctgacccaaggggccacaaaatcctttgtcctcaccccaggccacaagaagagcatctcctcagaaagtggccactggttatttcacctggccccaagacgatgcaaggcacccactctgctttttttgtgatgagatggagcatgactggccttgcacatgaccttcagtcactgcctctttgctctttggttgttgactttgtcggcagggaattcagagggaaggagagtcagcgacgtgctctcgtaaggtcatcttagaagaccactctctccaattattttaagcagctctttagagctttctacattgtgaagttctttatcctacctgtgtatccctagggctttacagagtggagattcagtaaatattttgacaagagtgagcaaatgatttaacagtcgatggagtgcaaattgccaacaacttactgtagcgtttccatccacagcattcagggtcagtggctaaaatacttgtcgtaaaggtgccaagcctccaggcatctagcagggcattagcacaccgaagcatttattagactcaggaatatactctttattggctcatttcaaacaatacctaaaaaagaaacctctttttttaaagccttcaaaagatggcaggatgtattttttcctaagacccataaaacaggtaacataaactgttactatttcataagaaaaacttaggtacagaaatactcaaacacttatccaagggagctggaatttgtgtcaaattttcttgaggaattacatggctcgtactatttagaccatgttctaaacaagcatttatcgctctttgaagttgtgtcgtatttagaaatttagattcatagtaattagatatttagatagattatactggaatatttgggtggcatatggacagcaggtctgtaaataaaatttaaatcttcattactatattttctacattctgccttatgcttgatttaagcttttttcccttcttttcactggttagatttttttttcatttattttttcttctaggtcgttgacctttttataggcatagaaaatgccttgtaccgtgcaccaaagttcttaaaattttaaaagctttctttgactaagtcatcccttgccctcttttgaagctattctgacctctattttctattttattttaattaatcatatcttaggatttgtaggcttatatgtggatgcatgtatattatcttgttaagggtacataaggcagttatacaaaagattatgttggcttcaaagaatgttaaacaaaaggaatgagaagattcctgaataatatagttatgcatactcagagcttctttcataagggcatttgaaatgtatgctgatcacctcaaggtcgccatgaaatgggaagatttaaactagtggtgtttggacagaaacaacttttaccttgaaagccagcaatcaatgactgaaaaatgtatatctaaggctggaaaatcatttcagtattattaagtattctgatgacaaaaaaggttcaaacatttgtgactcccatagctagtattgatatgggtgatgggaaataaggatgtatttattttatttggactttagtcatgtttttattgtctgtaaaaatgacttgactgttacagctagaacattgaagaaagaagggaagcaggtcaaatgggtccccagtgattccctgtggcacctggactttctccaggaattgattgttacatattattccatcaaacaccttttaaccagtccagttcttgtctatggatccagacaattcagtcttcccagggcttacccatgtttccatatatccagaaagtttgtatattatggctagaaaagcaattaaaccactttggaagggttgggggaagggagggttagggagagacttgttaaaggatacaaaattatagctagataggaggaataaattctagtattgtatagctttgcaggaagactaaagttaacaatcatatggtatatagtatcagatagctagaaggaggatatttaatgttccccacacaaagaaatgataaatgtttttgattttatatatatatatatatgataattaccgtgatctgatcactatatgttatatggatcgaaacatcactatgtactccatgaatatatacaattattatgtgtcaatttaagaaattaaattaaaaagagaaattaacccagcctcaccattttacagcagagggacttgaggtggaaaaaattcaagaaactttactctcgtcattcaacggagtgatcttttgaaaaaggtagcattacaagaaatccagtatatacccacaaatacgtggccacatttcttgacaatgttccaattattattgatatctacaattagaattaaatcgttgtttctaaccagtaatattccaagtaaagtagtaacattgtttattcattggcattaggcatctatggttagctctacagaattatagttgaaatctatgtgaaaatatcaatttttacacttaccgaccataataggatacttacagaagagcttgataccagactgtcagccaaagattttctgaatttggtatgaattttctaaaggtggagtgatttgcttcaagagaaaattgctttgagtgcattttgcagtcaagaactttgacaccttgcaatttactagttgcaaagataatctgatcacaaagtaagaaatctgatcgttgtaattccaatttatatcaataagaaataataaataatctttattttggaggtttgctaagtgactgaaagtttatctaaatacagacggttttgcatgaacgctagggactgaatgaaacactgtttgcctaccaattaaccaggcaggtgtgaaacataagcagtgaccgaccataacagacgatctctcagatattgatcactcttttaacagaaaaattcctatgggcagatagaggagggggagagggcagcattctcttgagattgtcttagggaaggatgatcatgaaactctttatatctgaaaaaaattttaaatccttttaaatatcaatccaggaggattagctaagcagcaataaagcaccttataactgttacatagttaattcaaagaagcattgtatcaagataaataaatatagaaaacaaggaatccattttcaagaaacatactttgttctagttctgacttcagatttaaaacacacacacatacgcagaagacacactgaatatgattgaatctagaatatagaaataaaataattgaatatattccatttgttaatgtgtgcatgtgttttcaagacatggctcaatgattctgtagttttttccttatttttattttgagaattttctagaaaaaatatgtcttaaatacttaatttttacttcttggttatcttagtccatttgtactgctacagcagaatacatgagatgataatttctaaagaacaggaatttattttctcacagttctgaatactgagatgttcaaggggccggcaggtttcgttgtctgtgagggtggctctctgcttccaagatggttcctctagaggagggaacactttgtcctggcatggtgggatgtgggctcaaaccctgtatgaagcctcttttataaaggccttaatctcatctttgagagaggagccctcataacctaatcagctcttaaaggttctacctcttaatactatcacaatggccattaagtttcagcatctgaattttagaggggacatactgaggcaataacaaacattatgtttttgagaaggtcccattttttcttaatttaaagctcagtccaatgaatatctgtaacaaagggttagtgaaatcccagtccaaaattatcatcttttgaaggtaattcagatggacatttcttgagttatcaaaatgtataatattatctattcaaatcttttctgttttattaattaaactcaggagattaaagtaccttgccatgacattgaaactagtaaaacagccaaatatgaaaaccaagcatgctgggaaaatcctaataatgatggaatggctaccaagtctttgttattcccttggatagtagcacaccttggaaagacttagcaaagcccagatttcaggaaagtagaaaaattgcatttaatgctttgattataaaattatcttgtgagtttcttgtttttttttttgtttttttttttgagatggagtctcgtcctgttgcccaggctggagtgcagtggcacgatctcagctcactgcaatatctgcatcctgggttcaagcgattctcctgcctcaccttctcgagtagctgggaccacaggtgtgcgtcaccacacccagctaatatttttgtatttttagtagagatggggtttcaccatattggtcagactggtcttgaactcctgacctcgtgatctgcccgccttggcctcctgaagtgctgggattacaggcgtgagccacagcacctggccatctcgtgagttttaatgcaactggcagttgactgtgggtcctaaccatgggctctgtttttctcaaatgtaaaattattggccgatgtggaagaccatccatcctgtagggtgaggccctgctttttataaggtaatggaagagtatgctattcaatatcaagttaaaaataacttttaccagtgtggaaaagaaatgagcagggaaacctattgaccattaggcttagttttctgtttggtgccccaacttcactccatctgctatcttttggatctccagggttttctttcctactccttaccccagaaagctgcattattctggctccctgagcaactgacttcagtctgagtttcaccagtgggaggtgctgtcacgctattggagggcagaagaagagcagcatgaaatggttatttggttattccctattcccttctgcttctgcatcacatttctggcaatggctgaatatctccctaactacagctcccaacaggcaacctctctttcatggttccagctcttaccagttacaataattctatttctatcacaaccccttcttccacccctaccccaattcttccagtccaggggtcacaatagcaccccacagtggctatttcctgggtttaccaacttcttttgttggttcttccagcctgcttacacctccgacttttttcctcattaaagtctcttcacttaatttatctgatttgaatttgtctctttactgagatcttgaccaatacctgattttttttttgtactttaagttctagggtacatgtgcacaatgtgcaggtttgttacatatgtatacatgtgccatgttggtgtgctgcacccattaactcgtcatttacattaggtatatcccctaatgctatccctcccacctccccccaccacatgacaggccgcggtgtgtgatgttccccaccctgtctccaagttttctcattgttcaattcccacctatgagtgagaacatgcagtgtttggttttttgtccttgcgatagtttgctgacaatgatggtttctagaaaccatagcttcatccatgtccctacaaaggacatgaactcatccttttttatggctgcatagtattccatggtgtatatgtgccacattttcttaatccagtctatcattgttggacatttgggttggttccaagtctttgcaattgtgaatagtgccgcaataaacatacgtgtgcatgtgtctttatagcagcatgatttatagtcctttgggtatatacccagtaatgggatgcctgggtcaaatggtatttctagttctagatccttgaggaatagccacactgtcttccacaatggttgaactagtttacagtcccaccaacaatgtaaaagtgttcctgtttctccacatcctctccagtacctgttgtttcctgactttttaatgatcaccattctaactagtgtgagatggtatctcattgtggttttgatttgcatttctctgatggccagtgatgatgagcattttttcatgtgtctgttggctgcataaatgtcttcttttgagaagtgtctgtttatatcctttgcctactttttgatgaggtttttttttttcttgtaaatttgtttgagttctttgtagattctggatattagccctttgtcagataagtagattgcaaaaattttctcccattctgtaggttgtctgttcactctgatgatagtttctgttgctgtgcagaagttctttagtttaattagatcccatttgtcaattttggcttttgttgccattgcttttggtgttttagacatgaagtccttgcccatgcctatgtcctaaatggtattgcctaggttttcttctagggtttttatggttttaggtctgacatttaagtctttgatccatcttgaattgatttttgtataagttgtaaggaagggatccagtttcagctgtctacatatggctagcaggttttcccagcaccgtttattaaatagggaatcttttccccatttcttgtttttgtcaggtttgtcaaagatcagatggttgtaaatgtgtggtattatttctgagggctctgttctgttccattggtctatatctctgttttggtaccagtaccatgctgttttggttactgtagccttgtagtatagtttgaagtcaggtagcatgatgcctccagctttgttcttttgacttaggattgacttggcaatgcgggctcttttttggttccatatgaactttaaagtagttttttccaattctgtgaagaaagtcattggtagctttatggggatggcattgaatctataaattaccttgagcagtatggccattttcatggtattgattcttcctatccatgagcatggaatgttcttccatttgtttgtgtcctcttttatttcgttgagcagtggtttctagttctccttgaagaggtccttcacatcccttgtaagttggattcctaggtattttattctctttgaagcaattgtgaatgggagttcactcatgatttggctctctgtttgtctgttattggtgtataagaatgcttgtgatttttgcacgttgattttgtatcctgagactttgctgaagttgcttaccgaaaaaagtccaggaccagacggattcacagccgaattctaccagaggtacaaggaggagctggtcccattccttctgaaattattccaatcaacagaaaaagagggaatcctccctaactcattttatgaggccagcatcatcctgataccaaagcctggcagagacacagcaaaaaaaagagaattttagaccactatccctgatgaacatcgatgcaaaaatcctcaataaaatgctggcaaaccgaatccagcagcacatcaaaaagcttatacaccatgatcaagtgggcttcatccctgggatgcaaggctggttcaacatatgcaaatcaataaacgtaatccagcatataaacagaaccaaagacaaaaaccacatgactatctcaatagatgcagaaaagccctttgacacaattcaacaaccctttgttttaaaaactctcaataaattaggtattgatgggatgtatctcaaaataataagagctatttatgacaaacccacagccaatatcatactgaatgggcaaaaactgaaagcattccctttgaaaactggcacaagacagggatgccctctctcaccactcctattcaacatagtgttggaagttctggccagggctatcaggcaggagaaagaaataaagggtattcaattaggaaaagagggagtcaaatcgtccctgtttgcagatgacaattgtatatttcgaaaacccaatcgtctcagaccaatacctgatttttaagcctaaggttaggaacacataggaaaaatcaaggtgagtattaaaaattagtagaaggagaccgtttagtgtactactcagattagtagctctttgtacagtcatcctcaataaatgggtgcttctgatgacttacttttttttctttctttctgataaattgttcttattaaggaattctattaagtcatcatggaagatgttatcttctaattttacttgatgcacaatttggaaatataattagtttactgaataatatcatcaaggttcaaagaggactcggtgatctggaattctagatacgtagaatagaaattctgaaattgcatgcaaatcttaagtatgtgtgtataaatatacatatactgagtgatttgctttgcaacatggtgatttggctgtttagaaatattaatgatatttgaacatcattaaatgaagtcaaaggccagctataccctgcaacagtcagaccacatatggtgacatgctgccacttaggggcactatgataaacaggtaaacaaccaagagagctgtgtggcaactagtttcaagctcagggttttaagagctagatttaggggcctgggttttactcacatcttcctccggtgctagctgtgaaatttggacaagcagcatatcttttgctcatctctgaaatgggagacctaagaccatgggaatactcattaagtgaatgtacatgaagtgatgcctgacacattccaaaaactctccagacaatacctagaatactactaataattaccagtgtgtaattggtctggaaaccacatgttgtgagtaacagtctagggaactgggaacaattcagtttatggacaaacatactgagggatagagtaggccgctttcaaaatgtgaaagattgtccaagaggagagaaaattgttctaggaaggcaggagactctcagtgaaaggtacagaggaatataatttggtccagtagcagaaatacctttctaactcctagagctgtccaacaaggaaataggctgataagcaatgtccttttgagccattagtcaacaaaggctggataatcactatgcggaatatgattttagcaggaactcctgcaataagggctgaagtgggggagggcaaggacaggggaaaaggtcacaacatgacccttaatttccctttgcactctacaatttcagactctatgtgtgtgttggacagaatatcaggaaaatggctgccacctttgtttgcattcatgttgtcctctttcaaatcaggcccttggcaaaggtcctgagacacattgtccaaacttgctattgacaatcctacatatattttcctgttcagatgctttggcctgccagaggctcactgggtgtcatacaatagtcttctgtgtcaccagccttgcagatttcttcaagaaactgtttgttgagtaggcgcttactagctggaacaaatccctttgcaaaggtgtaccttccttttcttgaacagaatgaaaaatgtgttgagcaggaaaagaaacttcacagtatttgtgtttttcttttggccctttctgctaggtatcctcactctaattgagcaggctctggaaacctgaaacgcacatcagtcttgtgcctttttctgtttcttccactagcagttgataattatagcttttcgtagatactcagcacattccatgtttttgatgggagcagagcctttgtatggcaaaattgctgatatacttttaactaaatctgtagatgtgttatgtttagaaggcagcggaagaagcctgagctggcagaataattgctgtgttagggcgccactgaagacaaatagtgtgcccaagattgtgaaaatcctttcttataaaaactttttccaacaccagggttccttttgggacagaaataacaatatctgttctttctgagaaaacttggagagaatgtcaatgtgatatctcagggataattcatttttgaaaaaggagaatcctttctactgaatactttttataagggacatttttagctttggaactgcatttctcttccctgtctggatgttagctgtttgtatgagtggtgaggacaaaaagtaaaggattgcatcccacaaaaaccaacctcaatagtttaaggtcacacagatggctttgaggtaagaaaggaaattacatctcctgaaaggcaatgcacaggctattgaataggatgaacttggaggtctcttctagtcctgagattttatgattccatgatcacagaaactactagtgaatgtgatacttcatatctcatccattggctatttcaaatggcaactaaagtgagaagggaaatcatttattcttaaatgcaaattcaaactaacagaaattggatatatttcttggtgttcatgagcattgccagtagtaaaatatatgtttagagataagaaaataaaaacaacttatacttattgaatgcttatgacataccaggtcctatatcaagcattttatatgcatcatagattctattattgtcaacatcttatggaggaggtaactgaggattgtagatattctgaagcagtgtcgtgaagctgacactaaacactcttggctaccatagcatcctgcttctctgtagcagacgctggtgattcatcacaccacatttctttggcactctggatttcagcacaagtgctgtagacagttaattgcctatcgctagtgtcccgcttccttcaagtgcatgtgggaaagaaggagagggaagagaatctgaaagaccgttcagcaggcaggtgcaactcagaattaagagagaataatatactctacctaaggacagccctcaaccagtggaatgatggggatggtttccgggtaaactccgaccctcattgtcccgaaggagaacacttccggggcacatactacaatcgtttcttagagtgtccctaacaggggtgagccccccactcaatacacagtggtaagaaactcattcctgcgttcttctaatacatcttccttccctatctcattgtctatgctcctcatttctgcatcctaggatcagctcccaaataaacttcctgccctcaagtccttgaccaaagtgctgttttggggaggagtcaaagtaagattttttaaagaacacacacgttactgctatgtagttacaggcataatcttactaatggactataatgtccatcataccatggggttgatggtcataaaacctaggcgtatttgggaatatttctgtgacattaaatctctaactatataatagaagctaatggtagtatattgaaatttgttctttggaattcaattattcaataaaataagagaaatctctaccacacattagcatgaccccgttgaagtcttcagaaagcctaatgatttagcatgactatttcaagatcatttttcctaggcttcctcccatcctactcctggaagtgctctgctattaatttcctttgtggtcttagataagtctcagactgcaggtgaaatgattaaattctcatttctcttgaaaaatttcacacgaagtctcttttcatctatttcaatacctgatatttaatttgaatggagtataacaactacattgatatagggaaagttttattgaatgaacaaagccatcacataaatttttctttcatttttttttttgtcagtctctgaaattagtgaataggtagagacatccatcagttggatcattcttaggtaacattttgtttataagaacagggcagtgctggaatgtggatttacccacaattctcacgtgagatttctaccattgtactgctgttttcttcttgtctctgatttttttcaatctctgctcctcaaacatccaggtagctttgatcagtgcttcaagcagagtactggagtaagtaatatatttttctataaccttgtaatgaaagcatgatctcttcttaaggactctgtacttagcgaggcatctatcggtgattgtatactttgtagattttatttgggtggttctaccatcctccatttattacatatgacaaactcagtaagattaggctaagaagaactggttcctagaagctaatgttaccctggacagttaacaaaatttttgtgaaagtactgtagagttagaaaacacaccaaatagtacaattctccacactggatttcttcaatttactgttaagttgtaaaaagtaggcttgtacctgatgaaaacatttggcaaatttgtatgcagtaccagtgaaaaatatgcacaaattggcaaaataaggcaagattctaactgctgtccatgttcaagaactataacagtagtggggtgaatgctaaatctttacaataatatatagattgtacatttgtttttcatggattataagacatttttcatttttcagccacacggtattgattcatcacttccatattcagctatgcctatatatgtccatgtcacaaagttattttcccattaaaaatttactctgtccttgcaataagaaacacaaaagagttagttcaaaggaaaaaataacaatttgcatttggataaaaatggtaaatagatttatttttgactcatcctgtgaatccttttcagattgccttctttattttttattttttgagacagagtctcactctgtcacccaggctgaagtgcagtggcacgatcttggctcactgcaacctctgcctcctgggttcaagcgattctcatgcctccgcctactgagtagctgggaccacaggtgggcgtcaccacacccagctaatttttttgtatttttagtaggtatggggtttcaccatgttggacaggctggtctcaaactcttgacctcaagtgacccacccacctcggcctcccaaagtgctgggattacgggtgtgagccactgcacccggcccagattgccttcttcaggtaagtattttaaacctcttatgagctgtttccttccttcatcccttcgtttcctcctttttcctcccctcctaggactctctttctcttttcatttgcctctattttccttcattcttttcttcctttgttcattccttcctcccttctttcttccatctccctcttcttctttcttccatctccctcttcttctttcttccctctcttccttttttcctccttatttcttgctttccttctttatttcactcatctaaaaaaaacctgtagtatagatctttgaggaaattattttagttttgacattcattgcacagttgtctgtaacccagttagggaattctttcctatttttaaaatgaaaatagctgagagatttgtgaggaaaatttgaaacaatgttgattctgaatgtttttaaaaatttctaatatttatgaaacaactgtatctcagatgagcttcaatttgcaaggcatcattccattttcatttttaattctctgttccaatgcctctgctaagaaataagcattttctcataggaagagattattccttttaactttttttcaattttaatttttattcagcctcttacctttttgctaaaaccaaaagttcaaaagaaaggtgatcaggacactcccaggaattttttagccatgtgagaatatatggtgaaatgattcaagtagatgcaacatggtctactggaaaagcactgagattttgaggagaaaacttagctctgccattagttaattgtcatcaaggtcttcctatgaaaattgtagttcaattttcaaacatttattgtttttctccaaagtgctaggcatatgcttttgtgctggagatgaaagatgaataacatgtaggtgctgtttttgaagaacatcactgaagagagagtgagctaaaacaaataatgatttgtgtgctagaatagagccaggttgtacagaaaggttctattaatagcgctcagtgatccctgcaaaagaagcatttgattctgtccaaagagatgagtacagaaaaagccaaagagaagaaatgatatttgatttgggattttgaaggatgaataggatttaaccagatgaatacattggaggaaagatattctggtaggaacactgtgagtaaacaactgtaggactttgggagggattgtgagtagagtgtgcaagatggaaagtacgttggcattataatgattcatcatcaacaacaccatgtttgcttgcctggttgaatgtccctgagtacaccagctgacatggatgccagaattccagctatgagaatttctcctctatttattttaaacgtaggtacaaatcagttctctttgaaccctgcctgactttgcatcatggtttcttctccttatctacttctttgtgaatgtgataactcaactttggaattgtaactttgtttctggcatcgcatccttcctaacatgctcattccaaaaactactctttcactgcactacttaggcaagaggcccccggccatgagtctcagagttctcctcctcatatcaccaaagtgtcccatgggttccagtggaaggtgagcaataacagtatctcctgcagccacctcacagaactgttgtgaaggatagagatgataacagatggaccatgtattcactttggaggtaaatagacttggatttaaatcctgagtctgactgagtaagccaagtcaagttatttaacttctatggtcctcgatattctcagtttcctatgatggggctaatagtacctacttggtagaattattgtgagaattttcattcaatgaatgtggactgaacacttgctatatgtgggctactattctagggcctggggatgtaaaagagaaacaagtccttgcctccttgaattcagactgtaaataaacaattaactacataatataatatcagaaagagtttggtggctggaagaatagcaaagggtaaggggagagagagagaggaacagagtgagagtagtgatattgcagagggtgttcaaggaaagcatcttacctgcatgaaataaagggataaaccatgtagaaatctggaagaagagtatttcaggcagatggaagagcatatacaaaacctctgttatggactaagttgtatccctctaaaaggcatgtgctgaagccctcacccacagtgtaactgtatttgaaaataaggcctctaaagaagtaattaaggttaaatgaggtcataagggtgggctctgatcccatggactgatgtccttttaagaagaggaagacatcagagctcactcactctgtgcacacacagaggaaaggccatgtgaggagacaggggaaggtggccgtctacacgtcaggaagggaggcctcaccagtaaccacccctgaaggcaccttggtcttggtcttctcacctccagaattgtgaggaaataaattcctgttgtttaagccatccagtctgtggtgttttgttatggcagcccgagctcactaataatacaggctctgaggctgaaatgtcccaggcatgtgactgcagcagagtcagtgatgggaggcagtgctgggaaatgccttggagaagtagccaggatccaggacacctttgccatgatgaggagtcaggacttgatgccaagggagatggctgtctttgaagcatgtgcttcaaggagtaaaatgacatgtgtttttaaaagatcaaactggctgctatgtggggaattgactctgggccagagaccatggtcttgagagcagttaggtagacaacaggagcccctagtggagttggtgagaagtggttgggatacattttggagatgaagctgactgaatttggtaatggattggatgacgaatggaaagaaacgagtcaggatgactcactggttattgggctgagcatccgagtgagtgatggtgtttttgtggagactgccactcttacgtctgtaatgctattctgcagacaccagtgtggctcactctctcccgtcttgcatgtctttcctaaatgtcaccttctgattcagaccttccctgggcagccttttaaaaattgcattgtttctctgtttccctgtcatgcctttcttttctctatagtatttatccccatctaacatattatatattttacttaccaattttattttcttctaaaatgtatatttcatgcatttttatctgttttgttcactgctttttagttcacatgtcttgaacgtggtctggtatacaacaggtgatccatatttcttgaatataaggatggatgaatgaatgaatgaatgggtgaaacctggggaagaggaatcaagaactttgttaaaatgagtactagttggccgggcatggtggctcacatctgtaatcctagcactttgggaagccgaggtgggcagatcaaggtcaggagttcaagacaagcctgaccaacatggaggaacaccgtctctactaaaaatacaaaattagctgggcgtggtggcacacacctgtaatcccagctacttgggaggctgagggatgagaatggcttgaacctgggaggtggaggttgcgatgagccgagattgtgccattgcactccagcctgggcaacaggggagaaactccatcacaaaaaaaaaaaaaaaatactggtcaattggaagtatctggaaggtaattgctataccattaaatgagatatatataacaattattattacaagtattcttcctctttttttttttttttttttttttttggagacggagtctcgctctgtcacccaggctagagtgcagtcttgcaatctcggctcactgcaagctccgcctcctgggttcacgccattctcctgcctcagcctcccgagtagctgggactaccggcacccgccaccacgcccggctaattttttgtatttttagtagagacagggtttcaccatgttaagtattcttcctcttctaagtgtgctgcacccacctcttagtagactttggttgggattatctgagagtagtcttttttagttctgtggctgtgtgagcacatggttgggagaatgtgaggaggatgtggccatgaccaactttatccttttgtagccactcactccccagcgtcacacaaatggatgcttacgcagatttcctatatcctccataggctcctatctttgtgctgagtattaattcccatctgtgttcaaggacggtaatcaggcaggggcagtaatcaaaatgatgtgtacagcaaaatcaaagctttcgcatcataatcaaaaccatgcagtaaattataggaatacgtgttctggtttaatcaatgactgatcttgcttggatgcttgatacagagaaaatcaaagatttggtttcaaattagccaaggggaacatattatgaatgatctcatataacttagcatgctatcacagtgattattttttaaataataagattttgctgtaggtctcaccacactactattttagcatacaacgactaagaaaaattctttagtatttgtccttacatagtgtcttgaagaatgacctgccctccaaaagcttgttacaggagagatgatataggcatgagcaaaaaatggtgaatgtgcttgtacccagcagtgttaagtaaattccgatctttgctgtgaattgcgagtgaaaagtttggggtgagtattttatttttcattgagaagtgaaataattgttagtttgtttagtagcactggtttttgggaattttttttcttttttgtctttacacattgcagagtagcagtaaagaaataggttggtcttttaaagggtgtatttcctgcttttaataaacacaagttttatgagaaaaataaataaatttcaatataaaattaagatgtacagaatatagatttagcacatataaaaaaggaaacaaaaatcattttaccttcactttagcctgggctgatttaacaaaacaccataaactgggtagatttttaacatcagaaattaatttctcatagttctagaggctgagaagtccaagatcaaggtgctggcagatttggtgtctggtgagagcccactacctcacagatagccttcttctcactgtaactcacatgggagaagtggccagagagctccctgggacctcttttataagggcactaatgccattcaggagggagggcatcaccctcaggacctcatgacttccccaaggctccatgtctgaacatcatcaccttgggggttaggatttcaacatatgaattttggattgggacataaagagtctactgcaaatttcttcatgtcagtcacattttaaccaaaatcatcttacatggacttctctagaggtagttatattttttaaccaactgcacttttatatgataacatatttttatatgccacctgcaaaagggctacctaatgaggccacctattttttgtaagtgtaagagactcagctggaagcaagttcaagtgtgaagcactgtcccctctctacctgggacatggtgcatacaaatgggagtaacatgagctttgcaggggtcatcttggcctcctgtcccacctccaccacttaccagtcatcattcattattgttattccatgaacaatgccacccacaaacccagagtgactctcagttcattgcttgtcttcacccagcgtaatgccagttgtgtgtccttaacatctttctcatctccttattttgtcctcacttctctccccactgccaatgtttaggcctgcagcaacgatttcctaaattgcccaccttccatccagcttccatcacactgctagagtaacacttcagaaaatccaagttcaatcctattaaaatcttattttaatcagtcgtctatttaattatttttattattgcccattactaggatagagaattccaagtttgtcaagtaatgaactgcatgatattcctggtctctttattcaaagtcatctcctacttatacccctaatgtgtgcgcgcacacacacacacacacacacacacacacacacgtacacaccatcttgccttccaggcaccctcagccacctttactactcctggcatgctgtctcctgcacaagtctcattgcctttaccctctgtggaatttccctctctgtgctcttaccagatcactttataaagttatttttaaatatgcttgtgaaaataaatgaagatcacatgaacaagaacagaggtgatttatttagagtttgcaagagaatcaaccactatcagttgcatttggcacagacttaaaggaacacagaaagataggaaacctttagagtgaaacaaagagcaggttccaggtacgctgtggcatgaggaagctggagttgagctaactagatgtgaacatctgatgtggttggtttgggaagcagatcttgcttcctccggttgattctgagttgaaaggagggagccaagaatagggaagctggcagtcattgactgtatcgtgactgttggggccagttgctgtagaggttgtggtttggcttccagctggttgctgcagaggtggtgctcagaattctgttgtcatatattgtctggccattgtccgtttgtatatttcatctctcatgatcaatcaatattttttgaatgagtacatgaatatttcatctcagtaagtgatcattccctcctcatccatcttaatcataaaattctaatgtcctaggttctttatctttcaacaaattatgtttccctttcttaatgggtagaaaaaggaagcttccccataggcctaaatgtgctgatttcaagagaaagcatacttctttgcaacaagaaattgcccaggccttcactcttaaccactatgctacatcaacgtccttagatgaaacagagacttgggggcatatatttcccaatttttcaaaatccatttttatcgcatattcaatttggcctgcttaccttatttacattacctgtctgggatgaaagacatttgaggttgtcattctggactcttaagtaagttcttcctttaaagtaaagaagctgaccttccaagctaatttatcccacttaacaagagtaataataacacaccacccactccagaaaggaaatcatgcagatgaatgaaataatgtttgtacagagcttgacactccataaaatactctaataacatggtgtctacactttgaaatgttcaaatcctatttcaatagaattaaaagccatgaagaataaaatgtgaattgcttgtcagacttttacatagaggtgcagggtgatactgatgccattagacaatttaaaagctgggttttagcaaagtttctgaggaatctgattggtttgtgggggagaaagtgatggtggtacttattcatatccatttttgtagaaaaacaataggttataacatgaaccgagaaacacttacgcagctaaatttacagaaatctgtctactcatctccgaggaaaagttttggctaagcaagttaattttgtcgttagacatttgcatagtaattgtattgagtctgaatgtgcatctgcatggaaagcatgttttttcaatcctgttctttggacatggattaatatagatcctggcgagtccttaaataataaattattgaagttgaatgcttaattactttacatttagatcttttataaccagatgcttgaacccctagtctgccatgtattgctgctgcctttattggtgttaccaggtaatagtcacctgagtttttcacatggtcttggtttgagggtagtctactaaagaatgcccacatatagtgtttcaaatattattaaagagtgataattaaatgtgcctgatgtataaaaagcatgtgaggtcatttaaactaacacttttattgtgattgttgtgaaggttatgaaaaacttgatcatgtatattatctaaagggattgttacaaacctcaagtgacttcaggtcattgaaaccattgcatgtggtgaccagctacagaggccatgacatttttcccttgcctattgtatccaaggttattttgcaaatcaccgctttgcatggtacaaccttcggagtttctagaaattgcctggagtgataaaccagagtatattcaacaataggatttcctagaattagtgggagaggtgtaattaagttactgtgtaatatatttcccccaaatgataaatatcaatatgtgaacactgaatatgtgctcctatgaagccaccttaagtggcagtttttagctcagaaattgtgaaccaatgttttgtccacctgaaccagtttgggtggatggaaaagacttaagggcagatttcagaacttgtttttctttgttaattcaaaaatgattctactaaactctagatgagatcaagtggtgatagagatatcagctgagtgagttctgttttctggaactttcttgaatctttattagtaattcatagcatttttctagatttcatggctgcagtttcatattgacatcatccagtatcactctaaagggactctaaaactacccttcctggcattcatctaagagctgggaagccatccgcttatacctggcttagaatatcatttttagagacatgaccacaagcctgctgacattcaagagcatggcttaagtgcatcccactcagagctttgtgaattcttcttgtaaattatgatgcctattcaagatttagtgggaatactccctcttctcaagcatttatcaaaacacaaggtgaatgcattatccacattaactgctgttcaaaaattctgtccaaaagttttgtttcaatataggcaaagtttctgtgtgatgcctggcatatggccaaccatataggatggccatgatctttattactgatttcttagtgtttattttgaatgtaaagttctttatgtttttcctaaaagttcctcactgtttccctcactcacccactagcccacatattcacatattttacttggttgtgactatttgaagaaagcccttaaagcttttttctaaagccccccatttaagattttcaagtacataggaaccactggggactcttactaccattctgattctgtaggctggggcctgagggtcttcattgctaactagctcctaggtgataggaacagtgctgagagcacactttgagtggcaagtctccaaagcagtgctgtctaatagaactttctgtgatgatggaaatgcttcatatctgtgccatccaaatgagtggccacttgcccgatgtggttaatgagtatttgaaatgtggccagtgcaactcaggaactaaaatttaattttatttagtttaattaatctaaatttaaatagatacctaccttatttgactatgctaggggacttaattaaagtctttatagctccttggctttccccagtcttgagaaaaagaatctgaaagtcgagggctctttcttatctccaattttccagaatcttgcatagggccaagaatattatgtatgcatagtaaatgacattcctattaagaggtctagtctgcagttttgggggcagactcatagaactgtcaaataataaaaagatttgactttgaagctataagacatggtgggtaggtggctcagcctctaccacttacaggataatttctgacaagtcacttaatccctctaagcatcaatttcctcatctcaaaatagcaatcatgattatggtaatgtaatacctatctcacagagttgctgtgttatgcacataaaattcctggcaaattatttttttcaagtgatacttgctctgcaaatgctagtttttgtggttatttcagcatgaatttcttttttcccctaattagttatatttcagtaaaacaatagaggaaggtaccctgtgtggacatagttgcaatccaattgagaggttaaataataacacaaaactacatgcagttttgtatcatttctcatgtggagaaagtagtttcgacggtcaaggaggagggcttcagcatgttactttgattctttgcattttatattattttatgtggaagcaaacaatatttttggcctgggattttgtgttgtttgatttaattccctcataaaaatgtgtcataaatgctttgctaattgtgattgaaatttcataactctatctcatcttaaaaatatcccattccaatttgctgaatacataatttccccttgtttaaagttatataatggacatattttctctttgtttttcttgagtatatttgctttgaaatagcttttttgtttttcataccctctgtttatatatatgtatatatgtaaatatatgtgtatatatataaacgtatatatgtatttacacacacacatatgtatacacacatatattaatcaaaagcattgcctacttcaagaaaataagaaaaatcacaaggggtaacatttcgcaagtgtgcaaagcactattctaaacaccttacatatataaacacgttgagttgtcactgaggctgagtaaacctttaagctcttttactgtctgctgtggtgttgagttctgaaaatattgatagtcctcttatcactggtaatgacatgacgtgccatccaatgacctttgtacaatcatgatttatgtataggttgaactaggggcatcgccatttaagaacgattaagacaaatcaaggcatttctgaaagagaacagattgattttgtttcttaaagtatttatagcttgtaaggcagctgtctgcttttgtatattcttaaacaagcatcatagaccttattcaataatttaagtgttttctttagaactgttttgcagcaaaccgaacttcccatttgcattgatcagtgttttcaccttcattctagattacattttaaagtaaaccaaccaatttggataaatgtaaacgcaatcacttgttaacaatcttctgagactgaatcggtgctgggtatttctgagtttctatggaaggaaaatagttcaaagttcagattggctgtctcaccacctaagctccatgccttgccccttgctttcctccacaataaggcttagacgcaaaacacttcgttttcctgatcaccactcaggcatgagagaccaggtgatctatggctggccaataggccaacaacaagtagggagaacctcctttcatgagtagaaaggcaaagcattgtgaagggagcacctttctatattattccaacctcgaataaatgagaatttatttatttattttattccagtttgttcatttatttcttatacgctctaagaggcaactcagtatgttgattatttttttcagattcatgcccattcatcttcttaaagtagagtttctacagatgctccaggatcagtctgacctagtacagagcagtgtgtgtgtgtgtgtgtgtgtgtgtgtgtgtgtgtctgtgtatgtgtgtgtgctcctgcatgcttttaattatatattgaagatatgctaaaatatttataatgcctctcaaagattcaaagaataataataaaataagcagctttccctaccttagagaccttctgtgtacccttcccttatcccttcattttcttccctaccaacataaccactgatctgaattttgcatttacttttctcattcttctcttacagtcatactacataccaggcagctctaaagatatattgtttaattttacatgttttggacttctttaaaaaaagaatcatactgaacaaaaatggaatcatattgcatgtattcttatgaaacttcatttttcatccaataatgctacttgaaatgtatttatgttgatgtagttactacagccatttttcactgctctatatttgtctcacttttgccaggtttaatttttttctattttatcctttgaactagcttgaaattatatacttcactcttttttctaatctcttggttactccagaaattttggcttgtatacgtaactttaatcaaaatctttatgattctcttgaatgataaaatatgttcagcattttagcttcagctatttagtctggtatttaattacaccttcctaaaccacacacattagacatttttactacaatcaatgcttatagaaattcactcacatatttatcagcattttttttatttacctctccttcatgcatctctgactttgcatttgggattattttccttctgactgtagttggttctgtaggaaatcctcccgggagtattgttaaatattttccatttgtttgaatgaaaaatggccttttgaaatcttttgtattaaaagttggatgcactgggttttcagttcccggttgacagttgtttcttcttggcacattggcagcagtttctcctatagtctaatattcactgttgctgttgacaagtcatggcaattgttattcctctgaagtaatctcttcctctggttgcttttaatattttcatgttgtattgggtgttctgaaatttcactaagtctccaggtatatgtctttctaagtttcctcctcaggatttgttgtgcttcctaaatctgaggtttgaggtaatcagttctctagcatttatagcccattgctactttgcctccctcccattcattctgttttccttttctcaatagacttttccactctgtcgtgccctccaacaactttcttatgattccaacctagctgtctcactgtgctgccttctaaatcactttttcataactatcttctaggtcaataatttttccttcagctgtgtctaatctgctgataaaacatctgtaaggaacatgactgtgctgcacccaagcaggcataggccaaggtaaacaacctggatgactcagcaggtttgtggtacaagtgcatagtcccatgtcttatataatcatagctgtgtagagataacatagaaaagttcaccgccatagccataacatagagaagctcaccacctagctctcagccactattgtttgtgtaatgtataaaagtaacactgaccctgtgaggcagctgctgaataaagccatgtctcatctacctgctgtttctcaagtgttcttccagctccctgccccacatccacccactcccctcagccctcagctggggttggaacttgaccccaagcatgacaacatccattggtttttaattttaattaccatatttttaattcctagatattctttttgctttattttaaaattgatttggtcattttttaatagttacttcttccttaatcatattatcatcttcttatttatttcctgaaatgtgttagacattcttagataattcctatatctattagaattatgggttgaagttgtttgttatttgtgctcttcttattcatgttgacttgttattttatatattatatattttcatggaactttcttttaagtgttgtctgagacctgggttcacgtcaaggatgatttttgtttgcttcaagtagctgtccacagaggtagaggtgggaaatcaaccagtggccaataaattcattccccaactccctacaaaagtagtatgatgcaagccataaactcaaataccgaccaggttgtgggtatgaaatctctttggagattttttttttccttcacttagtgctcaattcatcaggcaatttcccttcttgttttctgaaagaatttattgccagttacagcttatgctgctgttccaattgtataagggatctctagtgagactccccacattggaaagtccttagactttttctctgattgctccaactcacacatttgaaatcatacaaatggaagctcatggttgccaagactcagcagatatcttcagggtgaaacctggagtcagtgttaatgtctcttcagagtctttagtttgttttcatccttttccagcagaagagccctacaaaagaagacatttatgcagccaaaaaacacatgaaaaaatgctcaccatcactggccatcagagaaatgcaaatcaaaaccacaatgagataccatctcacaccagttagaatggcaatcattaaaaagtcaggaaacaacaggtgctggagaggatgtggagaaacaggaacacttttacactgttggtgggactgtaaactagttcaaccgttgtggaagtcagtgtggcgattcctcagggatctagaactagaaataccatttgacccagccatcccattactgggtatatacccaaaggactataaatcatgctgctataaagacacatgcacacgtatgtttattgcggcattattcacaatagcaaagacttggaaccaacccaaatgtccaacaatgatagactggattaagaaaatgtggcacatatacaccatggaatactatgcagccataaaaaatgatgagttcatgtcctttgtggggacatggatgcaattggaaatcatcattctcagtaaactatcacaagaacaaaaaaccaaacaccacatattctcgctcataggtgggaattgaacaatgagaacacatggacacaggaaggggaatatcacactctggggactgttgtggggtgggggaggggggagggatagcattgggagatatacctaatgctagatgacgagttagtgggtgcagcgcaccagcatggcacatgtatacatatgtaactaacctgcacattgtgcacatgtaccctaaaacttaaagtgtaataataattaaaaaaaaacaaaagagctgtacagggaatctaggctggcatagtgtgagaaacaaaacacacatggcagctctttttgccatccacaacaaaatactaacaattgagcctataatcagctaaatccaaaggcaacataatgttcttccccatcttttacttgtgcagttgtgttttggatccagattaaagaccttaaatttagtactattaagtttattgtttgtaggtttgactgagctccgtaaaattttttggatcttaattctatcacttaacagtcacaattttccccaatttcatgtcatgcatacatttggccatcacaacttgaatgtttttactacactgttgtaaaaatgttgacccagatcagattaaagcctcaatatcccctctaggtagagactcgtgtatgatgtggcattgactaggtctgctgttaggaatactttctctttcttttcttttgttttatttttgagatctccctctgtcaccaaggctggaatgcagtggtgcaatctcagctcactgtaacttctgcctccttgattcaagcgattctcatgactcagcctcccaagtagctgggattataggcatgtgccaccatgcccaactaattttttgtatttttagtagagatggggtttcactatgttggccaggctggtctcaaactcctggcctcaagtgatctgcctgtcttggcctcacaaagtgctgggattacaggcatgagccaccatgcctgtccatatttctttatcttcaagaacatattttgccaaatgccttcctgaagtcaacacacattgtatttatgatttttttagccagagaagaattaaatcagttaacatgaatttgacttataaatccacctgtgtgttaatcaaagggctccatggatagccacacccagtcatcatttatcatctccatttattcctcactggggtcatttgaagattctgactcagaattacatccttgataccttgctaacagtcaagttaagctattatggaattgtgcctattttcatgaatatttgggcagcctcttttcctaaagcttataataaaggcctctatgaactaccatgaactccatggacagtaggtatacagtgttatatttgagttccttcccttttcaccagatgtccaggtaatctgtactttatttctataatgacatagcatccatccttttctccttttatcttttgagcattttccagggtgctttcatcatcttggttttggatttttatcagaacatgtgtccttgaacttgcacacaagaaagactttcagtgattgacacatccaaggcttcttatttagttgttcttcaactcaaccacattgtctaatagaaaccagccaggctctgctgtctgcaccattaggatgattatgaaaagaatttaactagcattttcctatttatctttcaaatatataagcttctacttagcaatatgaaataacaaaccactgctacaggaaaaatgtggataaatctcacagagattgtgtggaacaaataaaacaaatgaagtcatgtgcaaaagactacttactctgttgttctgtttataggaaattcaagaacaagcaaaactaataaatggtcctgtaagtcagaatagagttttcccctgggactgggaaatattgactggaagaagcgtgagggagccttatagaggctctatatgttctatattttgatctaggtagtagttataagtctgtttacatatataaatattcataaagttgtacatttaatacgtgtgcattttactatatgtatgttataccttaataaagaagaaaaactcatttaggttacaagtgagaatcagttttagtgcagtacttatatgagtatggactctggagtcttggatatataatcagttgattacaatcaacatctgaatgattttggaaactaagtttcctcatctgtaaaatggatgattttctgtgataactgtacatttttactttttgtataaggcataatggagtgatgtgtgtaagtcacttaccatcatacctgccacaatacatgcaagttttagtataatatcgtcctgattcaaaacatttcctgctttttaaaacatcctgctgtttagacagatgactgacattattcaatacatcaaatggtatgttttcattagttatctatttgtgacttgcttagtaattataatggcaactgccatttatgtaactctttatgtttaaaagctaatttatatacattatctaatttaattattcacaacagtgctataaaaatgatattaattttatcctcatcttgccaacctagagcctgagatgcagagacctgaagtaacttacccaaatgacatagtcaggaaatattagagagagtcataactcagtcatttatctttccctcttcaaacggaagggtacattagagtcacctacagagctagttacaagttccaccccccgtagtgtctgattcagcaggtttgaggtgggtcctgagattgctgcatttcccaggcgatgctgacactaccgtcctatggaccacactttgagtagcaaagctttgcagatgaagaaagcgtaagcatcagacctgagttctgccttcaaagagcttgcatttcttttttcaggaaacaggactgaagtatgaaataatagaagcctccctaaggtggtttatatcctgagaacaccctctttgctggaaagaaagtttcatagtagaagagaacttaagaatactcagattatatataggagaacaaagtatgcttagatacgctaattttaatggtgttcaatgacttatatgccaaaatgttaaaatggtgggaggcccctaaattaatatcctaattcaagtatcctagtcgtgttattctcacaaattgtcatttcattatgtcaagtaatattttagggtgttttaaccatcgttatttaggtctttgattgatgtgaaaattagtctcagtgctgtaaccacaggtttttgtcagtgtaaccctactgagttccagcttcttttttaaaaaaaagtacatatgtgtacccacaaccattgttactaattgaaatacttgaagaaaagagagaaaacagtgaccaaaattcttataaaaatcaaaagctttccattttttccagctttgctttgtttcacagcagccatttatcagagttttaacaagtaacaagtaaccagtcacctattttttaagtgacagcattattaagatataattcacacaccatacaattcactcatataaagtgtacaattctgtaggtttcagcgtattcgtagagttatgcaaccatcactacaatgtaattttagaacattttgttacttccaaaagaaaccctgtccccattaatagtcattcctcatttctcaattcactctgccctttgcaaccgctaatttactttctgtctccatggatttgtctcttccagacatttcatagaaatggaatcacaaaatatgtggtcttttgtgaccagcttctttcatatagcctagcgtttttgagatccatccgtgtaaaatggatcagttttttattccattttatggtcaaataatattcaattgaatgaatatgccacattttatctacccattcatcagttgatggacatttcagccacttccacactttggctgtatgagtaagaacacatttatgtacaagcttttgtgaggacatatgttttcatgtatctttggtatatacccaggagtagaattcctgggacatatggaaactatgtttaaaccataaggaactgacagttttcctaaagagttgaatcattttacaattccactagcagtgtatgatgattccacgttctccacattctcaccagctcttgctaatatttatctttttgtttacagtagtgggtgtgaaatggtatcttgttgtggttttgatgtgcatttccctaatcctagtgatgctgagcttcttgcatgtgcatttgcttactttgttttctttttccatcctttgagacaaggtctcactcttagtccaggctggagtgcagtggtgcgatcacagctcactgcagccttgacttcccaagatcaagtgatcctcccacctcagcctcccaagtagctgggactacaaagcacaaactctttagttttttagaaatggggtctcgccatattgcccagactggtcattcatttatctcttttggagaaatgtgtattcagattatttgcccattttttaatttttttttctttttaaaatttaattgtaaaatttgaataacttttttgtgctcttctttgttttggtcttgttttgtttgatttggtcttgttttgttccttaaccttttggtgactagtgagtagctattggtagaaagtgggtaattactaaacaaattgcaatgagaaaaaaaagaattaaatagtgtggaacacttgcaaatatgataactaagttttaccaattatgaacaggttaatatttggtttactgtttggaaaataataatgtacaatttacacattggttctaatacagtatttaatctgtatctttgtgtcatatttaataccaccattttccaaattgttccatggaatgtaataggttttatatcaaaaaggggtctgtggcttaataagtctggagaaccataggctcaataaacgggatggagtgttttaactcaagggcttccttgaacctttaatatgtaaatagacattgtaagtgttcaaagcaaggactgtacatgaaaataaaaccctttactttccctaatcatttcttttgggacttgtgttctgtggaacacactcggggaagcattgctttaaggatgttaatttttcttaaagaaagtatattgccctggagagctcagattgtgacaactggacaggtacaaagactggatgaaacagcagcaattgttaagttacgtgttacaaactcagaattaatatgggaaggatcctgacattttatgaaattaaaactaatattaattgaacagaaatagaaaaaaacctgggaagacttgagacagtttgtgattcctctcagctagctggcatgtttattttgtattacagtgcataattgaccccctgctaggtgaattggattttgcagactcgccttgttatgtatttcaaagagctctaaatttaatacatgctgctcctcagggttcaagctttgaatcaccctccttttcctgtgttttagctgggtaagtttctctcttttcaagaacagcaactttttcaatgcagacagtttaattataaagatcttctcatttcggtaatgttttagtgaatctcatatttcctcataaatttagggagaatgcagctatttctaaaaataggaattaatagttgagttgttactggcttttttattgtcctttccagaattacaaaaaaaatagtctttggcagttcacattgcttcaggttgaaagtatgcaaaatttttaaactattccatattcgtaataagtgaaaaaataattatttttgatttctcccctaaggtactagcaatgtgtccattaggaaatttagctcttatttttggtgaagtagcagaatttttgtttcaaggcaaattcagcatagatacttgattgtaaagatattattgtttgcaaatctttgtggagttttttgggggccaaattgaagcattaactcaaaagaatggcccttttcttttattgttatgttcttttcattttatttatttgctttcatacattttctaattaattttatgtttttaccaataccagccccatcactggggttctggtgaccacttaattttactgtgaagtagaagccagatgatggataagtcaagccccaatataataaagccaccttaactagttaaactgatattatagagcttagctctgactccagatatacatatataccattactttatagaacaactctctctggaatagccgtgttctctttaagccaggtatgatggtgcatgcctgtagtccagctactggggaggctgaggtgggaggattacttgagcctaggagttcaaggccaacctgggcaacactgcaaaactttgtctcaaaaaaaaaaaagttatcttcgtcattgagatgttgcattgatcacccaagtatggtgaagaattgaagagtagccaattagagtgctcgattatgaaaatatgatgcaagatagggaccaggaaggtcaccacagttcttcctggggctagttgctatgaaagataaacccccacatctcagtagcttaacactattgaagtttacattgttgtttacaaaatgctctttctggtggactgtttcccttcaagccatgattcacatggccggcattcttccatcttgtaaacccatcatctacaaacagagacatccaacttaccctgctaggctgcatcaagccagaaggagaaagagtatggacggtcaccagtggaaggtttctgtgaatgtgactctagctctaactctgtgagctagaagtcagtcatatcaccaaacctcatcccaagggacactggggcatgtaatccaaccacatatgctcaagaagatgaaatggattttggtgaacatgcagtgatcttgacatacactgctgaatatttgcttttttatatttacagtgttgaaattaatctgactaatgaattggagttagttatctccaaaggaaaaaaaaattacacatgcacgcacacattaattatacattagtcttaggctaataattaatatatccacatgttaagtaatttctttaataagttctcttcaaattagttcaaagatgtctttggcattcctagaaggcacattttattgatctgttctcaatttacaaaacaaataactgactctttatatctcctgaatctcctttgaacattaaactgagtagcaaagcatcacacatagcaagaaaattgattttgacaatccagccttgttagttatcatttcaacaggtgccattagtatcaagaccgaggtgcctgccacagctctagtgcaataatgtgaagtaaatatccatccaagcaccctggcctcttctccaaaatagaaaatgacatcatgtaattggttttgtctgaactgctcagtgagtgaaaatgtgtttcagaagagttaaggcatgatgtcattattcctgaagtggattcttgcaaaggctgggcactcagcagcctgagtcttaaaaccagcagcagtacaaaaacctgatgcagaaccttaaccccatttatataatatggtgaattttttctcaaatgggaatatggtgcattatctttaaaaacaagaagtgatcacatgctccagaacaccactgatgcctctaagaaatcttattgaattaagacagttaattaattgtctgcaatagtcttgactcttgcctgtctctcacttgagcatgtgttgtaaattaggcaggaatatcattagggcatccagttcgttcccatgccccagtggcaaagaggggcaggacatgaagatgattttatttatttaacaaatactgatcacctgctatgtgccttgtaatgatcttagtgctgggtatatagccatgaataaaatgagattcctctttttatacataataagcaaataaaaatacaacccaatggcaggtagagtttcatgctaggaagaaagataaagcaaaatgacatgctagagggtgatgcgggagtggcatggactggaagatgggctgtcagagtatgacatttgagcagaggctgaaatgctctgagggagaaaatcataaatcatgtggatatttgttggggaaatgattataggtgtagggaacagcaggggcaaagtccttggatcggagtgtgcttggcaagtttaaagatgagcaaacatgaatgaggggtagagtggcagggattatggtggaggagaggcagaaggagcagaacatgcaacatgctggatgctgctgtaggccctcataagggactgactattgagccataaagccactcgatttcaggcttggcattcatgctctagcaccagaagtgtaatgctgggtggtctatgggctctgcatttaggctggggactaagatgtgacatttctggaccttggatgattgtcaaaggatgggaggttggttctgggttcagagaatggggaagtacattgcccattaagaattttaagagatctaagtgtgaccacaattgatgattttattatcttcacttcagtgataaaattcttcaccctcctcattccataatattctgctgctttcacctgaagttcgccaggtatgattaaacattgagtaattcagaccaaagcttccagatatctagtaacaatatacactagtcaaaaaacaagatcacacacacagacacacacacacacacacacacagacacacacacacactctttagtatatttggcaaggagaaatcattgagtgcatgaatttataatgggattgtatattttcaatcaaagatcttacatgaaaaatgttcaatcattaagataagggagacatttatgttatgtggtacccaagatatgccagtaaggttttttaaaatacactttattcatttgttcaaaagccattttgggtggtggaggcttactctgtgctactgaagacataatgaagatcaggagataccctggcagccgagagcagtggtgcatgcctgtaatcccagctactcaggaggttgaggtggcaggattgcttgagcctgtgggttggagaccaacctgggcaacacagcaagaccctgtctcaaaaaaataagtgggaaaaaaagacagagatgtccttgcaacaaaccagaaagtgaggtataactattctaattttacaaacaaggtaactgaggcacagaggagttcagcctgtgttcggagtcacacagctggtaacatgaagttgaaacacaaatgtaacttttttctacaccttgtctttttaaaaccaacaacatctttcagacacttgcacactttttttcagataattggtgtatgtaaaggatttcacttcacatggactatttggtagatatataacatcttagatatagccaatatcttgtataggaacaatgtttgtatgaagtaaagaaaaacaataggataatcaatgcaaggtagaaagtgatagcacacttctgtgattaatactaggataactggtaaagagtatatgctattttgtattactatttccataacttccaatcatgcacatggctgcttctctacaactctacaaagacagtatctaacacactgtcatacaccactgcttcctatcttgttaaaatgccaattctgacgcaggtctggtgtgggacctgagattctgcatttctaacagactccagggatgcagatgtcattgctctgtgctcttaaatgtggagtttaaggctattacagtcatttccggcaccaaccaaaacactgtgtcttggcccccacggctactggtggtcacttttgcaagaatgtttcctgggagacctagtagagcagcttacaggagttcacaaagacacaaaatgatggtaggaaggaataaagaggagaagtaaaagtgttgcaatggattctgtacctcaatcctgaagaaaccacagatcagtcacttccttcttgttcaagtgtgtcaagtgtgtcaagtgtgtcagcctgatttggcacagctgacttgatgaagcatgatctcacacagcaaagctgttgatcaccttgaagaatatgtactttgctccttggtgtaacctaaattttacctcgctaaaacaaaacaaaaagaatctaatattctactcatattattcattctggctggatgctaaagttaatttccttaagtgcttcagatactatattaaaactatccttttatcaaatattttaatataaagcttttgaaaacatgcaagagaatttcttcattagagccttctccaattttaatgagcacacaaatcaccttaaaatcttattaaaaatataaattttgactcagtgagtctgggatagggattgaaattttccttttcttaaaagatcttagagaaggtggatacagcatccttggagcactctgaatagacgggccttggaatatcttatcttcacttgtattaggatggcttttttgtgtgtgtgatgttcaaaatgatgaggaagctatatgtttacatatcaccagaagcttaaaatgatggaaaggaggctcccaccccatcatataggccattgatcaaagattctgcagtcacactatttccttaccatgatggattattcaaacaccagctgtaggaaaaggatttttttcaggaaactgatggtccattgtagtttttctgaaatcaggctgtacttgaggattactcagcgggttccaaagagtacagacatttaagatccaccccagaccaactaaatcagaatctctgggcatgaatctaatgagtagtctctagaccagcagcacctgcaagcttatgagccatacagaatcgcaggcccctccagatctactgaagtacagcttgaaaagatccccaagcaattccaacgcatgttcaattttgagagatgttgctaactgggaggcaaagctgtagagttgccgcagcaacttaattgtaaggtattaaaagtctcctttcctatctaatcgtttggatgtctgccaggtattaggaccaaaggaagacgggcagacataagaacccatccaatggtggttacattgattatatccttcctgaggcatctgaaatagtataaaataataaggagagaacaccaaaaatgtatcaacttccatgtaactagtgtgtattagcccatttttgctttgttgtaaaagaatatctgaaatttagaaatttagtaatttagaaagaaaagaggtttatttagttcgtggttctgcaggctgtacaagcttggcaccagcatctggtgaagcctcaggaagctttcactcatggcagaaggcgaatagggagcaggtgtgtcacatagcaagagaggaagcaaaggagtggggaggatgtgccaggctcatttaaagaaccagctctcgcatgaactaattgtgcaagaactcactcatcaccagggcgatggcgccaagacagtcatgaaagatttgcacccataatccaagcagctcccactaggccccatctccaatactgggaataacatttcggcttaacgtttggatgggacacacatccaaaccacatcttagtgctttacatagactgttccatctatctctcctctttgtcatgggttttggttgactttctcccagaaagtcctccctgcttgtttctggctttaaatctattgagtaaaatttatctgaaggaaatttaatcaataattcaaaacaggaatagattattcatagggagagctgtgctcacagttttgttaatttgcagtggtagcattctttatcactggctgaaactcaagtaaaggagtgaaagatcaagtatttgttgagaaactattttgtgcctagcatcatgctaaggattatggtgacaaccgcaaaaggttagtttcatggcacttgttggagatgcatgtatttaacttgcaaatagtatacacaactcgtgtgttattaagttatgaaatattgaaaaagcataacatgggagtttaataatggaacacagacagactgagcagaaaaaaaaaattagtgaagggaggtgtcattttgaatttaggcttcacagagccaacagaacttgagtagatttaagatgtggacattccattgagagaaaacagcttcaacaaaagcaaaatatataaatatacatatataaataacacacagatgacaggaaacaaataataatgagagcttacccttaaacatgcagcactattttatgttttgcatttttaattttgggcatagaatttcatgtatgttggggaaactgtagaaattcttcttattctaattaaggaaggtagctttgaaaacaagcatattttaaatagttaaaattttcattattttttcctcaaaattatagattgtggtgcttttttgtaatttttgctaacttcaaaatgtaaagttaaaggttttatgaaatatcaattctgaaaaaaattttctgctactaatgatctaaaaactgctatgttaagcaggctcttttcatagattaaaaatgctcaaaattactttgatgtaaacttcattcattatacatgtaaaaaacttggtttacatggcttataagtcagttttacagtctggctgttaagcctaattctttagataattactatgtgaaattttcgttgtcattaattcttcattgtggcaaactggcatgagtattctctattatggagtaataatattaataagaagtgcacatattcaaaataatgtagaattatatgcactataatttacatatttgtttaatgtcttattttttattatcaactttgcttgtttatttgttttatgtcacctgctgtagaatgctaattggtaacaaattatagcattatagaataggtgcaagccatcaaagtgtacatttttatgtaaatattttatttttattatagaatgagtaacctaaagataaatgcagtgcattctcagcaataagataatgctgaaatacatttcagaagatacaatatttttaaacctgacaggaaattataaaacattagcttacatgaaataagtttcattctatatgagctttaatactgcaagatctatgtctattaactgacaatggaaagttttgtgaggaaaatggttgtatgctatatctttgcttccactaacaggaaacattacagagtcacaattcttaatagaccgcaggctcctttacaacttagccatctatattactcacttttatgtccctagcattggtgatagatggtgttatttattcacaattcttttgctttccatctttgccatgagtgtaagtggagttgacaatctactgcattgacttggccctgtgacttgctttagctagtcaaatgttagtggatgtaatgactttacatgtgcttgtgtggtatgactccttctcttgcatttctgccctttactatgagaaaaatatcttttaggtagttgacgatttcgaaatgaaaaggatatgaagatcagaacccaacctgtagcataacacaaatctatatgcacaaagcacgttccatgcagtcatgtcttagttctgggatttctaggtatgggatttccttgagctgagcactacatgtaatagtgatggtgaactatctaggtatcggtttctaaaggttttctcagtagtgggacagtagctgagaaataaaggagaaattggctaggccaggagacttctccatctctagggtcgccaggtaatagttcagattacttcagagatttaaaggtgcagcattagaacatggttttccaggttagcagggtcaggcagttaccagaagattctgcaagcatgacttggtgcctgagtgggtggcgagccaggggtccctgtccaatccccaagctgaacagagaataaaatccggattatgattaagctcatatccaccaccacaaaatggagagaaaaacaacagatttggttaacacccagtgttcaaggaatgagaaaagggataggaagcaaacttgaagcattgaaaaaatatgtcaggtcctgaaactggggggaggagaagtgggaaggagatgttctgaagagcgtcactgagaaaggcatatttatacctgaataagttctctccaatctgcctgcaatttttagctagtttgcctagtgtagccagattacagcctttgggtgtgttctgtgtcaccaatgaggagggctctgtaactgttgatgattgccatagaagggtgggtttcctgtcaagtcctccaggtactatccagatgctcccccaggatctgacagaggctggactaagggagccttctgaagaatagagtagcacacagcttgagaactgcagtgtggactgaacttgaagctcagctacatggtgttataagcagacttacaaaactacctctcagtttgggcaactgaaactgaaagtttactattgaatatagacaaattttggccaggcgctgtggctcatgcccagcactttgggaggctgaggcgggctgatcacctgagctcaggagttggagacaagcctggccaatatggcgaaacctggtctttaccaaaaatacaaaaattagctgggcgtggtggtgcgtacctgtagtcccacgtactggggaggctggggccagagaataagttgaatcggggaggcaaaggttgcagtgagccaagagcgcaccactgcactccagcttggagtagacagagcaagacttaatccccctaccccccaccctcccaaaaaagaaaaagaaacatgtaaaatacattttcatttaaaaagttaaattgtagtatattcacttttagtaataaattttttataatatgtcattaccaggcagacaaaaaaaacttcagatattttctttcaaagtgccttgagtgccttctgatagaactgctaacgagcaaaactagtactagttaaatagcactaatttgataatactaattattgtgaattgtttggatgacttctgatacatatattttactttgaaggggctttttctaggaatattgatatttaatacctgttatatcttctatttgtaaatgattattaagttggctacttgctctgcagagtattaggaatttcagtttttactggttggtggttgcatgtagttttgccaaacagaatgcttaataaacattttaagcttgttctgccttggctgtatattttagttcattttttgtaaattttctcaaaattaattgtaggctagcttacctataatagtccttaattaccattttgggggggaattcttttgtatagtaattgttctcccccaactagagtttatgtgccttctctgtccttctctgtccttcacctgaataatataatgctgaccatcatggagtaagcactgaacttataaatcatttgaattggttttttgatctgaaattcacagctgatgaaagcagttgaaagtcgatgttttctgtgagtcatgattttttttttccccaagctggagttgaaatctacttgaatatctctctcctatgacaaaggcaaaattaagtatcatgataactttcaggattcgaataaaataatcacttaatagtgatgtgaattttcatgaacattcgcagcttgaagaattattttagtatgccatgtatttatagtttaataaaacatatgtttctctatagttcaatttattttgtgcttgaaggaattttttttttttttttttttttttttttttgagagggagtctcgctctgtcgccaggctggagtgaagtggcgtgatctcggctcactgcaacctctgcctctcgggttcaagccattctcctacctcagcctcccaagtaactgagattacaggcacataccagcacgtccaactaatttttgtatttttagtagagacggggtttcaccacgttgggcaggatggtctagatctcttgatcttgtgatccactcacctcggcctcccaaagtggtgggattataggtgtgagccaccgtgcccagccagaaattatttttaaaactgtggttttgtattcccaggataaaatgtgtatcttttgtacagcttcacaaattagtatgtccatttacctatagcagtgcataaaaggatatttctttaaagatctatttgtataacattctatagtcccctctttattgaaagtactaatagcaatatttctaaaattatttaattttccagtgaatgccaaagagtcccaattatgggaaaatgtgttccattttggaaaatgctacatgcagttctcattttcactcagaaaaataaaaggcaatttaattacaaaggacgcaattttatagattggaaaaatatagaaatccagactgcttgccaagtggagtgagactgtgtgtaataaagtagattttgaaaacttatgctcaaaacacaatcaaaaagtcacagaatgtgagggtattatggatggcaaagagatatttggcaaatgtaagcagggcaggcagtccttcattttttttttttaacctctttttctaaatgccctctgctgaagtgggatagttatttagaggtaaggaaatgatggtgggaaaaaatgtgggagacatttttctctccaagtgcctgaaatcttgacattgttctctcgatcgatggaaataatcaaaaaggagaaggccatagccctggttaattaaccagctcactatttaagagcacaattctccaaaacagccatttatttctatctaataaacattaatctcaaataaataaaaacatattctctctctaattctattgtaagcaccttaagacaaaacctgagtcttctgttttgtcctaacaatggtgcaatgtgccctctagagaagacccttcctaagtgtgattgactgggatgggcttagctgttctacctttttctaaaggtggcactcccacataccttataaatgcaggtctagtttcatcattccattaatcacatgctgacatatcagcttcaattatttaaatcaaatatttacagttaacattagttatatgaagtcggtcctcagaaatcactgtatggaacacacttttatagttgacattgtttaacaatgtccttctaaatgttggccaagtaatttgcctgaagagcccttctctgcctgaagccataagtacttgaacagacagttttttggggagatcttcctagttaaaaatattgagctaatatctaaacttatagataacttcgggacatttgatttgagttaaggttagaacaatgctgcgtaattctggccacatatataattaatttaaattcttctagattaaaaaaaatgttgcagaatgctacagagctgcaaatgaagactagtatcctgttaaaaccatttgatctttaaactggcttgcttcatttcataatggatcgaagacaatggacacaaagtatataggcagtaaaataatgataaaataaatgttggtactctaaaatagaaataaattagaaaattaagaacaaggaaaacaaaacacaaatgcacacacatagcagctaagctggctcatacctcagggcctttggacctgttgttccctattcttggacccgttgcttccttagatctttggttttgttttactttttgagaaggaattttgctcttgttgcccaggctagaccataatggcacgatcttggctcaccacaacctcagcctcacgggttcaaacaattcttctgcctcagcctcccgagtagctgggatcataggcatgcgccaccatgcccagctaattttgtatttttagtagagacagggtttctccatgttggtcaggctggtctcgaactcccaacctcaagtgatctgcccaccttggcctcccaaagtgctgggattataggcatgagccactacacccggccaccttctcagatcttttgctagctgctgcttcttcttcttctttttttttttttttaaatggagtctccctctgtcgtccaggctggaatgcagtggtgtgatcttggcttacagcaacctccacctcctgggttcaagtgttctcctgcctcagcctcccaagtagctgggactacaggcgccccctcaccatgcccagataattttttcatttttagtagagacagggtttcaccgtgttggtcaggctgttctcgaactcctgacctcaagtgatcctcccgaagtgctgggattacaggcatgagccaccggcctgctagcttcttctttcttgtcatgtgtctcttttgagatatcactcttccagagatgctctccttgaccaccttgtctgaactatccttatagtccccttgtgtcatctccttttgctttcttttcttcagatcatttatcaaaatcaagttgtttcttgttcacttccatgtgtaagtattgttgtctgtctaccccaattcaaatagaaactccaggagagtttgctcactgctatatcccccagttgtgcatgtgggtaccaggtgacactttctaagtagtttaaagtgagtacatgttcttaggaacttgctatgtggcctgaagctttctagaactcaaaatgaagagagagaaattagaaaggcagatgcttaccactgctccccagggaataataatttgaaaaccagcacttaattataatagacttgtattgccaggaaccccatccagtgggtactgagctggtacagtgagaaaactgtcaaacagaactttgtacaggagatactcttattgtggtccaaatctggagggttctattagatgaagttcatccaaacatagaacttagattaagggagtagatgtatactccacagccaatccttcacaaaactcatttgtctccattgggttttttataagctctggaaaacaaacaaacaaaagagatatttaataagttatctatttttttccagagtttcccttgttctcgtgctgatgattaactttaactcttcaaatcaattgtaagctgcctaaaggcagaaaagataatgtatttaaatatgtcttcttattcttaggacagaagaaggtccctatacatggcagatgttcattaaggatcagggtttagtgatgttaatgctattatataggttcattagtcatataaaagttcattatgtgccaggcactttcaaggcaagttctgagaaacaacattaatgactgggcacagaatctcagactagaggacctcatctggtgaacttgggcatgaatgagcacagcaaattagtggcagagcctagggcttattctgctaataggagcaattctaatgttggcatgcactcacacagggaaatgtgtgatatatgtttccatcacatagggaaagcattaaaaatctacatgcttggactttactcctaaatcagagatttggggtctacagaggtatggaaaccctccctcaatcttggagggtgtattagtctgttctcacgctgctataaacaactgcctgagactaggtaatttataaaggaaagcagtttaattgactcacagttccacagggctggagaggcctcaggaaacttacaatcgtggtggaaggggaagtaaacacatccttcttcacatgataacaggaaggagaagaatgagtggggggaaaagccccttataaaaccatcagacctcaatgaacttactatcatgagaacagcagcatggtggtaaccgcccccatgatccaattacctccacggggtccctcccatgacacatggggattatgggaactacaatctagatgagatttgggtggggacatagccaaaccatatcagagggatacactgagatacaaggggataaagcagataaaaaggcaaactctagtcaattgaatttctcatatatctttcattctaacccgttcagatgtactaatttgtcacatgccatggttacttttccctttttagactttcaagttggaaaaagcttttttcagattcagaaagataaaatatcagccatgtattaaatgcattaaatgtttttctctcagctgcttttattccaaaatattttttttttttttttttttttttttagacggagtctcgctctgtcgcccaggccggactgcggactgcagtggcgcaatctcggctcactgcaagctccgcttcccgggttcacgccattctcctgcctcagcctcccgagtagctgggactacaggcgcccgccaccgcgcccggctaattttttgtatttttagtagagacggggtttcaccttgttagccaggatggtctcgatctcctgacctcatgatccacccgcctcggcctcccaaagtgctgggattacaggcgtgagccaccgcgcccggcctccaaaatattttcttaagggtcactgacaatcttgcaaggatgtaaatgacaagctgtatttgtttgttgacattatctatcaaagaggcttctaaacacttttgtgtttctgatgtgaataaaggaaatacaacattgaataataatccaggcaggttgcaggtggcataaggcttcagaactccaccatagaaatgaacgtgattggaaatgcagcaatcaacattttgacagaaaagtgaatgtttcaactgctttatgttcacaaattgtttctattttctttttgtattacaaaatgtaagcagtgtgagtttgtgtgtatatgtgtgtgtctatgtgtgtaaattcaaaggtttatcctgtaataagatagaatcagagatagactccttgctattctcaggttattttttccttgttcacatttttttacacttgagtaaaatacttctgcaagacatattggaatagttttgtgactaaatcctagaatttgcaaaatagtgaatcacaatataatgtttcctttggatactattttggccatacttggttggctttctggaagtatgaagtggaggtttcccagtgacacctgtagcagtgcttctcagggacatagaaagacaccaaattctcttatactgggattcatccaggtgaccagcatttgctttgcaacaatcatctgtggtgattgctcaagtgtagaagggttttcaagaactccatcatggagttttgtagtggcagattagctgtcctctacttctcctggagtggctgggattcttcaacaccaaaagaggcattgagtctttcttaattggcttcagtcagagagggtggggatatgtgaaacttctcagtctgatctgttcttcagctcctcagaaaagttctacagctactccagatctgtttcgataaaggggcggtggtgcaatgaaattattcataacagcccactttagaggtctgcctgaaaaaggtggagtatttttaatagtagatgtgttgagtgtcttatccatatcctttttaccgaggctggtgcacccagcccttgagatgccgagtacattatgttgcattcctcccaggggtggcacacaggcaatgactgactcgtatgagggtgtaaacgtgcagctcccttgcctctaggtgggatgtgggatctatgccagcactgtccaggataaagtcattaaatctagaaagtttacatggattcaatgaattcctctattcgaagtcttactatgtttaatagcaaaacaaaatagttacctaatgcagttcaatacattttgatatgttgttatgatgaagaaacatgaaaattctaaaaatgcccatttgttgattacagagcaattaagttttaaatgattcaagtgagtctaggaatgtaaatcttaaccattgcagaagtgaattaaacatgtttagagaaatcacaattagtcaaaaaaggtaaggtagattattctaccttaccacagggctcaacagggaactccacagggatcaagctcatctagatgccaaatctttgccagctccttcctctgccccatcctacatctctcactcccttacaggtttcccctaaatgcattcccttaataaatcatgggacaattattttcatctcagcctctgcttctgggaaacccagctaacaatatcgaatatggaaacatcaaacccctgaatataaccagggctgcctcttacttaaagactcatgcgtgaaatgacctgaagtgcttagaataatctaccttaccttttttgactaattgagatttctctaaacatgtttaattcacttctgcaatggttaagatttacattcctagactcattcgaatcatttaaaacttaattgctctgtaatcaacaaatgggcatttttagaattttcatgtttcttcatcataacatcatatcaaagtgtattgaactgcattaggtaactattttgttttgctattaaacatagtaagacttcaaatagaggaattcattgaatccacttaaattttctagatttaatgactttatcctggacagtgctggcatagagataaacatttaattgatagcttattttatgaaaaatataacatggcaaaggtttacagttctgtttaatctcagcagtggcatgttaagaagacaaacggagattaggaaacattttttctaaataaaatacctcattttatgtggtactgataagcagtatttacaacatgaaataaattattcctcgtatacttattgaataccttaaaagtatgtgctaggagctgggaacccagagtaaaatataggtcttgttcctaagaggatacgtctattatggggagatgaaaggggggttaggggcaagcacagacttgtaaataatctatgagtaaacgtctatacaccagatttgcctagaggatggtgtatttgcgtggcaggacattgggtacagctttagcagtgaaaagagcaaagtgcaaagagaacctagaagaatgcaccactgggagctgactattattattttcattaaaggtgagtattgcataactaaaatatttcagctcaatgacctagttaaataaatcgttgtaataaataaaaatgtcttcctgtctttatgtaactgctcattttgtgaaaagcataacttggctgcacaccttttttccgccttcttctgataaattcttggagtccaaaaggtatctttcatttagtagatttttcaaaatgtttatattcatagcaagttctggtttgggtcaagcaggtggtagaaatcataactgcctccagaaatcaggagggcccacgcagtacaggacttggcaggccctggtggcctaaggtcagccagagtgcagatgcaatgcagcaactatagtaccagcattattctagaaagttcttacttcttggaagtactgacttgtaagtaaaagagcattttaacttgatcatattcactctggagtcttctacatctgaatctaaaggggaactgtattcttcctgcaaatttgggattctctaaataaagttccagggcaccagaggttccactgggttagacctttgatttattttaatgaagagcccttcttctttgttgatgtctgacagcacattcacagtgatccagtcatttttggggtaagatagaaggaatccaggtagaatacaatataaaaatgtctcaaactaggcaagagaagagtctagtcctgtggtaggtcatatttgtcaaaatatttgctaccctcttagctgttcatcctcactgagcctctctcttcaaaagattatccttcatatcccaacactgtgaggcttgagcacgtgctttgctttgaacaatgaaatacaagggaagcaatgtaatccatttctgagccaaaaaaattaagagccattgagtgattctgccaggcagtctcctgggtcatctccagaatctggagtgcagagccacagtgacccataatggacattgtgtaagcaagaaataagtatttgttattcataaattaccagtgttttgggcttgttactgcaacattgacccattggtagaaacaactcagcttctggttaatagggtattattttaaaatccgctatgaacattcatgtatagtaagtctttgtggatggacacaggctttctatttctcatagataaattttgtaagcaaatggcaaactgtttacaaagtggttctatgatttcactgtcccactagcagtgtatgagactttcagttgctccactttcttactaacactttgtatgacagcatctttttaattttagtcattctaatacatgggtagtgatattgcagtatggttttaatttgtatttccctaatgactaatgatgtgaaacaccttttctagtgcttatttgccatcccagtttcttatttggtaaagcgtctgtttatgctgattttaggagaatagtttcttttcttattttcagattttgagagttgttggctcatatatataggcatatatatatatatatgtacacatatctatatgtacacatatatatgtgtacatatatattagcatatatgtgtgtgtgtttttcttaatacaaatcctttctttagatatatgatttttcaaatattttctccaagtctgtggcatgtcttttcattcttataacaccgtctttcaaacagcataaatattttacttttataaaatctagttatcaatttgttcttttatggattttggtgtttgtgtcatatatatatataaatatttgcctaactcaaatattttatcctcttttttaataatttattttttagtttaggttttatgcttaggtcttataaaaaatattgagtcattccatctatgagcatggtatatctcttcatttacttagtttttaaatttctttcagtattgctttttagttttcagtgtataaatctttcatatttcttgcacttaggaaggcattcagctccttgatctatgagtttaaatttattctcaccaaatttgaacgtttttcagacattacgttctcaaatatttttctgcctctccccctctttcaaggactctaatgacttttacattagaccacttttctgggaacaagttccagactggaaaagtggtctaatgtaaacgttgtctaatgttccactgggaacaagtactgtgtgtagtgctgaccattgttaccccgaaatcttgaaatcttgtgggtagtctttcctcaaccttgggaagtcagtactcaagtgaatactcactgggatcctgtacagatcttcagagttattgctctctgaagctgttttccaatattcttttctgtgaactcaaattgccttaatcttcctggattctcagcaatatctcctcaactcagaatccctgggttctcctttcctgtaccaaggattgccaattctcacaagacaataagttgggttacgataggactcatctcatttgtttacctgcaccccaaggatcactgtcctttgttacctgacattctgtgtcttaaaaacggttgttttgtatgttttggctgttttttgtttgttcttttttttgtttttttgttttggttgttgtttcaggttgttgaggataattcttatccctgttaatccattttgacagtaagtagaaataacaaaattcacttataaattagtatatatattcttggttcaaggagtaatgggctaaagtaattttctccaaattgtgttatttgtcttggccacatcattaactagcaaacctactcagttttaataaatggttgctttgccaaccattttttttttttcaaccagcccctctctgttttaaaaagaaaattaagctacccactttctgtttacttacatagaattccactatttaggcttttgaaaatagcccttctgacttgtaaataacttatttgactctgtgtgtgagtcactcacttttatgtagcttgcattgttaactgcatcttccaaattgaattctggtaatgctgataaactgttcaaataggtcttttgtatgtttgcatcagagaaagttttatgggtatgtttggtataattaagtgctttttctctgtgtgtgtgtgtttgtgtgtgtgtgttttaaataacatggcataatgctaaataatccaagcaggaataatttgtttttattaagtcagattgccttctgtacatatgttggggagtaatttagtaggttatagtttcagtgtaataaaaaatggtggggttggggctggtggaaatgatgcctttcttctgtgcctaagtgataatgtaaacataagtcaggaactaagagtatctgtctgggaatatataataggatcaaacctaagcacaaatattcccagaggtagatttttcttatgctgatttagttatgaactggtaaatttgttttcatgactcaatttctacaaagcaaactttattatatatatatatgtgtgtgtgtgtgtgtgtgtgtgtgcatttttaatgtatgttcatttttttctgttgattttttaaattatgttcattacataagttcctaactgatagcattctcatcgtaaacaggtcaaactgttcagataaaataaaattcccttatatcaccttcttatctccagctgatttctttcccagaaggtaatcactgaaatgagcttggtgtgggcacctctcaatggggaccccaagatccccttctgtaacatacctgccacttttgaggtttgaatactcatgggctgctctccccttttcaaatgcctatccctgcaccatgattttctgttttagtcagtcctatatgtcatctatctttcactgatttctctcatttctggtcatcaagggcacccctttttattctatcatttggctgaaaaagtggcaaacatgaacactgacttaaaaaaaatactccaaaaataatttgagtttagagcaaaagcaaatctatcattggttaaaattttttgtgtaggttgtataacaaatttaattttcatgaatttctaaggttgtgattttacatcatttgattttagctaatagtttaattttatggtaggtttcattagaggagataaaaggctttggtttgcttcgtgtctctggaaaatttattaaatctccatagttttcagaacctagcaaatggtaagcttgtttccattctaactttatgagatgctttgtttcttgtaaagtgaattttgagagtgctgtgtgctttagcatcactggaagctgaacctcaggtagtagcccttaccttggtgtatgagagtctgcatgagtgctgtgtgctatagcatcactggaagctgaacctcaggtagtagcccttaccttggtgtacgagagtctgcatgagtgctgtgtgctatagcatcactggaagctgaacctcaggtagtagcccttaccttggtgtacgagagtctgcatgagtgctgtgtgctatagcatcactggaagccgaacctcaggtagtagcccttaccttggtgtatgagagtctgcatgagtgctgtgtgctatagcatcactggaagccgaacctcaggtagtagtccttaccttggtgtatgagagtctgcatgagtgctgtgtgctatagcatcactggaagctgaacctcaggtagtagcccttaccttggtgtatgagagtctgcatgagtgctgtgtgctttagcatcattggaaggtgaacctcaggtagcagtccttaccttggtgtatgagagtctgcatttccaccttcgaagattctgaaaaggaattaaaaagtagtgtcttgaatattggataaacttaagattacaagaaaacattctggaacatgactttcctcccgcttttgaagtttttcacttctttttctctagatctttttatagatgttcagaggcattttaggttgaattattatgtgtttaaggaattctaagataataattaccaggaaattaactcaaattacataatcatgtattcgagataagatacgttgtattgttgtggtaggcaaaaatgccatgacccagcagaatattttaaaattagcaatgtattttaaatacttgaacgctctctttcatttcagaagctagcctgcacttaagtcagaaaacaaaagctaactgccacagtgaatgaaatactttaggaagagaggagagaaaaacaggcttttctcattctgtaattctgagtgttctttaaatgtgtcagaatatttgctttgtccattttctgtgtcaatttctacttctttcttcttgctcagaaagtttcataatgctccctctaacataattaagtcatttatctttcctccctctcttgctgtttacttccttgcttccttccttctctaccacttctagtttacatagtaagggacttctttggcttttgggtagtaatttaagctccaaatttcagtttcatgttatgtaaaacacaaatgatacttaccgtatttcacatggttgttatgttgaggactgagccgcattatgtgagaaggctaaacatcatgtccttaatactgaatatatgttcttttccccttttccccttttctttcttctttgctgtcccactctgagactcctttcttccaactctgagatgtagttttaaatcttttatgaaaaaaaaaaaccttatggagaaagggagaagaggtggattcatgagcaggaggagaatgataactgaacttttggcatcagcatttactatggctagtcaccattttaagcctgtcactaaatgaagttatattcatttagtctcattacaattctatgaaagtgctatcattatgtctattttatacttaaggaagcaaagtcttagattaaggcaagatcacatagccagtaagtaatggggtcaaaatgcagaccttaacattttggcttcagactctgtactttgagttcagccggtgtttgtggactttgccttaccttcctttctttttttttttttttttttttttttttgagacggagtctcgctgtgtcgcccaggatggggtgcagtggtgccatctcggctcactgaaagctccacctcccgggttcacgccattctcctgcctcagcttcctgagtagctgggactacaggcgcccgccaccatggccggctaattttttgtatttttagtagagacggggtttcaccctgttagccaagatagtctggatctcctgacctcgtgatccgcctgccttggccttccgaagtgctgggattacaggcgtgagccaccgcgcctggccgatttaccttccttacttaaccaatcatgccactagcttgcactggcctcaatacccaacgtttttcctaccttagggaccttttcctaccgtggggcctttgtattctctattccatcctttctgcaatttttccagatctttccagctcagcaaaattgccatctctccacattgccttcttcactctattcaaagtaacgaagggtacttcccccaaagcaactgatgttcccgtggcttgctttattaatcacaataggacatgatcttctacattaggttttcctccatgttttctggcagcctctgaaggatatgagccataacagagcatagacattgcttttttctttgtagcttaatctccagtgcctagtatcattcccagcatataatatgtttaatgtgaactgaatgagaaaactaaatgagaggcttaattttatacagcagtgaaggtatgtcccagacttataatttaaggagaacttactctctagaaatgtggagtagctggacgtggtggctcaagcctgtaatccaagcacttcgggaggccgaggtgggtggatgacttgagcccagaagttcgagaccagcctcggcaacatggcaagaccccatctctgcaaaaaaaaaaaaaaaaaaaatacaaaaattagccaggcaggggatgcgcctgtagtcccagctactcaggagactgaggtgggaggatcacttgagcctgggagatggaggctgcattaagcagtgatcgcgccactgcgccccagagagagagggagatgcagggtaattgatttgtacctttactttgaaatgtttaataattagtgattttctcagtcctctctttttctcatgggcccctttagtaaatgctgatggacaagattcacaggccatactttaaagccattgatggaggtagattttcttcccagggtgcttttttggcatggagttggctaagaatgtccttaaaggccatcatacataggtggaaagtagaaatcagttcaaagaaagactggcagagcagatcataagtcaatacatgaatcaagttggcctgtatcctaccaagtacaatcttttgtttagtggtgtatctactaccacactctcaaactcctaatgatactttaaaattaaccttcatgctcatttttataataatgttgaaggtcaggcaagagataatatcctcactttacaggtggaggaactgagtcaaagaagtacaggacttgtataaagaaaagctagtctatatgatgtctctaaatcctgggtctgaactactttaacgatattaaaagcttgcttgacataaaattttaagactgttacgattagagtgaatgtcagtgatatatgtgtctaaggaatttgataaatatacatgagatgctctaatgaattcaattgcttggaagtgaaggggaaaatgcacaaatttttacttaggctcatgcttttcatgtagaaacaaacattgaaatttggaagtgaaaaatctacctcttatcttgggtatatatgctgcctatatatatgcatatagtaagatgtttaagtttttaaaattaactgcattgttgagtatttgaaatacacatctgttatttgttattgaactttaaaatgatatatgaggatttaggtaaatactgtctgtctaaaattaattttggaaagtaactcataagatgatattttcaatacagttttgccagcaattattaaatatgtttcgagaagaaaattgctattcaaattacccatctcatccttggcactttctaaaaaccagacaaatattttttagtttgtgaaggctgctcataacagttacaagctaattaattataaaagatttagccatgcatttgaccataaaatagattggttgtggctgctggattatagttttagatgattttatgatccatgtattgccttgacttactgatgatttaaatgattgtgtgtgggtgatttaaaaagcaataagattaataaaatatttattttgggtaaaggtacagaatatgttttgaataaataaagtatggaaaaggtatctaaattcctcatacatttttaaaatcagttaataaatagtaaacatgcaagaagctcattaactatagaaatttagcctattaattagggagtgttcatttttaaccactatgttcattttctagtctagtacataatatttttcacaagtcttcagaacctcatttttccttttatataataatgactctccaaatatctttttgtttcttggtcattatttatcttttaataagacaataaaaccaataataaaagtgtattcctatagccaatagccaagaatcaaaatatgcctttatgggtttttcttttcttttctttttgagatagagtcttgctctgttgccaggctggagtgcagtggcacgatctcagctcactgcaatcgctgcctcccaggataaagtgattcacctgccctagcctcccaagtaactggaattacaggcacgtgccaccacgcccgggtaattttttgtatttcagtaagatggagtttcaccatgttggccaagatggtctcgatctcctgacctcatgatctgcctgcctcggcctcccaaagttctgggattacaggcgtgagccaccacgcccgaccacctttatgttattttatttaaccttcaaataattatataaaattgatattatttctttactccaccaatgcttattgggcaactaacaactatgaacccttctgagaatttggggtacagtggcaaaataaagttgtcaaagggccctgtccccttggggatcacaatctcaaggcggcggggaacatccggaaataagatagttatagttggtgatgcattaccagagacatgtgatgccataatagtgactaacccaaggacagtgagttagcttttgttgcataaattacccccaaaatttagtggcttaagacaactctttgtttaggctcatgtttcggctatttgaaatttggggtaggcccagctagctgtttctgctgatgtacgtcagactaagttcagttagaggaacttataggagagctgtgaacttccagatgagtcgaagacaggctgagggtatcctcaactgagatggcttatttctgtgtcacatggtggtggtagggatcccaagtacagcacgggtcattagtaaagcagacgttctggccttcatttcattcttttgagtgtatgctgtataaaaattgaccaaattatccacaaatcttcctgtaccacttgtcaaggttgaaaacccaagaaaaaataagattctttctatcactggagtgatattactgagcttttcagagtctattctcatgccaagatgtatgtttgttaaattttgagccggatgtggttttcattcagaaagtatttgatgatgacttctcaagcaaggaataactataatagcttatgtgcttttgggatattttaggtaagggtgaaaataataattctgagaaacatacaagtattgcttttttcttcacattccctaattttcttcttttgtacattccacggaacaatgccttctcatatattcacctgacgtgttgaacatcaatataggattgaatgaagcaaaaccttatgtatgagttacactggagaaaatcaaataactatatatttttttctggcattagaaagtcagaaagatatacagaattagtgccaatgactgtatcagttgttcaatgaagagaagataaagaggtcatatagcagagaattgtatttgtatactcttgtctataaaatttagaacattttggttgttgtttaaatttatataagcttgttttattcttggtatatgtgccaatatctaccctttaaaatccatgccattcaggtagctcaaaggatatactcaactctgacatttgtaataagtgaataggctaacttgctgcaatttgataaaaacagaagcacacattaagttaaatatttgtggagatttgggtgtgattcacaaaacttttctctcattttatttttcattaattcattcaaccaatgcatactagaagtgtattatttgttaggcattgttttcggtgcagggaacactgataaataaacaggtaatgttactgctgcctttgagcttctagtctattaaacattagatggacaagtcagtctttctactttttagaaacaaccagcagataatatttgttaacaaaagtcatgatgtaaggaatttactaaaggaattcagaaaagattacatatttttctggttacataatataagaaatttactgaaagattatagaaaagattatgactaaactgtatccagtattttagtgatttgtttagcagattattaatttaggtaaaggtcattttgattggaaacatctatcaaatcagtccatgaggtaaaagaaagcaaaagaaagcagagtctaacaaaggagacagaacattttaataagagatacctttaaattatattttataccatacgaattggtctctttgtttgagaattcaaatattttacagccaataccacatacatttacattcggattctatatactcttctagtttctagttatatacagatatttcagataataagaaccaaatcttgcctcaaatgctaacatcgtggatgacaacatagagcctactgtaatccattatgatatgagcaatgatggtaggtttgacagctgcatagggatcacaggagaaactgtacctgagctgtacctgtatcaaacaactacataattttttctgtcattgggaagtcagaaagatatacagaatcagtgccatacctgagagttcaactgtgtgcaaatagctcacaccgtctctaagtgttttatttctataataagaaaggtaagatttaccaaactctttcttctttatttttattatacatcctttattagtgattactagcccatgctcaaatgttagcttgcctcgaatcaaatcctagagtcactcttaattatttttatggtattaggtaagtgatttcacctccctaagacatagtttcttcttccataatatgagatttatgaggaaggtcctaacttgtagtagggtggtcaggaggcttaagtgaaatcatagctaaaacagttaacaattcctgaaaccacacaagtacactggatatcctgactattggtacttgtattcatacttgcatttataatacgcatttctcagataccccaacagttcatatccagacacccccaatggatacacctgagactgataccaggtcatcatttttcgttctcatgctgccagctacacaagaggcacgcactgtggatccacagacgaaacagacagaggctatgttccattcaagacctggaacagatgatcccttttccacgacaaggaccaacctctgccaaaacaaatcacttggcacaatttctaactctaaattaatgtcttcacttatttgcttaataactccctccatcctcgctgtcagatcaggctaggagagactccattggatgagcagtagactgctcttccccaggtgcctagcacagtgcctgatgcaccacacgctctcagtgtgtgcttgttgaagaaacaaagacacagtctgcccttttcattgaaagcagtgccccaaggcagcgggtccaatccaggtcacctccattgtgccttcccatgagggcttgctcaaccctctcccacctcctgtggccacctctctagagaagcttcttccagcttgccagacagtctagcttggaatgctgaacagcatccctggtccttctgaattttctagctggggaagcaaaatgtcagtctatgattaatcccacacaataggtggtaagaaacataccgatgccatatcttggcctgaggcacaactcttctatggagttgagtttcctgtaaattcgtggctgttgattgttagtgtgcagtcttaaggccttaacatgtatttataaacagtcttctttttaaaagtgcaggagcagtgtatatagtatgcggtatgccactattttttttaaaaaagatatatcgcatatatatatatatatatatatatatatatatatatatatatatatatatatgactttttcttgcttgtattatccctatgttttattttattctccaaagttgatattgttttcttctaaggaatgcaattccaaaaaaacaaatattgaaaccaataaagacataaaatttatggttaatagcttcatttcatttgttaaatgtaattaacgtatctttttattactaagattatttaccattttaatgtatataatgactattgcattagattttatttttaaaatgctgttacgcaaacttaaaaccaaaattaccagtgttctatgggacagctctaaatacagtatagctattaaaaatatatattcttaaagtgtgctaggaagaaaaaacacttgacatgaactattctgacatttaaatcttctcttattcttgtcagcactgccacagcaaatgataaaggtggtattaatagccatataattttctgaaatttttgtaacattttttaactcacaaggcagctggacatgtttacagcttgaaatcttttattgcattatttgtaagatattaatatatggatatcatatatgaaggaaataaaatgcataattattttctggcacattgacttgcatttaattaaatagttttttcctacttaagttcatctatctatcgaacatttctatgttctagttattctttgaacaactgccttcttatagataagaaaattttcggtttgctgattggtaaattggtagttactcctccatttttggttcttgttagttttctaacactaggttcaaactcttgaagaaaatattttgttctgcatgcacctttgcagaattcttcgaaaatttgctggcagaatagttgtagaaaaccccaattacagataataattttgccattttcctgatgacccctagagaggaataaatttgcaaaattagtttaattttgttttactcctgtgtcttgtgctttctcatttcctttcctcaagttatagaaaatacataagcccagtacagattcagtcccctcttccactctactctggccagtcacctctcttcatcaatcctggggatgactaaagagaagtagggaatatatgatccttccactgaccagctatgtgcagggacatttggcaactgagttgacctttatctggacaatgatagaatgagaacccctcttagaggttaatgtgaagatcaaattagttaatagaagggaagacactttggaaagtgaaccacaaaggccaccagtaggagtagaatactaggaaatgatctttctaaatgccaatctggtcaagtgcttcctgcagcctgtctccaacaatacaaagtatccaagctccttagaatggcattcagatctctaaggatagctgatggcttcttggactgccctttgattcctaagagatactgcccatggtttttcctttcctcaaattcctggtaagacacctctgtcttccttctacacactattcaataccgtcttctctttgacatgaccttttccttccacctcttttcacttctctcttacttgcagggttaggagacacctgctatgtgagtgtatgtaaaccatacttcacagagcaagccttaaaaaaataccagctttcatcctttttccttcccttcctattaaaccctatacagtcatatgtacaatgtattgaataagtatggtgagaaaagaaagtgatatatttgtatttcttgtacagtcttctacaaatctctgaaattagacatgactgtgatttttttttaaaataagtggatgttaggatctgggctaatagggttgggggtctgagggagacttttcattgtatacattgatttgatcttttgaatttttaatcatgggaatatatttctcatgtcaatattaagtaacataaataaaaatttagtataaaattttaagtctagaaaagtcgaatgtaaaagtttcattcactcgcctaatatctaaattatgtgacttacaagcatatggtggagaaaagaatatggctcccattatcaatatttcctcccttccccttgtcctatttctcctccattactcagtagaacactctgacatccttagggttgaagcagaggtggagaggagagttaaggagcataaagattttacttgaaaggcattggtttaatcagtttttggcagctgagcttgacagaaaaacaatgtatttctcagtctggctatggtcccattgcagatcaagagggggctgtgctctgtgtcacctccactctaaggcccagtgacggagcctgcaccgtttctaatgtttccggttactgtggcagaaggaaaaagcatatgacgaatcacacactggctcttcaaatgtctgcccagaagtgacacagtccccttgagctataagttcctggtcaaaacaaacaacatggccacacctaacttcgaagtgggcagagacatgcagtgacccatgtatctaaaaatactaaaaataatggtaaatagcactgataaatattttctgaaaaatataaatcaagagtggaattccttttaatttttcatttagttatagtttgggctgtgagatggttgtgttacacatgaaattcacataattagaaaactataggtgagtatgctttaaccccctgccccaacttcctcctctttctttgttcttgttttcttcccctcctctttcgcttatattttcctctgacctcaccctaaaaacacagtttaacctacaaggtaccagaataccaaaccaaaccaaccaaacaaaaacaacaacaaaaattgggtgccctctggaatgtttggctccaaaaaaaatattgaaatctatagcaccactgaaatgtctaatattaccaatgtggcattaataaatggacagtcgtgctcttttgtagcttttctctctggaaggaagatattggatagtttttgttttttagagacaaggtcttactttgtcacacaggctgaagttcagtggaacgacattggcttattgcagcttgacctcctgggctcaagtaatccttctacctcaacctctagagtagctaggactacatcaccaagccgggctacttattttgaaagttttggtagagatgggctcttgctatgttgtccaggatggtctcaaactcctggcctcagcaatcctcctggaggccttgatatccaaaagtgctgggattacatgtgtgagcccctgtacctagccagatagttcttactgtgacaaggggacaagaagccttttctcagggaggaccaatggcaattctttttaccccacactctcaacaatgattcttccaggaccatttccatttcttcagtctattgcctcctttctcattgagtggcgagcactcttgagacccagcagtttgctctatctcaacccactgtgacaaataggtaaacataggctgggatgtaaggaatggataatggatactggttttagttaccccaccagagacattttaagttaatgcaattgatgagtaaagcaacatgtatggttctctctcaccaggagaggaaaggaatagaaagaatagagaaatatagcctactagtcagtttggtgtttgttccaaaataaaccctaaaatctttgcagaggcaaattgcttattactgtaccgtcaagtgaaatgctccatgaaatatgttctgttttgctagacgtgtttggacaatttcctgaaactgttaaactgctcaatggtattaactcttctccaacaggccattagaaattttagcatttaaaagagagaagagggaaaatacagttggctcagttgagaagcaatctcttggagctggtaattatgtcacatctgtttggagaaacaagttggcctttaagagagtgaatggggtaacaatttaattaaagatgggttagattgcatggaaattacttgctattattattggaggaatctatcaaaatggaccactgggaaagcactgttttcactgtttcttgaggaaattgttcttggcataacagtagaatttaacttccttttctgaatgtaagtttcagccctgctgtatggaggagtgagatcattgcatagggtctgtgcacttccccagtttctgttttcttcctttcttactcagatgctgttcttttataactttgtttaacataacacttgagccaacatggtatgatctggtttgtggtcgctttctttggtttgcaagaattttggaaggtattatttgcgtttaaaacaaactatttgcctattggccatctggccagtaattccagcatagaattctaagctctgtgaacttgaacctaactcaattgaacttgctaatctaataataagtctattgccccacctcaatattaccagtgggatggtagaaggttttataagcacctcagtttttttctcagtgtgaaatcatctatatcaatctttttggtgctgtaccctatactgaacatggaaattccaccatttaacgtgctaaacagctagcaaagaactattccatagatattgaacttgaaaactatacattttaataagccaaagtacatcaggaaaaatcagagctttaatgaagctacaattgtagatatgttaaaaaagacaccaagttcattgtaaatgaatttccatttgttggttgattatttatagggtgaattgccaaaaaagatagagttaaataatcagtccatctaactgaccttaactaatgtaaaattactttctgtaagcccaggttagttataaaaagattgaccctttaccgcagtttatctgatataatctcagattaattaatcttgattagtttgttatttgcctcagatttttaattttaaaaggatattattggaattgtactttttaaaatagttttaataaaaatattacataggtctattcatataataaaactatagtagaaccttgaacaaaatagaggtgaggagagctgactctttacatagtcaaaaatccacttataactcttgactccctaaaaacttaatgactaagagcctactgttgaccaggagccttaccaataacatagtcaattaacacatattttgtatgctatgtattgtatactgtattcttacaataaagtaaggtagagaaaataaaatgctactaagaaaattgcaaggaagagaaaatatatttactattagttaagtggaagtggatcatcataaaggtcttcatcctgtttgtcatcacgttgagtaggccatggaggagggggcatgggaggacttggtcttactgtctcagggatggcaaaggcagaagaaaatcagaatataagttaatcttgcaactcaaactcatgattttcaaggatcaactgtaatttcttagtaataaaccctttagtctcacaagtgtcatgatttgaacaacaaattgtatggtcacgttggtcaccctaggtagaaatttgctgatttcagcaaattggaagttactgcatgattgtcaggatctgagaaagcaactgagaagtaatagttacaataagttacaaaccttttaggacggtgaacattttaaggcgtatgttttctccatgtgtcacaaccaacagtaaacaaagatcaaaatcatggtagaaaagcaggatttaatggacatcagagaaattgcagatctggaatacaaggcaataaaaatttacaacaaggaagtggtaagccagagagagctgcttcatggtggtaggcccagggggattggagagagtggtgccagaaagttggatagaaaagttaatgcaacaattataaagaagataagaacgtagtatttgaaaataaatattttaacaagataaatataatacaaaaaatggaataagaaaaatacattattatcgaatattctgtattgagttttggaagtttatgtgtctccttttctaatgccatgattttgcaatgcattattgttagtaatttttaggtctgcctatccaaattaggcttttgcagcatctaacaccctccaccctagctcacttggtgggtgagcctccaatgactacacccaaggaggatttaacacagggattttatgacttgcaacaagtcaggaggacatggggttggggtagttcagcagtgcctgtctgaacaaaggtgaaaattgggcttttattgggctgatcaagggggagtaaaggcagccaggagcagtcgcctgtcatgcttctacctatattgcatgtatagaaaagggaaaataaactccttcctgggcagggttttagtatgctaaggaggggagttattcaacttcaatccaactcaagcatcagcattgctgcgtccatcccagttttgttttgctggggctgaacttcttcctataactttttgaaacaacaagaactcaaggtgtgacagttacaagtgggccctttttcacagtgtgtacctaaacacgtgaggaccctggattacagaatgacagactcgaagtgactcaagttccggttgttcatctttagatggtaaagatggctgtacgtactatccttgcttatttccaatctattgtttaaactcttgtatatgtaataccgcagaggctagagatacaacctttgaccaaatgagtgaattcaagtaatccattactaatgtgatctggaaacaaacatggtgttgaatgtgcatatgtcagttctatgttgggagttcactataagtaggagttctctaaaagcacttccacgtagaatgcaatgattatttaaaaataagtaataaaaatgtgcaaatttaaaacatgtatatgctttgaattatatatatatatatgaattatattttactatgtatacaatgaaaactgaacagtaacctcagctattgtataaaagtgaaaccaacaaaagattttttggggaggaagattattttactactgacataaagaattgccaggaaacaatgacagcaaacacaaccaacttttagttgccatttaagaaaaattctttcagataatgcattcctttattacttgaacggagggcagaccactccgtccattctacccttggcacacatcacttcctaaactgtcttattgcttttaattgtatattttttcccttaatttcaattaaaatctataattcattagctgtcaaaacctgacctgtttgaagtagtagcaattcaacattaaacctcgactagtgttgaataatattttggggctttgtgttgtatgctacagagtgaccccccacaagttccttgcccatgtgtggctagacaatggaaatagttccgtgcttcaacatgttccccaaacacattccacaggagagcgcatccgagcatcaattcttgtaagacaactgggaaatgaagtcataatttgagctgaagcaaggaagattattaaatatattttccatgtgctttgaaaatatatgcaaagtaaagcaatcagtgcttgccactttgtttgtattctaaaagaaagctagttaaggtttttcatcaaactgtattcttctttaggcttataaagtaccatgaagaggaggtaaagagagagtggatatttcagtggctaaacccaaagttttttagcatttagactatggcaccctctagaaaagcaatttaaaatgtgaaaaaagagaggtcagttaaaaaatagattagatagataggtagatagatggataacaggtaggtagacagatgattgataaagagataggcagatcatagatagatagatagatagatagatagatagatagatagatagatagatagatagcatgaagatggttgaggtgactacaccctatgcttccttctgaagtttcgggaataattgttcattttccaagtgactgctcaatacaacattgctctgttaggtaatttaatgactggtgtaagtacaaaaaacattgccatctgctttgtttcttttggccttaattataatgttatcttcttttcagaggctatattgtgaaacacttattattcaccattatttctggcagtgattataatttatgaccaacagtgcagcactgaataatgtcttgattgattgactgattaatgtagattttgtaggtgataagggacaaaaagcctgagaagattttctggaaatgtaaaagtaattttattttctactatgtttgatgcccaaagatcactgtactgataattttagtgaataaagtgtcaactataacaaggagcttgtttattctatcaaccatgtgatttcaaaactggagcttgctttcacttttgaaattttccataagctaaatctaatcctctatatttacaacgaaattaattttctgagttatttattttaggataactctgatctttttcttttctttttctttttttttttttttttttaagatggagtttcactcttgttgcccagactggagtgcagtggcgcgatcttggctcactgcaacctctgcctcccaggttcaagcgattctcctgcctcagcctcccaagaagcagggattacaggcatgggccaccacgcccagctaattttttttttgtatttttagtagaggcgaggtttcgccatgttggccaggctggtttccaacccctgaccacaggtgatccgcccgcctcggcctcccaaagtgctgggattacaggcgtgagccaccgtgcccggcaaccctgatctttttcaaactgcaatttaaaatttactgatcacacagaactgaattgatttttaattgtcattctgaagaagtaattaaactttaattactacttctgaaagagagggtttttactaggactttttctgacaggacaataatttcattttttgcaatttttatttataattggcaaataatgattacatatgtttatggggtacaatgtgatgctatgtgtatatattgttgaatgattagatcaaactagttatcatatccatcacctcacacactaatcattattttgtagtgagaacacttaaaatctgcactgttagcaattttgaaatatatattattattaattatggtcaccatgctgtgcaatagatctcaaaaattattcctcctgtctaactgaaactttgtaccttttgattaacatctctgtctcagcctctggtaaccaccattctactctctacttctgtaagtttgatttttttagattccacatataagtgaaatcataacagtatttacttatctttctctacctggctcatttcacttagcgtaacttcctccaagttcattcatgttgttgcaaatgacagaatttgcttcttttttttaaggctgaacagtgtatatatacatacaaaacatttctttatccattcattaactgatgaatggagataaatatatataaaacatttcttcatccattgattaactgatggacacttaggttggttccatatcttgcctgttgtgaataatacttcaagaacataggagagtggatatttctttaacagttgatttcaaatcctttggatatgaacatggaaatgagattggtgaattctagggtaattctattttcagttctttgaggcatatctatactgttttccctaattggctatactagtttatattcctgccaactgtgtacaggggttccctttactccacattctcgccaacgttcgttatcttttgtctttttgatgatagccattctaacaggtatgagctgatatctcactgttgttttaattttaatttctctgacaattagtgatattgagcattttttcataaactggttgaccatttgtatatctactttcaagaaatgtctatttaaattctttacccatttttttaaaaaattcgattctttgttttctgctataagattgtttgagttccttatatattttggatattcactccttatcagatgtgtggtttgcaaatattttctctcgctctgggttgtctcttcagcacagaaatggacagtcgcacgttaccacctgtatgatcattattttaaacacaagcaggaaaagcttttgggttccaaagtttcagtcattatgattgaaaaactgccaaactggtagtgaaacatttattggattggggattaagctattcattcttttcgcattaaaacaatgatgtagttttattcgtaaatctataaagttaagtgcacagtcatcacttttagtacgttctgattcattgaaatcctgtaaaattttatggaaaaatctgtgtaaacaagctttaaataaggcaatattccaataccaaaactcgggatttaggcataggtgctatatttacaattcttaagtaattttcatgtatttcacatatttttaaaactcatgttacaaaatagcctaattctctttactttctgtgtatgagggaggaattaacattttgtaatataaacctcccaaaagttattcagaatatttctaaaataaactgttttagattcttggagaaattctgtgatgtcaaaatctctttcctttttttaaacaataaaaaacattgtggctttgtttttttaattgataaataataattatatacatttatggggtgcatttatggggtgcaatgtatacatatatcaaattttaccccatattgtacattgggtacaatctgtaccctcataatacaaattgtaccccaatgtacaatatggggagcaatttgatacatgtatacattgtggaaggagtaaatccgactaatatatccattacctcacgtacttatcatttctttgtggtacaaacatttcaaattcattctcttagcaattttgaactatacgttattattaactctagtcacctaatgtttaatggatcaccaggaattattcctcttgtctaatggaaactttgtaccctttgaccatcatctccccttttacctcccaccctctcccaacgtctggtagctaccattctacttcctacctctacgagttcgaatttttagattccacatataaatgagatcatgtaatatttgtccttctgtgcctggcttattttacttagtataatggcttcatttttttaaaatgtttaaaccaaaggtttcaatacataaatctagacacaaacaagtactgtgtgattccattttttataaagttcaagaacaagcaaagttgatcaaagacaagagacaagaaactttcagtagtgttggacatattctttaatctttgtggaggccacacagggatatagatgtgaagaaattcactaagctatgcagtcagtattagagcccctggatgtacatgtgttatgcagtaatgaagggcacacacacactcattcattcacacacagcaaaagcaatctatgaagtgacaacacgacacagtgaacactgttttcatggtaaagttgcaataagacaaattacattatttttacagtataaacaattatattcaattaaatgcacgaagtgtgctagaatatattggataattcggaacgaatacctatactgcaggtgctgaagccaagagagaaacatccccattgaagtattgtaagaattctgtcccccctgccagttgctatgagatatcactgaaatatggtagtgttttctaaaatctactgcatgaggataggacaaacatgctttcagtgaaatgataaaacgctaccagaactaaaagaaacaaaagtggtcaggtgcagtggctcatgcttgtaatcccagcactttgggaggccaaggcagaaagatcgcttgagctcaggagttcaagaccagcctgggcaaaatagtaagacctctgtctctattaaaaaaaaagttaaaaataacaacaaaaaattagctgggcatggtggtgtgtgcctgtagtcccagctaccaggaggctaaggtgggaagatggcttgccccagcaggttgaggctgcagtgagccaagatcatgccaccccattccagcctggacaacacagtccctgtctcaaaaaaatcaaaaaagaagaagaagaaaaagtattttaaacctgtcattaagaagaaaaaagatgtaattacacacttagggaggccagagtgggcagattgcttgatcccaggagtttgaaaccagcctgggtgggccgggcatggtggctcacgcctgtaattctagcacttttggtaggccgaggtgggcagattgcctgagctcaggagttcgagaccaacctgggcaacacggcgaaaccctgtctctactaaaaatagaaaaattagccaggcgtggtggcgtgagcctgtagtcccagctactcgggaggctgaggcagtggaatcacttgaacctgggaggcggaggttgtagtgagctgagattaggccactacactccagcctgcgctgggcaacagagcgagactccatctccaaaaaaaaaaaaaaaaaggaaaaaagaaaccagcctgggcaacatggcaaaactccatctctacagaaaaatacaaaaaaaaattagcaaggcatggtggtgtgcacctgtagtcccagctactcagaggctgagaagaaaacagattatctaccgtaataaagcaagaaacccaatccctaaacaatactgtgccccatagagtaaagccgtttcatttctcttttagtactttttctaccctaacaaagaaaattgtggctaaaagttaaaacaaaaacagtatctttttgctagtttcatgatatatcttgtatgtatgtatgggtgaatattcttatattattatttttggttcatgtaaagtaatttttccaagtgaatatctaagaccaatgcttctgaaactttaatagtcatacaaatcacctgaggattttgttaaaactaatattcatctccaggagttcaggggttaggctaagattctgagtttccaataagtacccaggtgatagtaatgctactggcctacacactactctttgagtaataaggtcttagattaaagtggacttgggcccactaacattgattagcttatgacaggaagacaaaaaacaaaaacaaaggaacaaacaaaaacatagaaggtaaaatgttaaaatcaaggcacaaagtattgctgtatggaaagtgtctgaattttcaatatattcagccctggaggaagagcttcccactaccacttatttactgtttctgttctaaactggctataatagcccttcaattatagagctgtttcagtaatagcatctgcttcattataacagcagttttattaaactaatagttgttagcatgaagacaccattacagtaaattacatttataattatggctctaaatatactcaggttgcatacaattattaaaaatttccaccctaatcatttacctttcctgaagctttcctcctatcacatagatgctgtgagcgtgtgttagtgtatgcaggcttttctatgaggctgctttcctatatcccatacaattattcaaactgatgcctggtgtatctagaaatttgtattcctagctcagagagcagctaattagaacctccttcccaatctctacttcccacaatctgggtcatttccttgtttagtgccttgatcagaaataatttattgtctggttgtgcatggctttgagggaggcacaatataaagaaaagttcatataagaaatgtgcacatttaacatcaatgcataacaaacaccccaaagcatagtggcttcagctaaaaactgtctatcattgcatttgggacagctgggagtgcttatctagatttggctcagctgggcaggttagttaaggtggctctgttacacagtgtctttattagtctgttctcatgctgctaataaagacatacccaagaatgggtaatttataaaggaaaaaggtttaatggattctacatggctggggaggcctcacactcatggcagaaggcaaaggaagagcaaagtcacatcttacatggcaacaggcaagggggcgtaaggaggggaacttcccattgtaaaaccatcagctcttgtgagacttgttcactaacatgaaaatggcacaggaaagaccctcccccctgattcagttacttcccatcaagcccctcccacaacacgtgggaattatgggagctacaattctagaaagacttggtctgggacacagccaaaccgtatcatcatctcacatgtcccctctgagcccaggtcctcctggcagtgacccaagcacatgagaacacattcaaccatgacagcacatttcaagcctccgcttcattgcttctgataatattactctggccaaagccagttacatagttaagctcaacttgtgttaattttgcccacaatgaggccaaagcaagtcacatggccaagatcaacataaatggagcagagaagtgtcatctcctatggaagtgaacagaaatgagtgatcatttcagaacaacaacctactctatcagagatagtttcccttttatacatgtaagtacaataatgttgaaagtctctgagtttattttcataacatgctaaatagccacagtcttatttagccaaattacaaacattggaattgcatggtttcttttagaatctaaggtttttatagaaaatataacatcatatatatatatatatatatatatatatatatatatatatatatatgtattccattttgatgctatatactactagtcagtcacctgtaagagtttttgactaaagttttcggcaagatagatatagttgagtcatggtcaaggtgaaaagggtattcactcaacaagaaaaccatccatcaaagatttcctatgtgccctttgttacggctgtgcagctaagtacaacacagttccaggctttacagttcttagagtgtttacagacaaataagtaagatgctcaatatgaggtggtaggtcctgtgtactgggtgtatgccagatttcacaaggagtgagtttaaccactggacagcagagtgggtgctagagctgactcttgaaggatcagaaaaaattcaccacaatagaggggttgggcgttccacatatagagatgacattgggctgcattcggggagcccacaagtaatggcatagaagtgtttgtgtctgatatccccttccagacatcccacaacctaaagagctagacactgagggggcctgcatggtgagcctagagccaactcaagatgcaggaacaaaacagaatttattggaacatagaaagatatgaaacaacagtagttgctctgagaggcgtcgtctacatttgaaattgctgggtgttgtgctgaacccttattaaccccaataaggaaggcacaagattcaagaagccaaagaagagacccagaggcaacaaatgagacatggggttttattaaggctcacatacaggggagagaggccagtggtggtgagctaaatatgataacctcatagcccagtggcagtgggctgggcgggaaaacagcaactgctagcaatcagcatgcactttatatagcatttccacttaacaccctcccccagtgacctccacctggcaaccttcatattgtaacctaaaactctgggcctcaatcccctgtacggcctgtgttccacaggactgaataggatgggaccggggctcagatgttcctcatggacaaggaatgaatctctggattggctactcctggattccctagttcagaacatacattcaggtgctatacaaggtcattctaaggttatgcttaagttattgctgtcaggtatgtttatcctacaccaggttgataagacaatgatgtcatcagtcagagccacataaacttgacagccattaaaagtttatcttcctggctaggcgtggtggctcacacctgtaatcctagcactttgggaggctgaggcaggtggatcatgagatcaagagatcaagaccatcctggccaacatggtgaaaccccgtctctactaaaaatacaaaatttagctgggcttggtggcatgcgcctgtagtcccagctactcaggaggctgaggcaggagaatcgcttgaacccaggaggcggaggttgcagtgagccaagatcgcaccactgcacaccagcctggtgacagagggagactctgtctcaaaaaaaaaaaaattatcctattttatttgtttttaagataggttctcgctctgtcacccaggctggagtgcagtagcaatatcataacttacttgtcttcattgactaatgaatcccaacatgctgagtttgattgtcaccttttctctcccagcttcagcaatactatatgtttagaattatagaattttttcacagctcacaaaggagcctctcaggggtgggatgtaggataggactgaagaaagaaaaccctactggggagaaaatatcaagtggagactgagtattcatttctactctttgctaaagagtagttaatgtactcacagtttatgttcagaacattgtcagtttcagagaaagatttcattagttcattagtttatctataaatttatccatcctgtacttattgggcatctactacagcagcagtccccagcatttttggcaccagagatgggtttcatgaaagacaatttttccatggaccagggcagcaggttgggagggctgatggtttcaggatgattcgagtgcattaaatttattgtgcactttattttattattacattatagtctataatgaaatacttatacaactcaccataatgtagaatcaatgggaaccctaagcttgttttcctgcaactagatggtcccatctgggggtgatggaagacagtgaaagatcatcaggtgttagattctcataaggagcatgcaaagtagatcccttgcatgcaaagttcccagtggggttcttgctcctataagaatctaatgctggggccaatctgacaggaggcagagctcaggtggtgatgggagcaagggggagcggctgtaaatacagatgaagcttcacttgcttgcctgctgctcacctcctgctgtgcagcctggttcttagcaggccacagactgatagcggtccatggctcaggggttggggactcctgtactacagcatgccagacaaaatgcccactgaggttggaaatgaagcgaaaacagacacactccttgctttctcggtagcttacagactggagagtaagaagggcattcctacagtggtgaatactatagaggagtagtagacaacgtgtgtgagtgcatttagtatggagctgggagacatttatgggaggaaagataaggaaaaacttctccgatgaagggactttaatctgacatcagaaagaagagtagtagcaaactaggtaaacaaggatggggatgaggaagtaggaggtacaaaatacaaaacgaaacaaagcacagaatatctcccagaacaaagccctcttcatcctgcctgctctctctcccccatagtgattgacagtttgaggaagggggttattcttagggatcagaatatttttgtataactgcttccattttgtataattgcctagtttcccagggtaaataaaggcaggagacacattcagggccaaatacagaactctatattcttacttgagaaacacaccaaaatgatatgcaaatattactatgtagtatttatgtcttccttctctccccaaaattcccatgtgaaaataaattttctatgacctatatactgtcattttgcttaatcattttaaggcaatatgaggacatcatgtattaaatcctggagaattcttagttttcagatttcttgttggatatttcctgatcaataatgtgcaaagggagatgatatttgggccagaaccatcagtttaagcgtctctatattataagaaattctgactcaggctacttaatgtagtttcttttttaaagcatgaatgctttaaagttcatgttttagtcaagaaggaattgcattttctcaaacctggcaggcccagaaaaaagctacttagaaaatcacacttaggtgacagaatgataagaaaagtccctttaggggccattagcactttgcctgaagaaaaactgttagtggttcttcctagctttttaacttacagaagcagcactgttggaaagctcttggtaaaaacaacagaagtaaagcagtttattttggaatctcatgttaggaattccagaatatcccattggttaattttaagttagagtccttattattgcaatttccatcataatagacatattatatttgtaataggtggtgggacaaagactagagtttggatatatcatagaaatctatataccaaactttcattaactattttgccagttaaccatggccaactgatttttttttctttgttcacctcctccataaagttagatctaagattcaagtaacaacctatgcacctttttctaacagtactttattaaagtacaatttacctttagtaaaatgcacaaatgttaaatgtacatcacacagaactttaacaaatatacaaactcatctaacatccagatcaagatatggaatgtcaccccaaaaattccatgttgccctattttagctaaccactccacgactaaaggcaactgctatccaatttctgtgggtataaataacttttatttcttttcaacttcatatcagtaggaccatacagtatgtagtctttggggtctggcttcttttactcaaaatctgtgcattttgaggatttctgaaatattaaggatagcccagggcttctgcaaatgtcagatggacatacaactcaatttatataaacactgtgggaagtaagctaatatttgttaacctgaaagtttctgattatcatgaaatgtccctaggcagggactatgttgttagctacacaatatctaagaaaactatcctaagacaaattaaatatagaaataaaatcacaggcaatagcagatatatctaagcttcttatagataagctcatcccaagtactcttgaggtgcaaaaagaaaaggctaattataaattattcttatccatttattgaggctgttcccttaagggctaattctaggtaatgcttcattaaccttgtatcagttacttgttcttgaatttcaaaaattcattttttccataatttttattaattcagtgaggccctccttctcatttgtacaaattagtaagatgtcaacctacatgtggagttctggagattcatcttaagacttataaaagggaaaaaaaaaaaagaataagtaaaggtattgagggcctactacgtgctgatggccaaggtactttcacctacattaacaaatcaaatcatttcaataggccctgtagggtggctcatgtctgtaatcccagcactttgagatgctcaggtgggtggatggcttgagcccaggagttcaagaacagcctgggcaacatggagaaaaccagtctctataaaaagtagcaaaaattagctgggtgtggtggtgtgtgccttcctcccagttacttgggaggctgaggtgggagaatcacttaagctcaggaagttgaggctgcagtgaattgtgatggagtgagactgcctaaaaaaaatcctttcaataaattatgattcacagaatccaatacatccaatgatccaatggaatgctagttcaaatacattggtacttaagcatggactgcattctaaaagttcacctctaactcagctattttatcatagaaacacagatatataactaaacaccactttttcaagaaaaggtaaaattgtgaattgcatttcaaccacacagaaaccaaacaaagttcgggagtgcaaactatattctccttctttcttaacatcagatttttccattgtagcaaatgtgattaggcagggccttgactaaatcactagaacagtgagtgctgacactaaagctggaagctaaaaatgcctccagaagattgtccttgagagccaagagtcaccttctcctgtgataggcagtctgctactatccccatgcaccctaaagctggtatgcaaggactctctaatcctgtggtatgaaaattcagtcgcctcacctcaaggctagacagatacagagatgcaatgtaggatctggagctccccttggattgaacacacatcttgcttcccttcttcccttacaagcgtttcctgagagcccttcttcaataaatcattttctaagaatctctgttacctccccatctcaggctctgcttctaggggaaaccaatttaatacacccattttatctatgacatcatcctcattctggcctgtggttacgctaacaatttatcttctcctggagtccactaagaaggacaaaagccattcagaatagaccaataaaattcaaagcctagtcttcttccagcaccctatgatctacactttctccccaactgacacacgtggtcaagcagaatgcaacgcccttttcttggaacccagaaaagacaaattaaggaaaatgagtttggaacaatgaaacagtctcctgtgcaaataaagcagacactaccattttaagtatgaataattggaaaacaaggcattgaatagtcttaattacaataagtatacgaagcttgcattagtcttaattacaataaatataagaagttttaaaactaagtgttctaagccacaaaaaagtaaaatatgtccttgtttgtacattatttcaaacataggaggataattaagataagaatgtgaaataaaggcttatctttatttaagactaatttgttgaggcaagaaagttggtggggtgggatgaggcccctgcttctcaaataaggaaatcttaaattaaatcaatgccagtcaattgctgggacattttagtcaaactgggtgtaatgtgctggttaagctatcaaataaaatgttggccatagagcatgattcgtggtcctcaatggaatcggcagttgaggatgagattgctgtagatgctcatcatcctctacagaagtgatgaactgagagcttgtatctttgaaagggtcatataatccttggacaaagggggtagtaggcctgttatccctgctgcctttattcatccacccatctaaacaaccctcccctcagtgtttactgaatgccaactctgtgccaggaactagtctagacactagggatatagtagaaagagaatgtatacggctcaggaagttgtgatttagtgaggattcaaaagaaagattagcaagtctttggagcaaaaattagagtcaagaggaagttttgcaaatgatcctgatcataacaaatatgtgtgtgtgtgtgtgtgtgtgtgtgtgtgtatggagagagacgacaacaaatatatatatatttggctctctctctctctctctctctctctctctctatatatatatatatatatatatatggagagagacaacacctccaaagaaaagagaaaaaaaggaaagcacatgaccgtgaacgaatctagcagtatgagaatttgattgaaagtctcagggaagacctgagatatagtgaatagttggccacagatatggtgttagtagcagacatcagttgggttactgaacaacacttttaaacccactaaaaggggacaaatggaatttactcagagcttagtatattaaggttactcagatcattgcgcattgggagggaagaagatgcttgtgcattgtcagagttgaaaactagagactgtgtgcctgagaaatgcccagtgagacacagaggaagcaactccacggatgcagaaaccatgccacccagaggcctgcatggggagcgtgtgttgtatggaatcaactgggcggagttaatacgtgaaatttcacattaactaattaattaattggttaatcaactgattgattttaaaataccaaaaagcttccaacaatcatttcaaaatttgatatatatgttgaaaaatacagcaacaaaacaaagtataaaatacaaacaaaatcttaatttatttcaatgctatgtattaaaagccttcatatccaaaaaatagcaagattgttattaaatacatttacatactctagtcaaaactataatattctataaactaacattagagaagatgcttgaagaaaaataaacatttaaaatacacccatatggctttaggaattcagaaaattcaataaatcatgaaaaaaatgaacctcctgggttttgttttgttttttcctttgagggaggggaggggaacactatgagttttctctttctttttattttttcagtttctttctacaggatacctaagcctaggtcaattgtttttaataacttcgttttgctaatcggtcatggcacttgtttctctccttaaatgcaaattaggatgagaataaccttgtaaacgtgtctttgtcttctcaaggtcatgtttggccaacagtatcagtcagggtttctttttccttttttaagcaggcagccatgttctgattaaatatttataagtctagttgagtaaagttaaacggagcagatgaggcaattaagaagtaaaaccaagtgtcaaactgcagggtctccttaaatgatgcaagaccttgggatcctgacacttttcattgacactctttgtaagccagagttgttttgtttgtatgaaaagtggcagtgctgtctaagatttactgatccctgtttagaagtcatctaaaaataatatctgagtaactcaaaccctctccattttccccagaaatagttttactgtaggggtgagatgtaggagagggagggagcgtctgtgtactgccacagctgggaacattactgcacctacttcctagtgccttgcaggcatctttgggacttgctaagaacctttggagaagtgtaagcagaggttaattgttcaaccacctgcttttagaaagatataaattttatatatgtaaaataatttttaaaatcatgattaatagcctatatcccttcagttacttttacaaagccttccaatgtccagaaggaaactgctgacagtgacatttatggagaagggggaaaaaaaaagtaatttttcaactcaaattgaagggcagtggatagagaggggaacataaattcattataaaatatcttcttaacccatatatatagccaaaaaaaaaaaggagctaattgcagaccaattatggaaaaaacctgaccttgggagaaaggcatgctatttatttataatcagtattaaggatttagaagcattttcaaggtttgcatttatttggggttgaaatgtcataaatatctgtcagcatggcaatattctagttaatttgattttggtgttgataaggccaagttcaaataatcaatctcaattaggctgattaatttcacactaaaaaactgtactgaggggacacaatttacttaaaccctaattgaccgtgttgtgcctttgggcacagagagatcttaaaaaggagaaatcagggaaatcactatacacaaacactggaaaaactgacttaattttcttgtttttaccaacaattggttgtgttgttgtcaaatggataaagtagaactttaaagaaaaatcaactttgtgcagtctcttaaaaatacctgaatgaaatgaaataaaattcataaaattctatccaacaattgaaaaaaacagctttttttttttttgcttggaggctagaggatgatgatgagtagctctattctgttagctctttctgtagctctattctgttaaattgtcatgacatttgttcagctcctaaaaaatgaaaattgggattgaaaatcaatttttagtattttttttccaaagcatcagcatacttgaagcctgtgttactatgaatggttacccttaaaatgaaagaatagttgttacttttggagcgggatagtaaccaggatagggcatatgagtggcttatgaaacacactaaatatcctatatcatgatcagcggtggagatacctgagtatgttaattttgtgaaacctcattgatttacacgctaatgatttatgcacatacaattttacttccttgatactctaattttttaagttgtaaaaaggaatttatatttaaaaaaaggttggactcctatgttcatttctataaatgaagctgtcacacagacctgaaattttatttgagcactggctctatcattttcttttgatgatgatgtttctttgatgtatgcatttttatcaaatatatctaatttgatgtttctttgatgcatttttacctagcttttaactgggacctggtttctgtagtgtaaaaatctatttgcaatttctagtgtattatactatttaatgccttcttctcatttggaactagaaaatcacttgggttaaatggtgtccagctgccttcagagataagccctggctttgacttattaatacatttccatcggcctttcctggtaataaacattcttactgtcctccaatatggtaaaatatttagcgtaagagtagtcttggctcacagtatagttgttgaatccatgctgtttttcagtcattggctgctctgttcattacattctatacaattttgtatactgatgtcttggggttttaattgaattttaatgaaaaaatggcccggattagcagtaatatggccagctgtgggctgcaatgttaatatgcacctactgtttcaatttgctggtaaagctgataatgactgaagagggcagctaatgcaaaaaactatgcctggcaattacatcaagtcaggttttcacccctcatctttagcagcttgcctccagcttttaataaagagcagagcaaaacagggccagttcaagcatcctctgatgtttgtttagacttttctctgttgactgagcatttgtaattttaaaggtctggtctctagtgtagttatgggcagtggtgtcagacacatctgggtgatgccagacacacttgagtatgcattcttcagccatactagccctgtaagatttagtaaggtaattttatatcttttagcttcagatttcttatacagaaaaatgggtataattgtatctttttcttggattattaaaaagattaaatgaaattatggatataaattccttaaatagcacctagtatccatttctgagctcaccaaatggtgaccattatttttgttaaatatgcttcaggttttccccatcaatatcaaaaattaagattggacttggaataaaagttctattttatattttaaatcttacaaatgaaaataaataaacagcatggattcaataactatactgcgagtcaagactactcttattacactgaatgttttaccatattggaagacagtaagaatgttggttgcccagggaaggccaatggaaaggcaagtcaaagccagggctagtaaagtatatgatttcacttatatgaagtataaacacaagtacaatcattttatgggattaatgtcaaaatagtagttccttttgtgaggcatagtacagtctggaagaagcagaagggtttccaagatgctgaaaatgttccatttcttcatctgggccatagttgttgtattttatatacgtaaaaattcatcaagctgtaaacttaagatctatgcacattattgtaattatgttacaactcaataaaaaggaaagggcttagcaacaatttttttaattaattgaaaaaataaactagcacagacctttgggaaattaaaaagtcataacagtgctcagtaatcccacccctagtttctctattgaatattctgatagcagaactattccagtaacagataaaatattatgtatatggaggtgttcaatgcagcatttcctattttagaaaagcgacactgaaaacaatataaaataaatgtctaataatgtggtaacaatgacgtaattgatgatgcatcaattccaaaattatgcagtcatcaagaataactacattatgtaaaatggtgcagccactttagagggctctttggcagtgtcttataaaactaaacatacctcagccctatgactcagcaattccacttctgcatttctaccaatgtaaatgaagacatatgaatccacacaatgacttttacatcaatgttcataacagctttattcataacagccaaaaactgaaagcaatctaaatgtctatcaataggacaatggatgaagaaatgatgatgtattcatacagtgcagtaaaactcaggaatataataacatgaatagatctaaaaaaagttgaatgaaagaagccagacacaaaagttattccattcataacaggttacattctaagttattccattcatacgaggttctagaaggggcaaattagtctgtggtgacagatattagaacagtgatttacctctagtgggaaggtcaggaactggcttgtgatgaagatactctatcttctttggcaggatctacagcagccatcatatgacactgaggatctgcccagtaaaaatgtaaaagtttcagtcctaaaattgttgagctggtgaaccaatgccgggatttccgtaactcttacataaaagaaagtaaagccttatttgttcaatccattatagctggtaacattctgtaaaagaggacgcaaaaggcacccatgaccaatactagataatacgtattcaatcattagacccttttatgaaaacaaggggcgaaaagtgctgcgacaattcccagagaaattgaaatggatatttcctatataatgctaaaagagcatcagatatgaagtaagagggtgtgaggagaagctgctaactacataatgcttcaacagtgaaaaaaacagttctacacaataaccttctaacgattcctcattgtggacgggtaggtggtttgtacttccagtcccttcagtatcagatgtttatcatatatcaaaatcacacacttgatgtttttcctttgtactgaaatttttaacttgttttcattctatttcaagaaatattgatgaatcattttgaattatgctgttatgaagacattcatgtaaatctgtagtaacatcataattgtatttaattatgtatccatttatcattttccaaaagattaaaccatgcacaaaaatacccctctgtgttctttacggcagtattaatagttgcatatacctaggagaaaaaggcaatttaaattttctcccatgttattttagatgtattttactcctcctcctcaaagtgggtatgaacagcaacacttcccccagaacctctcgcatatgctcaaggaacatttgcagggattttatatagtccgtcctctctttggatatgtttttaaaaataaggaaaagtttcatcttttaaggaagtgccttttattgacattcaactagttactgacagatttttactgttcagtctcttaaaagggtttgaaggaatgagaactgggtagttgtgttgctggtcattttaacgttattttatttattttctcagtagttaatatacaagcattgtactgcagtcacaaaattcagaaggaggaaataagctagtctccctcacaccctccttctccagccatcctgtgcccttccccagatgtaatattttcaaatagtttaacgtacgtttctgtgctgattactttttttgctatttccaacaatgttgctatgaatattcttgtcattgcccccaagtgcacatgatttcaagagttctgtaactcttggagtataacaaggactagaatttttgcattgtatgctatgagtattttcagcctagctatgtataattagttactgttttccagatagttctcatttatcttcccatcaggagtggaggagagctgtgtggctccacatccttgctcataactgtcagtgtcaagcttttcaatctggtgtgtatgaaatcatatttcactgtgattaaaatgtgaatgttctggactaacaaagttgagcatcttttcggatgtttattcaggttttcacttctatgaagtatcttttcaagtgttctgcacatttgtttttctctgttgagtttcttggattttttcttattgactcataaagcatctctcatatgctttggatgtaggtatttgtcagttatatttttaaatgcctaaattggatgcagcattccctaacttcaagtctgtcttattttctaaagtaaatatttaagaccatttcttcttaagtcttaactacatcttacaagctttgatacctaatatatttgctataatctacttgttaatacagtctgatttccattatttctcctttgatccatgaattgtttagaagtatgtttttgtatctataaaaaaaggagtattccttgtaactttttgattatttatttaaactacattgcattataatcaaagaatatgttcagcatgataccaatacttcaaaatttgataagattagctttattactaaaatgtggttaggttttacgaatgcccacatgtacttcgacatgtatattctccactcaatcaaaatagtacattgcacttttcaactattatatgtctttactgttggcctacaatcacaagagtctgatttgtccattattaatgaacactttcagtttttatattcaagcatttggtttgatccaggtttatttttatataaagtgtgaaactaagttcaggctgtttttttccccagattccagttgtaacaatagtttttattgaataattatctttttcattaccaatttgttttgtcaagtttgctacataccaaattgtcttatttttatttacttatggatttttattttatttcattaatctattcatgcaagaatgggacatttttattaggtgacagtaatgaaaatttaaactaggttttgatgcagtgatatactgatggacccaaggtagaaaattaaactagatttagaagagagaatttagaaaaatgaatagggtcatggtcttttttgtctaaaggagagtgtgtgaataataagtggaaatgaaaaacctcagcagagggaagtacacattgttaacaattattcagacccatgtaacaaaagaccgtaattctctgctctgtaaaagaattatattaaagagacaaatgtcacactaaatgatacttgcaggacttacacaggtctctagagaaaagagtgagtataattagtacatgtgttatgatgttttgattctagtccaaaccaactagattaaatacatttactttttgaacaaaaatggcaagacataattattacaattggaatgtgatagtaatatatataatatgtatatcttagtgtgtgtgtatttatatatgtatgtatgcattccttgtgcctaaaacacttcctgctaggaaattaagccagccttctatatttgtactcacaatctatcctccaagatatgtagagttgataaaaattaatgcttgcctacaaaatttcagcaatgcttctcctatctctgtacctcccctctgtatacatttgaaaaattaatcctgaccatcccaggaggtagaaaggaaagggtggtaaaataaatagttccttgagattttataaattcatccagattaaaatatatatatatatgtatatgcacacttgtcttgaaaaagttgtgatgatgttatatatcagaaataaaaaattgtttccactcatccaaaagtttaggactcacaaatttttttcaagcagaaataattttgtttcataaatttggtttaatttcttttgattacataaaaaactagaaatggaaatttatgtatatagcaatgtaaaaatgatagtgagtttaatgctaaaatctgatctactgggctctgtttaacctaatacccaaagcttaagtaatggttaagttggggtttagaggggcctattaccttcttcagggcattggtattttgtttcctaccttaatctaaaattagtgtcttatttgccagtctaatatattttacaatcaatctacattgcctaccttttggagtatttctatttaaataaaacaaaatgagcgtttaaactgggaacgtattagattcttctgagctattgagcagtatcagatccttcagcaagaaagctgttttatcatttactaagtacctaggcacagcatcaccttgcccgttaaaagccctgtcaggtacacattttggttgctaggcagctgctggggaagcaatctcttccacacatatggtttatgccacctggcctgcatttcacaccaacctccccaaacttcccagggagttgcaagagaggtcctcatgttcctgtcttcactttccatttccctgtcataagcactccatttgttgtcagctttcattaaggacatttccaggagctaaatatggtagatttctattaactgattctaaagattcacattaaacagaaatagagcaaaaccataaagccatctgtggaatttgagagtatggaggggaatatattaagattaaaagataatcccggttacacttccattttcatgacatttgataaaaacactttggaggaaggagaagaaatgggccagtgagagggaggaagaagaaagagacctggaaaggaaaaaaggcaggaaggcagatggaaggagaggtacagaaggatgaatggaaggaggaaatgcaattttttttcttcctttttattttattttattttattattatgatactttaagttgtagggtacatgtgcacaatgtacaggttagttacatatgtatacatgtgccatgctggtgtgctgcacccattaactcatcatttagcattaggtatatctcctaatgctatccctcccccctccccctaccccacaatagtccccagagtgtgatgttccccttcctgtgtccatgtgttctcattgttcaattcccacctatgagtgagaacatgcggtgtttggttttttgtccttgcgacagtttactgagaatgatgatttccaatttcatccatgtccccaaaaaggacatgaactcatcattttttatggctgcatagcattccatggtgtatatgtgccacattttcttaatccagtctatcattgttggacatttgggttggttccaagtctttgctattgtgaataatgccgcaataaacatacgtgtgcatgtgtctttatagcagcatgatttatattcctttgggtatatacccagtaatgggatggctgggtcaaatggtatttctagttctagatccctgagaaatcgccacactgacttccacaatggttgaactagtttacagtcccaccaacagtgtaaaaatgttcctatttctccacatcctctccagcacctgttgtttcctgactgtttaatgattgccattctaactggtgtgagatggtatctcattgtggttttgatttacatttctctgatggccagtgatggtgagcattttttcatgtgttttttggctgcataaatgtcttcttttgagaagtgtctgttcgtgtccttcacccactttttgatggggttgtttgtttttttcttgtaaatttgtttgagttcattgtagattctggatattagccctttgtcagatgagtaggttgcggaaattttctcccattttgtaggttgcctgttcactctgatggtagtttcttttgctgtgcagaagctctttagtttaattagatccgatttgtcaattttgtcttttgttgacattgcttttggtgttttagacatgaagtccttgcccatgcctatgtcctgaatggtaatgcctaggttttcttctcgggtttttatggttttacgtctaacgtttaggtctttaatccatcttgaattaatttttgtataaggtgtaaggaaggcatcatctttgagatgaatgtgaatgatcgtggaatattccttctgtgacagactttatttttgagacaggatctcactctgtcatccatgctgctgtgcagtggtgcaatcacagctcagtgcagccttgaactcctgggctcaaggaacactcctagcctccccagcagctgggactacaggtacaggcgctgccatgcccggttattctggcttcaagcaattctcccacctcagcctcccaaagtgctggacttacaggcaggagccactgcgcccccggcccttgtgacagacttttaatgaaaccattatatttacttctttgacagcctgttactatgtcaattcctccagccactacaaaacctgtcctcatggtttagagcattggcagtcactccctaaaattggagtggagtgaggaaggcagttctgtaggaggggcttatggactccttaagggcataggctgttggagtccctgctgagagatctctgccctaccttgtggaactggagtgaaacaacgggggcgttgcttccagccatctgggagagaggatccagagcttcccctcagagagctgggatgttgtcagcaggcatcagacagagcaaaaagccatttttctttattctattcctgatacaaagcaactgagatatgcgtttctctttggaattgaggaagggagaataatggagcttttgcggtgatggacagggaaaaagtgggggagcagttaattatccatcttgacaggtgtagacacaggctgggaagctgggtgtgtcttaatccctgctcctgaaccaccgtggggagcaggaagcctacagtttccttatatcagcaaatgcatcatgttgaaacaattttactgcttgctttctgaatttaaatatagattttccctgagaagggctcaagcatgcagatggtaagaaaaacaacagtctagaaagatatcttcaagttccttctcctggttggtggaaatagagcaattcttttccaaaatataatttttagagttttaaagtaaaaaaaaaaaaaaaaaaaaggatagagtcaatttggaatttcttagctgaccattctattagagcataggtttttcagaaaatagagtttatgggcaaaaaaaaaaaaaaaaaaaaaaaaggaaagaaaactgttttaagtatgatatcttcagtgtaatatatagttaacatatactattttgttgtaattagaatatgcaattattatatattaaacatatctacatctgtagtaaaatgtgttgtcctacatttcagaaaactataaggcttttgggaaagaaaatttaggagtatacattaaaagccatgtcaatgccattccctttaacatagtagttccatttctaagggaaagaagttaaaaaattgaataaactcacatgcatgaaaatgtttcaattataatcatgaaaaaggaaataatataagtaaccaggatagaggattgattagggtagttgctctcaattttgccccccagtggacatttggcaaaggacagcgcccctacaacagagttatccagcccaaaatgtgagtagctccaaggttcataaactgtacattagtgtaattagagtgtactgactcaacagaagaatgtgcagtctttaaagctcatattataaaggctaagcttcaacatgaaaaattattttgatataataaaagagaaaataacaggatgctatttcatatatacattattatggtcaaaggtagttttaccatgatgctggtgaaactttagttgcaggatctctcacttacggaagcccttcaaaggcccttacggaggctgtaactgtgtttcatatggttataggcttttgtataaatttttaaactaagattattttaattttattttaatataatatttttctttttccctcctgaagttatacaagtttcaggcaccactaaacttgatttccctttgactatcattttaaggaaatgaaacttaatgcacatgatggaggaaaaagaatgtgatgagaaattaccaaatagctaactgaagtcatgtaaggatgaggggataatggagaaacatttttctcttctctagtttccaggtgttttccagagctattatattagtttataatgaaagaaatgattcttaagagaaagaaagttcatggatatacaagaagaaaaaaaaatttggaaaaaaaccaccatgttaggcgccggatgagtttgttgtggtttgagttttgatcttctcatgctgatctttccggctttgtagttctctctcctctcgtacttctccatcattcatgcttgtgtccaaccacagtattttactaagagagcatgtgttctagtgccctattgctgcagagcaaaccacccaaaaaacctacataggctctgctgggtggttctcactgggggcctctcaaacagttgcagcaagatggtggttgaagctgaagtcatctgaaggctcactgggctagacatcccaggtgatcatcactcaccggccccatatctccgtgctcctatctgtagcatctcctgacagcagagtagccaggtcttcctacatggccacttggtactacaaaaggcaagaagaaagtgccagtcctcttaacaactagatcgagaactgagagagaatccattttaccatattcagtggttcaacacaatcccaagccagcacagattaaaggggatgcaagggtagactcctttgctgcatgggggaatatcatacagtgcggcaaaggaagggcttgatggaagcctttgaacacaagctaccacagcaaagaacatttgatttccaagattcccataaggtagggagggatatgcaatatagagcaagcatcttccctagaaatatgcatgtgataaaaatatctacctacagagatattgttagcagtggaagttattcaagttagtaatggcaaattcatacgggtctgcagcaacctcaattcttgcttcctcagaagaaagaatttgactgaggggcataaggcagaagacgagatagaggcaagttttagagtaggagtgaaagtttattaaaaagctttagagcagaaatgaaaagaaagtaaagtacacttggaagagggtcatgtggacatcttggaggtcaagtgcactgtttgatcccggacttacagtttttacatgctgtcctacttcctgcatcttttgtcccttttccggtggaatgccctccgaaggtcatataccagttaaactttgccattttgcctcttaatgtacatgtgtgagctcactcgcccaactcctgagatctcatgaggaagctgcgcatcaccagtttcaggtatttcctatctatatagggagactgcctttccctggtgctggctgtgaccaattattattttagagagacagttaacagccacctgcccagggtcacctgactttcttggtggggtgtgcggggagccctttcctgccccgctcatgcctgactagctacctactgtaacaccatgtgtaacaccatgaacacaaaatgaatatttctgacaatcagctatagagtgtaaaagcttttaagtagcactttgccagttagaatgctctaaaatggagcctcctaaaattctccaatataataattttctacggaaatctatcagaatagagcagtgacacccagaggaaatttggaaatgtttagtagtatagtgttttatgcattttaaaataaacaataactaatattttaattggaattttttgagaaaagatacaagctactttcaactgaagaaaagtgtcccgagctaaaaagactacctttgcatcatcatagactgcttgatagaacaactaaggaagtaaatgaaacggaactcactagaggccacctgaatcatcaacaaattagtcaatcagaaatgttgactagagtccctctttgatgaataacaaaattcttattctgtttccaaatgtaagaataaatgaccagggctgttatttgctctaggggattaatattctgtacattcagttaatcttgcttgtgattaatcagcaaatagtcaagacaattgaaatattcacatatcttatgaaataaagagatatttgcaaatatcaacaaaaaaggacattatgtaaaaaattcacttattagaagcatgtcagtaggccacaaattaactaaccctaagcattattttgctttctttgtagcacattccccttatatggtactcttttctgggaaacatggtcttgctctgttgcccaggctggagtgcagtgttgcaaccatggctcactgcaggctcaagctcctgggctcaaatgatcctcccacctcaaaagcttttctagtagctaggaccacaggttatgccacacctggctaatttttaaaaaatgttttgtagaaatggagtctccctatgttgcccacccttgtcttgagctcctgggcttaagtgatcctcctgccttgggctactaaagtgttgggattacaggtatgagccactgtgcccagctgataaggtactcttttatgtcagacatattaaacaaccctatttattgatatcaaagtacaatgcaccaattctgtgaccagaaaatgagacaataaataaaaactatcttaaactttctattccccattttatttttacagctaacttttttttttttttttgagatggagtcccactgtgtcacccaggctggagtgcaatggtgccatctctgctcactgcaacctctgcctcccgggttcaagtggttctcctgcctcagccttctgagtagctgggattacaggcgcctgccaccacgccagctaatttttgtattttcagtagagacagggtttcactgtctcaggctggtcctgaactcctgacctcaggatccacccgcctcagactctcaaagtgctggggttacaggcatgagccactgtgcctggcctacagctaactccttaactacccctctccttaaaaaagtaatcaaatattttcatcgtgcccttaattctcattttcagtttgtcatagctgtagaataaatggaacttaggattaatacagaacaatttcttcagttacttactctatatgacaaatggaaccagttatatgaatgctaagacctagtatcttgaagactctcaagtaaaaaaatgctctggggaaaataatttaaaaccatttgtctctggttttgacacacttcaaacaaacttgtacaatatattttcccaacctgaacatattcattcattcaaggacagatcagtcacccaatggacatatatttagcaatgattctatgtgtaatcatgattctgggaacatagaattaaagatgattaacaagttaaaacgtctccctttgaggtcgggaaatattcacctgactttactgttatactgttttatcccccagtgcctaatattatgcttggaacagggtagatacttgcctcttttctttattttctttctttctttctttctttctttctttctttctttctttctttctttctttctttctttctttctttttctttttccttccttccttcctttcttttcctttcccttcctttcttctttctcttttttctgtcctctttccttccttctttccttccttccttccttcctttctctcttccatttgttgttctttgtttttttgttatttaaataagtaacattaataaaacacactggtggaaataaacagaagtgagaacataaacagcttaggtgactgggatttaagcatatggctttctatgtcttagcaaccctcatgtggttggaggttgtcagtcttattccccatttgacctccagcattagcccagaggctggacaaaagaagtaatcaattaataattgatatcaaaataaatgattcagtgtcttttcaacataggacaacacagtcagtgaggctaacaagaatgatatcaatttttcaagatgttaaatgctacacattatactatactaaagaaaaaagaaagtttgcatcacttttttttcatttatctggaaaatttatttatattgaagttctcatttagttttggtgcctgatgaatgagctattacttgatattctcttgctttctcaataaccatctcatctagaaagcagggtgggacttctcttttttttacttttctgacgtggtgaagcgtctatcagaacatctttcctctcattggcagctcactacgcagcttgcaaaggttcacaggtggctgaaacccaacccagttgtaaatcacaacatgggtacatcttgcatattttagaagacagaaaagaaaataccttgtcagccagcaatcagaagcacattatatctcagaaagtctgccccttgtgcctgtcagcctgaatgggacctttcacacaaaccttcctgccaattcacttagagcagccagacaactccctccctcccatctttcaaattactccacatgtctaagttttcctttaaaatgtttccaaaccactggagcacacctctcatcacagacccccattgatgagagacaggattaaggttatgtcagatataactgatgattagagttatttccaccttctccacagttgttgacagacagcaaataaaggcaacattgttagacctacaattgatctattgaagttaggacttatttcttgactcctgaaaatacaaccttctaccagggctattctaagccagtgatttagagccctgatgccctgtatttatttattttttttactaatttttccactgctatgcaatgaggcatatcattattattattgtaaccgcctggctctcagtggcatgtgcacaaacacccagaaagtaaaggcatacagaagcctccgttaacgttgagaagggacagacaccataattgttttccactgttccttccattttaaacagtggggatcttacctatgttaagcatttctaggtgaagcatagactgcttaagagctgtatgagtagaaattaggaatttaggcttcagatccaaccccacctgggttggtatttgggtttcaacatatagtagctttgtaactgctggtgtgccactaatgctctccaaatattaaggaaggctttgaatgctattccaagatgtttaggctttcttccacaggcagaagagagcctttgaaagccttggagcagatgagtaacatagtagaaaaaaatacttcgagataacttgcaaagaggagttgtcaatctccaggatttgctcagctccattctccttctgggcacatggaagttctctgtgtctggcactgcattggttctccaaatctcacaaacagtgcactgaatgactgtgatgattgaataattgaccaagaaacccagataatgaaaggaagaaagagaaagaaagaaagaaagaaagaaagaaagaaagaaagaaagaaaggaaggaagatagtaatgaaatgtgggcatggttgactaatgtatgagagttcatcagatgtataacttacttttcttttgaataatttgtatttatttattgagcattacctggataaaatacataactagttccatgcttcacttaatggtttaattatcaagaagttttgaatcaatactgacctgcaagcaatgtctcaaatctggaagctaccaagaattctgagatccaagttttctttcaaacttccctcccttttgcattttgaagtggtagtacaatttggatcagataaagaggaacaaggtggtttcagctagctgcagaacacagatatgacttcattacccagctgttagtaattttcctcccagtcggaggcagaattttgaatagactgaaaacatgtttgtgcagggttctaagatgctacatgaattcagatgttcattcatttaattcatataatagcctcagatgatatctttctttctcaccacaaggctatgctttgtctaaatggccaggtaaacatcccagaagtgagtggtccctgaagtggtccgtgaaccgatttccacgaccggttctttcctacgtgtgaaccgtgctctgctgcaatctactagtgcctcgggcattcctgcggcctttgtctaagcagaaagggtagaacttcctgaacactaataaaggaaacataaaagcagaggtcagctggaagattggcaataggctaatgaaactgacagtcatttttgaccattttaaacaataagtttgttgcccctacatcctccacattagctgcccagtcttgtcaagtgacacacgggatattatgttgaatttttaaggtgcttcttggctgtgaatatggcctgggatctttctttccttttaataatacttagcacataattgttctgaaatcacatgttggaaaagctcttgactagaaatgttgagagcgggggagaaaaagaacagcacttaagaaaagaatggaaaagtttcagtgacatttgcaaaattgcttttccttctgatttggttgggaaaattatttttcagactctagggaattattgtttctcacacacttcatataagaatatatttcaagccagaaaggaccttagaggtggtgctcagtgtccttcgttcagatcagggaaggaaactgaagccgagggacgttaattgaattgcctctgttgtggctgcaaagtcagccagtgaaaacaaaaattctctaggaagccagctttgtttccttatatttaaaagtcattcactcatgtattcatttggccacagactatgtattgcacagctattaatattatgtggcaggccatatcaaggcatggagaatacagtggtaaacagaacagatcaaacctctgcccttatgttggtgataaatgctctagcaccttggtaatcaaaatacctccgtattagcagtttatcggaaatgcagaatctcaggccccaccccagatctattggatcagaatatcctttaaacaacatcctcctggagtttcatatgcattttcaagttgagaagaaatagataaaaaaataagtaaaataaggaaaataggaagagtttggggagcttaatgggagattatgtaagagagatatgtggaggtcaaatgcccagggctctgtgggttatttgaaggacgtgggcttttgctctgagtggggtggcaaaactggagaggattttgagacaaggcatggtgtaatgtgactaagtataaattctatgtagcacagccttaaatgttagagaggtagaaaacagatcagtggcggcctggcaacaggggataggccacaaaagggcacaagaaacttttaagggtaatagaaatattctgtaccttgatggtaatggaattacactcatgtatatatttgtcaaaactcatctattggtgcacttagaatgaatgcatttcgttatttgtaaactacttccaaagagttccaaaaaaaaaaaaaaacctgttggacacatctgatacggtttggctgtgccgtcacccaaatcatcttgaattgtagctcccgtaatccctgtgtgtcatgggagggaccttgggggtggtgattagattatgggggcagttcccccatgctgttctcgtgatagtgagtgacttctcacaagatctgatggttttaataagggggctcattctcattctcgctcctgctgcactgtgaagagggaccttccaccatgattgtaagtttcctgaggcctccccagccatacagaaatgtgagtcaattaaacctctttcctttataaattactcagtcttgggtattcttcatagcagtgtgagaatggactaatatacaacatcataaccaggatataacttaaattgtgtaaaagaaataagcaggatcacctccttatgtgggtactatgctcacaacctgggtgacaggttcaatcacaccccaaacctcagcatcacgcagtatacctctgtaacaaacctgcagatgtacctcgggttctaaagtaaaagttgaaaatttaaaaaaaaggcagatgagagaacagctgttgcaaagagtatcagttgaaaccaaatttctctctaagccagaagaatagtgggtatgtgagcatgtgcaagattttgcactgcaaaagatcatttcaggagtccagaacacttgagaatatgcagaataacagtggagaattcaaagtgataccgaaatgcaaaagcacactaggtcaggatttatgagatagattctatttttgcctcacttctactactgcctaactttgtgaccttggacaagtcatgtattgttcttgggaatacaattttcttctctttcaagtggcaatcagagcacctgtttccacattgctatgtgggggtcaagtgcaatgtgaatgctggaaaagtgctttgaaaatgagaaggcactgcgtatgtgtaaggactgctaaaatggccttttccaagatgcattcacatcagtgacgccaagaagttggaaaggacaccaattattagatgtttctgacactgccttaacttcagggcatgtgcaagttttcctgatgtgcatgtgaaactgtgtctattacatatgctgaagttttcccccaaatgggaccagcacccacatgtctgatatattccttaggtagagccattcttctcaataaaacacaaaatagtgaaatacagaaatgtctgatttgtaaagagagggtatctgtaacaaaattgaaagtcacagatttgatatctacttttacattcttgtatccagtaacatttttttgagcatctgctactgagtgaagcatggaaggatacacaaagatgaataaaacacagtctttattgtcaaggagatgacagtctagaagaatggataagatgtgtctaaaagtaacttgaatgcaaagccatatgtggaaactataagacaaaaattaacgcaatggagttagatagggggaaaaataaacacttgtctctcggaaaccttcctgagaaaagtggtgtttgaagtgagcattaagaatagattaagtcatgtcatagaatcaggaaaatacaaggcatttctggaatgatgtggtggcctgtttggctgggagacagcttatgtttggggcactagtgtgatatggaagaggaggctaaagaaggttaattgaagacaggaccatggaaggttttccatgctagcctttctaggctggaaatggaaaaccactggaggtttctgagcagaagcgtcgtatgactcaaagtgtgtcagcggaagaggactttggcagctctgttgagtatgcactaatgttgggacagaccagtggtaggaaggccaattaaaaactaaatgcaatgatttaggggagagaaaatgaggatttcaactagtgtagtagattataggtttggacagatatgaatgaatataaataacattgtatcaaaaaattggctggaccttaaaaccatctggatgtgggaggtgagaaagaagaaagtaccaaggatgactctcaaattcccagccaaagtaaaaagccctgaaagagtgcatgggtgaaagatagtggatgtatttttaagacatgctgacttagtggtgctagtggaacagctaacattattatttcttctatacggcacacatttaccatatgttattctatttaataatcaaaacaggcttgtgagaagagtaagatcataccagttttacatagagggattaaggctaaagagaagtaacttgcttaaggtggcagaatcaccattggagaagaaacataaatattgtgttctttgtatgccatcattgcaaaaatctagcagattgttgaacataagaaactgaaattcttggctgggcgcggtggctcatgcctgtaatcccagcactttgggaggccgaggcggacggatcacgaggtcaggagtttgagaccagcctggccaatatggtgaaaccccgtctctaataaaaatacaaaaattagctgggcatggtggcgtatcctgtagtcccagttatttgggaagctgaggcaggagaattgcttgaacccaggaggcggaggttgcagtgagctgagatcgcgccactgactccagcctggatgacaagaacaagactctatctcaaaaaaaaaaaaaaaaaaaaaaaaagaaagaaactgaaatttgtgatttcctggtccagtgatcatttctaattgataccaatgaatccctctgatgaatatttcactggtatttttctaatatatgatacattcataagttggttcctaagctgtattttaagagaacatcatgatttagatttttcttatactaccaagaatgccactctgattctttatggaaactgagaccatacacttaagctctaggggggaggtaatgtaatgcaacctgtgtttctaaagcacaatcacactataaacagaccttgctgcaaaaataagtatattcagcacagagctgataaacctcagatctgtggctgaaatgatcagttgatgatattatagtaaacaccattaccaatgttgtgttctggatgtttttcttcaagctgtgtgtctgtaggaaatgactagtatcataaaccctcttgacaaaaaaaaaaaaatcacatttctgttttccaaaaagagttttttttaatatcataataaatgagttcttttgaattcatctgtgcttttctaaatattatcttctggcaatgactttgccttatctctgctctgctgtttctggagagcataattttgctacatgtatctgaagatttataattgcgcctcttaattggaaatcaaggcttggcattagttaacagttactggtgaaatggcccactgataaaaacaaatgcttacatttctagaataataacaggaattcttctctgaagaacccagagtggcagactatcacttcacaaaactttctcatttccccaaacttgtaataaagccagctcattgtttcttcaggctactaagcatcaagcaatttgttttctgtgttcagtctgtcatcttacggctcgctctaatgttcactgaagccctacggcagactttgggactactgtttttttaaataaacaattatggcattttcagatatggatattatcaaaggaatgatctaattgtccaccacagatttggatcagatagttattcctcataatacctcaagctgagactcaggaaactagtcctgcgtggggacatatgtcaaatgcattacaaaagcatcacctccttagtctaaataacgtcaccaccacccacccagttatgcaagcaaggaacttagacagtatcctttttacctccctcttcctcattgcccatatctaacccgttctatgttctgaaatagtacttctggattcattctgtcctgttgtatttttggatccatccatttttctctttctcaactaccccacttgtcagtccaccttgacattccacagtggcctcctcactgttctctccatccttcattcatgctcctctccagtgttttctccacctacattgagagcaatgtttccagattaactagtatatcaagtgagtcctaggtttaaaaacctgcaatcactttcattgcttttagtataaatatcaaaatccttatgcaggaccttgaaggctctacatgctctagccccactcacttctacagaccatttgttctaagtctcctcttctctgggaggaagagatcccctctactgagaatgcttctcttctcccatctcttcccttagttatacttttcctccaccttcatatctcaagtgctagttcctcagagaagccttcctcaccacccacacactcctggtccagggacctcccttcctaccttcctccctcccttcctccctttcttcctcccttcccttcttccttccttttctttttttccattctctccttctttctttctctctttctctttttttcctttctcaccattagctttctttcttcccattttctttccttccttccttccttccttccctccctcccctcttcctctttttcacccttccttccttctttcattttttctttctttctttgtttttctttcgtcttccttccttccatcattttttctttctctttgtttctttctttcttttgtctctctccttctttccttccttcctcccttcccttcccttcccctccctccccttctttctttccttccttttcttctttcatcctgttttcattaatttgttctttctttccatcatctatctttctatccttccttcctttcttacttcctccctccctccctctctctctttcttttcttctttctttttcttctattatctactatctatgtttttgtctattatctatccatctattcatctatctgtctatctctatatgtatatattcaatagaaccaaatctctgtatttcagatcacttatttctacttataatcttatatttattcatatctacagtcttaactctaggctgtaagctccgtgagaacagtggttgtatttggtattacttaattttatgttccatgttctcaagcctaactttgtgtctgacacaggtgagctttcaataaatattagtagaataagttaaagtgctttactgagctctgaatgttgatcaagaagtaaccactgcgaaatattggatgccaagaaaataagctatttaacatttcccagcaaatgattttcagtgaagcagtgaggatgggaaagacacaatccctgaagactgaaagaaatttaaaaagaaaatgggaaggcaaatgaaaagcacataaaacaaatacctaatacatgcagggcttaaaacctagatgatgggttgataggtgcagcaaaccaccatggcacatgtatacctatgtaacaagcctgcatgttctgcacatgtatcctagaacttaaagtaaaattttaaagaagaataaccagaaaataaataaataaatatatatttttttaaaacctgctttgtcaggtactgttacagttgatatagatgaagtgaaatctaagaagaatgtctaggcccaagatgcctagtgcttgcttttaactattttcattttttagccaattactaattaacagaggactagttcaggactcattggaatgtccaggtggctaagggactgcacagtgtttgcttttgattacaaaaacaagccctagctcatgcacttcctgataagtttggttctgtgtccccacccaaatctcaccttgaattgtaatgatccccatgtgttgagggcaggaccaggtggagataaatgaatcatgggggcagtttccctcatgttgttctcgtgatagcgaacgaattctcatgaggtctatgtttttgtttttgttttttgagacagagtctcccctgtcacccaggctggagtgcagtggtgcaatctcggctcactgcaacttctgcttcctgggctcaagtgtagctgggactacaggtgtgaatcaccaatgcctggctaacttttgtatttttgtagagacaaggttttgccatgttgcccaggctggtgtcaaactcctgagctcaaagcaatctgcctgcatggacctcccaaagtgctgagattacaggcatgagccaccacacccgcggagatctgatggttttataaggtgcatccccctacctttggcactcattctttctcctgctgccctgtgaagaggtgacttctgccatgattgtaagtttcctgaggcctttggctggattttggacttgcatggggcctgtagccccttcattttggccaatttctcccacttggaacaggtatatttaccccatgcctgtacccctattgtatgtaggaagtaagtaacttgcttttgactttacaggctcatacgtggaagggacttgccttatttcagatgagagtttggacttggacttttgggttaatgctggaatgagttaagactttgggggactgttggaagggtatgattgtgttttgaaatgtgaggacatgagattttggaggggccagggatagagtaatatggtttagctctgtgttccccccacccaaatctcaccatgaattgtaataatccccatgtgtcaaggacaggaccaggtggatataattgaatcataggggtggcttcccccgtgttgttctcacggtagtgagtgagttctcatgagatctgatggtcatataaagggcttcccccttccctcggctctcattctctcttctgtcaccctgtgaagaggtgccttccaccatgattgtaagtttcctgaggcctccccagccatgcagaactgtcagtcaattaagcctcttttctttataaattgcccgatctcaggtatttcttcatagcagcataagaatggacttacatacttccccaagacctcttcattgctgggccatcacagtaccctgaatatgttcttaaaatcaaactttaaaccagttagttgcttttaagctttttctatggtgtcttgtgcaccttacatcaaattcaccatgtataatgaattaaaaagtataactcctagcaacaactcctaaagagtttggagacttcttctggtggcatctctcttgctcttgtaccctctctctctttttctctattcctctccccaagtgtctgaataataaaatttctatcaggagtggattaaaagatacatctatcagttcaccaatttagattctataacaggaatgacaggcattaagacattgtatccaataatgtctgggctaacttttttgttgtcgttctcacatcctttccactgattaacacaaataattgaattaagtataatttcataagacatgaatgactgcatttcatcataaatcactcataaattcttttgctaaattgttggttttcaatttaggataactgaaggataggaattttaccttcaggttagctataaccaaaaatatgaggaaaaaaaacatgatctctgccagaagatcactggaagagatttagtgtgagatcttccatggaaagatcagagcaatacagactggctcaaagagagcacatagcctcagacttttattctaatgtataagaaatggtttttatgtactttgtgttcattgatacttattttctttcttggcttcagccaaaatatgaatgtaccctcagctttcctttttcatggcaatcattgattctaaaggcctggcacagatatgttcttcgaagggtgtgacctttaccgtcctgtgcgcatcagctatctccccatcccatacctgcatccctttaccagagggctttctctggtagactgtccttttgcatgctggagagtgagctcttccagaggcagccctcaaaccatgatctatgggagctgacagatcctcagttgtgtcatcccttaggtgacaaactgcaccatccctggagcatctcatggtgaagtcctggttcccacagtggtagcttgctcaacagtgcagcccttattggctcttttccatcctctttcttgctttcccactcttctacccgtattttctctgatcacctcccaaataaactatttctctagaactcttgtctcaggcttaaattttttctgcaaaagggaatgcctttggatttctgtaaaagggtctgcttcaaggagaaatgcaacctgagagagaaggtcatggttttcacaaaaggctgtggttacaatgagatttgaggcttaaatccaggcttgtgtaagactgttatgtgttactagttgttaaaatattgagtgcttttatgcttgtttgcaaatagctacttctcccaactctgcagtggtcatgaccacttcatggtcatccattccttcccatgattcaacaactaaagtttattacttgccacaacaggggcttctaagaccctcattaaatgctatgggcaccaactgtttgaatgattggtgtgcttgctatgtgaattattaaatattttaaatattatttatgtttaatgtggtgcccaccagacccagatgtaacgtacagcttttccttggacagtatagagaagaccttgaagttatgttcttttaactcagtctttagtatttctctgcatgaaatccttcagctccatgtccagttgcaccgtggtagatttgcagggaagtggatggatgaaagagacaggagaaggaagagaggacagaacaatcaatacttgatgatgaacttctgggaaactgcgagcatttccatttgaaacaaatagagtgtttcttatacaatagccatatgtatttgtaaacaataaaatgcctgctagtgtacaatggattgcacttctctgatattatacttatattcttggctctgctttttttctggattcaaaatattcataagaaatgaaatatggaaccaaaagtcacacatacatacacacacagatacattttatagtagatacttgctgcttggcccagatatgttttgtggattaaattctaggccccatgctggatgccagactcactacccatgtttagacccctagacatcagacatttactgcctggccctgtgctcccagctgcccatccaggtggtaagttttatatctcgaaaagctttttcaggctgatttcatggtgaatatgtgttaatcacctcagggagttattgagaatttgggataaacttgattgggtgaacaagcagcatgtgtccaaatatagctattcctgagctgtatctttgatatatttgatgatgcttgaaaacagtccgatttacatccatcgctgcattataaagaacagggctgaagatttataagttgaattttgttgcaaatgccaaagcatgggccacagataaatcagttaccagaataagggtgattttataacctgcatgtgttttatagtttctcatgacacaataatcataaaattcaaaaggcacactcttgcaagtgtgaaaaggcaatttcagggttccttttggtttctgctattgcaaggcaggatatagatacagtttctcactatttagatttgctattgaagttttagtggagtgccaaagatttcagtcagcaagtgtcagtaaatgatatcaacacagctccaagttcaaggtggaatcgtttcttgaaataaagtgagcatttggtgcccagaaatcttgttttaaaatacaccaacttctcagttttggaagagctctttattttttaaaaatagattcttattatgtaagcatacaacttttcttgtatgttcctgttgctcgtatttgtacacatacacagtgaaagttatttttaaatcttttattcttatctgtaactgctgacagcatttgaggtgtggaaacttttaagactgaaaaatcaagtaaaggaaaattcaagcaaatgaatacagaaaaacattatcattaggagccttaataaaactgctgtttagcttgtcacgctggcacattcctgtaatcctagcactttgggaggctgaggcgggtggatcacttgaaatcaggggttcaagaccatcctagccaacgtggtgaaaccctgtctctactaaaaatcaaaacaattagctgggcatggtggtacatgcctgtagtcccagctacttgggaggctgaggcagaataatcatttgaacctagcaagcagaggttgcagtgagccgagattgcactactgttctccagcctgggcaacagagcaagactccatctcaaaaacaacagcaaaactgctgtttaactccacaaaagtcattacaccactatacattcactaaaattgctaaaattaaggaaaaaaaaaaaacagtagtaaggccaggtgttggcaagattgtagaatagctgaaactctcatacaggggtgatataaaatggtacaactactttggaaaactctctggcagtttctaataaagttaaatatgtacttacctctcctatggcctaacaattccattcctaggtatttacccaaaagagatgaaacatatatccatataacaacttgtaaaagaatgcttatagcccctttattcataaaaaccccaaactggaaacaacccaaatttccaccaactggtaaatgaataaacacattgcggtataatcacataatggaatactactcagctataaataaaaatgaattgctaatgcattcagtctagtgatgaatctcaaaattatagtgtttttgaagagagctgaagagacacaaaatggaccatactctacacttccatttatattaagtttaaagacaaggaaatattctgcagtgatagaaaccagaatagtagctgattgtagagtacaagaggactgattggaaaggagaacattccagagagaggaagtgtattataccttagcctggatgatgattgcatggtcatatacacttgccaaattgcattgatccatatgtttatgatttgcattatttgtatataaattatacctcaataaaatgctgttaacataaaaaaattgcccagcttctgagttcttgcttaataatattagtatcacctgttgctgttctacgttaactcaggagctaaattcaaattcagtgtatgacaaaatcttatttgtgtgaaattactgggacgtgtacttttgcatttaagaaaatgctccaaaaaactgaagattctcccttcatgttagaaacttaaaaataaaataaaataaaataaagatttttttgggaggaagggaatcttaagttaaaatgtcacaaatctctcctatcatgttagtcacttttttcttgacttggcatttgcttggttgccttaagcctttgtctatttttcagagttctgacagagttgagtttgataatttttgctggttttatcagtgttttcgtggagaaatgggcccttggggctccctactctgctgtttttgctgacttcaccaccaaccctcatattcttaactctgtatccttaatagggttgaatgggtttcaaaaggcaaggtaggcaatggatcatgatactaagtcaatgataggagctttgaagtgaaagaggtgtttctaacaaaaagtagatacacactctccacctacactcctcttcctccatcatatcatacaattcagaagcaagaagaaaacacaaactcatagactgaggccatccaccactacctgaaatgctgcacctcactcaacatgggatggggcttcgattgttatgatttaagcacttctgaaaacacactttctacttcctgtttggtcttaagtcttccctggaaaggtcatctatctccatgtatttcctataaatatctacctctcttattaagtgttacattcaaatgtgacaaattaaaatcaagtggaaatattttgtgttaatgataaggtaaagccaactgtgtatgtcagagtagaatatggcatgtgctcttatcataaatattacaggagctatttgtttgtcagggcttcatcaaaacatctgaaaattgcttgacttggaggagaatagactataatttccatgtctgccccaaataatcagtcattgacaacttagaaaattcttatcaataaagatggaatcaattttttctattccacaaaatgtaagcatatcattttgagacaaattttaaaatcgttttagacttgacaaattacatgaaagagacacttagtcagaaatgattttttttaatgaagtgaaatttaataagtgactctgaatgtctgttgatgtgttgggaagcccatctttgcttgaccaaagatttatccagtaataatcaaaacatctaagttagtcttagaatttatatatatttcccatcctggctaacaccctcctcagcatggcagcagtaggaaagatggcggccacattctctctatgggtacctgattctggaaggagcagagcagaccttattaccaaagaattgtgtttgtctgttttgacctgaagagtccctaaaagtacttgccttcgttttacctaacttggaactctcttagggcagaaaagcagccatgtagaggacattcctccaaaacatagaaaggtaaatgaacaagcctctgccacttagggcaaaagatgatagttgttataaacaatagacaaccctaaatactggaaggaaaagctggagaatgagttactttagagaataattgctttgaaaaagattccttataatagaaaacctaaaaagtgatgcatatgcccaggataggacctatgctcaaaagatttgagaagacactaagctttcaccttcagcttgagatcttaaggcttcacaacagcaggaaatgaaggctaaggcagagttgtaaacagccaggctaggagagggttgggtgtgtgtgtgtgtgtgtgtgtgtgtgtgtgtgtgtgtgtgtgtgtttgctctaggcatttagggaaatctgccaaaccactagctaaccacaagctaacaaaatagagacttcagagtccatacaacaaaatatatagcctttaaaaatagtccggaaaaatgagcaaagtgtttgaatagacatttatccaaagagatatttaaatggaaataaacacatgaaaagatgcataacatcagtaatccctcaggaaatgtgaatcaaaaccacaatgagataccacttgacaccatttggatagctattattgataataaataaataaaataaataaataaataaataaataaataaaataaataaaaaaaataataaaaatggaaataaaacaagtgttggtgaagatgagggaaactgtaacccatgtatgttcctagtgatgataggaaatggtgcagccactgtagaaaatggtattgtattttttcaaaaataaacatagagttaccatataattcagcaagttcacttccgggtatatatctcagacaattaaaatcagggactgaaacaggcatttgtacactcatattcatagcagcattattcacaatagacaaaaggtgaaaacaacccaaatatccatcagtggagaaatagataaacaaaatgtggtatatacttacaatggaatatgattcagccttcaaaaataaagaaattctgacacatgttagaacatggataaatcttgaagacatgctaagtgaaatatgccagaaacaaaaggacagatatttgtatgattccactcgtatgagataactagaggagtcaaatttatagaggcagagtggcagttgccaggggatcatcagagagaagtataagtagttattgtttagtgagtacagagtttcagctttggaagatattaaaaagttctgaagatggatggtggttggtgatgattgcacaacacaacattttgaatttagttaatgtcactcaactgtacacaaaatgactaaaacagtaaagttgggctatctatattttatcacaataaaaaatagtttagaaaagtcactaaagaaagaaacaactccaacccacagcaagcagcaaaaataaaccccaagcagtggcaagaatctggtttctggagttaccacataataatattcaaaatgtcttgttctcaacaaaaaattatgagtcatgagaagaaacaaaagagtatcccactcacaggaaaaaaatgaacaactctccttgaaaaagcacagatattggatctactaactaagactttaaatcaactcttacaaaacgggtgattaccagagcctgggaaggataatgggtagggaggtggagggggaagtagtgaggcttaatgagtacaaaaacataggaaaaatgaataagatctagtatatgttagcacaagagggtgattatagtcaaaaataatttaattacacattttaaaatagctaaaagcatatcattggattgtttgaagccaaaggataaattattgagatgataaatatcccatttaccttgatgtgattattatgcattgcatgcctgtatcaaaatatctcatataatacataaatatatacacctactatgtatccacaaaataaagaattaaataaataaatataaatgaatcaactgttatatatactcaaaaagataaatgaaaccatggacaaagaactgaaggataaaaaaagaataaagaaaaatgaacagaacccaagagacctgtgagacaccatcaagcataacaatgtaaggggagtctcaggaagtgaggagagagaaaaaaaggcagaaagaatatttgaagacataatggttgtaaaactctcaaagttgataaaaggcataaatctacacattcaggaagcttgatgaactccaggtaggataaatacaaagacagccacactaagagaaattgtaatcaaactgttgaaagctctagacaaagaatcttgaaattagcaagagagttgcaattaatcacatacaaatgatcttcaatgaaattaataactgatttcttatcagaaacaatggaggcaagatagcaattggtatatttaaaatgccaaaacaggaggaaaaaacaacctgtcaaccaagaattgtatacctggcaaaattaagaaaaaagtaaatttaagaaaaaagtaaaatatttccagataaaagctgatagagtttttcacaagtagacctgtcctacaagaaatggtaaggagatgccttcaggatgtaatgtcagcaaactcgatagtaacttaaaggtgtacaaaagaaataaaacacactactaaaagtaaatacatagtcctataaaaaggcctattttattgtattattggcttgtaacccctcttttttctcatatgatttaaaagacagatatatcaaatgatgaataaaaatctatgttagtttagtttacatacaatgtataaagatatagtctgtgacaaaaacaatttaaagaaagagatatggagaatataagagcaaagtaattgtatactcttgaagttaagttggtgttaaatcaagccagattataagtttaagatgttagttgtaatccccaggataactactaaaatattaactataaaatatacagaaaaagaaatgaaaagtatacttcaaaaatcaaacacaaaagaaggcagtaatgggggaattgagaaacaggaaagataagacatatagaacacaaatagtaaaaatgtcaaaagtaaatcctttctcacccataattacttttaaatgtaaatgagctaaactctccaattaaaaacagagattgtcagattaaaaaacaacaagaagattcaagtctatgctgtttacaacacattcactttagctccaaagatacaaacaggttgaaagtgacggaatgtaaaaagagatttcattcaaattctaaaagagaactagaatagctatactaatatcagtcaaaatagaccttaggtcacacatgctacaagaggcagaggacattatgtattgataaatggggcaattcatcaagaatataaaacaattgaaaacatatatgcacctaagagcttaaggtttgatatagaaaagggaatgagcctaggtcggtcttgtactaattcagtttaatttacctctctgagtttcattgtgtataactctgcaaatcctctttttttataacatagaaattccttcctacctttctttcttccttccttcttttaggaggcaagttttgagtacctacttttgacaagccctgtgctaagttctggagatacacatctcagtaattatagcccctgtaattgtagactttatagtccaagtcagtagctttcaaattttagtttatatgagaatcccctgggaggctgatagaaaatacaaactactgagcctcacccaatgtgtctgattcagtaggcctggagtgaggccctaagacctgcatttctaacaaacttccaggagatgctcatgctgctggtttgtggaccgaactttgagaactacccgtctaagtcatggattctccattttggctgtacattgacatcacctgtgagctttaagaataccaaggcctaggtctcatcttcagacttaaattgcttgggagttgcctggtcatctggattttttttaagcttctcacatgtttctaatacagaactaaagctgagaaccacttctcatttctggctgcttattacaaccacttggaaaggttttaaaaaaaaatactgatgtctagaaagcattatggattaatgcaatcagaatctctgagaattgagccccagcactagtattgttgaaaaacgtctagtgttgttcaactaatttgaaagtttaaccagagctgaactccatctaagcaaaggtaacatacaatgagtgaaggagagaggtaattttaaatgtcatctttttttgtttgtccttttaaattatcaagaagcagacaggaacataaatggaaaaccaagtctcccataacctaccactatagtatgtctattataatcatacatttttcctatccagtctttgaccatatgtgtgtatttttatatggatcatatatgtgtaatttgagattctgccaaaaaatttctttaagccacagaataaccttttaaaaataataagtaaaatgggtggcattgtcggattttctccatgttcactgaggaaagataacaagaataaacttgatctcagcaggataatttaggcttgtaactggaaggaccttcctagtcagcagaattaaactgctcaaggagaaaaagtggtgataaactaggatatggaacgaggaatcaaagtcctatctagaagccagatgatgggaaaatggccacagagagatgatctgggacttggcagggactgttccaggtagaatgctgaagaccgttagtggagagaatttgtctcttcatctgtatttcacttagaatctcctgtgtgtggttcaacattttgtggtggtttgtggatacactttctagtctaaaggaatagaactagattaatattttctattgtaaaatttagtatctttaacttagaacataatataattatgaaccgtataactaagttttgcaactcatgcagggggattatagataaccctagagcactcattctttatctgttctaagatagtcgggatatgagcagttgaagacattcctcttagttaatccaagtgggtgccaagacccatgcactggagagttgaaacaaaatacaatgagtctgaaatttcaagcagaagttcaagcgtctctttctattctgtcttgatacattgcattgaaagaactgctatggtttaattctatcagtgaaaataacagggtttgtgatgtttttaatttatttttccctccccacattaactttcctcatttgtgtttggtaaatttgcttcaactgctcaatttgcatgaggattaaatttcattaacagatgcaattagaaagtggaatttatagaataagtcttctttataccctaacctaattgacataaggattaccgatgtaattgactagaaatcctttcaagatagtcaagctgacatttaatagtgtttttctctataaaattaagaatgttcactacaatctacatataagaactaataagcctattccctccacccatcacctaaaattatagagctaggtcaattttatattcttgcagcaaaaaactcccctggcatgaggttgaacaaagtctagttaagcttgctatttttttccttttagtagaccctcccttgagtaaaaaaagatagagaagagcaaacggtcttcgctaagtgaactcatagcttagccaaagtctttcagagctgagtacggaggggctgcctcagtgggaagcagaaattaagacctgctcctccatacatcctacttgcatctttagcctcgtttctttacagcagttgtttgcaaccttggctgtacattgaaatcacctggagcaccttaaaaattgtaatgacaagaccccactgtaggattctaatatacttgggctgagatgcagtccacactatgtgagtgtgaaaagctgctcagcggtcctaatgtttggtcgtggttaagagctgctgctttacagtaagcagtactttgcctgtggccaggtaaggcaaaaatgtgcctggggactttgggaaaaagaagcaggttctctcagtaaaagctgtgctccggcagaaagccggttaagtgttccttgctgcctatttaagaagtaacagtgccaaggcaatcccatttgctctggccatgtgataattaacaattgatatttgtgtgaagccagcctgcctaacagaatggtgtgcagtctttcagccaaacagtacactggcgctcctctgtggacttaaaattgcattctaaaaaagtagatggcatttttaataagcaaaaccccagtttaaatataaccaactgaaattataagtaatttggtaatatgacttcatgtgggggtcatcttaacattaataatacctgaaatgaaataatttctaaaatatttctaatctcaaattactacctttggtgatattttgggtgatagactatttttacaaactagaaaagattctaaatcaggaaaagtacataactgaggtctggctttttgaagcacacactcactttttttatgaaatacctgtttgctgaccatggtgtaggccattaatgtcattacctctaccacttgaataaaagtgaatccttttgtagcttatagtgtgtaaacctatgagacttatagtatgtagatgtatgatactgacagccaaaacagtatgcatattatgataaatcactgggtaataaagtagccaatttggaaaattctcaattggagtagtccttgtgtgttggcaaataagacttgcatttatacagtgaacaaaaaagtttgcttaagaattaggagcaagtaattgattttttaaaaatgatgtggttctggtggaagtagtatagccctaccaagtagaaaaaaagcaatcaatttaattaaaaagtctcagctgaaaaaaaatttagttcccatctatagacaggggctctgtccttagatacagcaggaagattcaagaccccatcatctctctcctcccacttctcaacctcctcttggtgtgtttcattgtccaaactcaaaaggaagccaggaggtgaaggctggctgatgcggttcagagaagtttgtctcctggacacagtgcaatatggagaagctagaaagtaggtctgaaaacagagacaatttgactttttgcagatgacatgattgtatatttagaaaactctattgtctcagccccaaatcttcttaagctgataagcaacttcagcatagtctcaggatacaaaatcaatgtgcaaaaatcacaagcattcctatacaccaataataggcaaacagagagccaaatcatagtgaactcccattcataattgctaaaaagagaataaaatacctaggaatacaacttacaagggatgtgaaggaccccttcaaggagaactacaaaccactgctcaaggaaataagagaggacataaacaaatggaaaaacatcccatgctcatggataggaagaatcaatattgtgaaaatggccatactgcccaaagtaatttttagattcaatgctatccccatcaagctaccattgactttcttcacagaattagaaaaatttactttaaatttcatatggaaccaaaaaagagcccacgtagccaagacaatcctaagcaaaaagaacaaagctggagacatcacactacctgacttcaaactatactacaaggctacagtaaccaaacagtgtggtactggtaccaaaacagatatatagaccaatggaacagaacagaggcctcagaaataacaccacacatctacatctttgacaaaccttacaaaaacaagcaatagggaaaggattccctagttaataaatggtgttgggaaaactggctagccatatgcagaaaactgaaactggatcccttccttacaccttatacaaatttaactcaagatggattaaagacttaaatgtaagctctaaaaccataaaaaccctagaagaaaacctaggcaataccattcaggacataggcatgggcaaagacttcatggctaaaacaccaaaagcaatggcaatagaagccaaaattgacaaatgggacctaattaaactaaagaccttctgcacagcaaaagaaactaccatcagagtgaacagacaacctacagaatgggagaaaatttttgcagtgtatccacctgacaaagggctaatattcagaatctacaaagagcttaagcaaatttacaagaaaaaaacaaacaaccccatcaaaaagtgggcgatggatatgaacagacacttctcaaaagaagacatttatgcagccaacatacatatgaaaaaaaagctcatcatcactggtcattagtgaaatgcaaataaaaaccacaatgagataccatctaacaccagttggaatggcaatcattaacaaatcaggaaacaacagatgctggagaagatgtggacaaataggaacaattttacactgttggtgggagtgtaaattagttcaaccattgtggaagacagtgtggtaattcctcaaggatctagaaccagaaataccatttgacccagcaatcccattactgggtatatacgcaaaggattataaatcattctactataaagacacatgcacatgtatgtttattacggcagtgttcacaatagcaaagacttggaaccaacccaaatgcccatcaatgatagactggataaagaaaatgtggcacatatataccatgaaatactatgcagccataaaaaaggatgagttcatgtcctttgcagggacatggatgaagctggaagccgtcattctcagcaaactaacacaagaacagaaaaccaaacaccacatgttctcactcataagtgggagttgaacaatgagaacacacggacacaggaaggggaacatcacacactggggcctgtcagtggttggggggttagggcatggatatcattaggagaaatacctcatgtagatgacatgttgatgggtgcagcaaaccaccatggcacgtgtatacctatgtaacaaacctgcacattctgcgcatgtacttaaagtataataaaaacttaaagtataataaactttattatactttaaatataataaagtattatataataaagaacttaaagtataataaaaaataaaaaaaagaaagtgggtctgaataggcaaacagaaatatatggtatatctgtttaaccaacagctttcctctcctttctctggaaatgtaaccagctagaagactggagtagccatgtgactaattctgactaatgtggtgtaagtaaaagtggcaaggtaggactttaaggaagattttttttctcaagaggatatagaccccagaacctgtgttttgtcctcagtcatttcctccttcatgatacctgcaaaacggaggtgaagattgaggttccaactgccattttggactggatttaggcaaatttgcatttggatgtcattgctaaggatgggagagcagaaatttacaagaagtgtgtgcactagtgactaaagccaccacagcagcgctggattcctcttctgaatttattccctgtgaaggaaaattaatcattatatattaaaaaaatcaacagttcaaaagtttcatctcattatgtatttgctatcaattatataattaaagtatgatgtaggaatttttaaatcatcgcttttaaattttaaaaattagttctaagaccccaaactatgtgcaattttacaaagtatatttgactgccttacaacaggctactatctacttaggtattgtgcttacttcagatgaaaattgtgccttatcaacaggtggaaacaatcattaaatattaaaaatatttgcttaatgtagcaagtgaatgggtggacgaatcatctcagtttctatcgggttttcagcatgtgaacctagtgtttaccttgtcaaaaagttgattgtttctaataagcaggataacagatattctagcaccttcaaagtcgaacagagctgagaaatgaagtgtgacttatcctgtggaatgtaaaaaacaacattttttaggaagcatgtgaatatgaatgagaggatgatcatcatttaaatatcaccaaataaacataacatttctgttgggcatcttttgagcagttagattttccatggaatatgttccagctttgttttgcttggttggtaatcatagcactgaatttaataaatagatattattgaatttccttggaatgttcctggtgttgtaacataaatttagtgcttaactggctatgatatatggctacatatctatagtacttacaggtggtgaagtctgttttaggttttctgcacttcggttacttagcttgagctatcttgagattataaatcacttcttttttttttttttttcaaactacacattcatgacatacagcatcaacagaagatgatttattctgtgaccctactggcaaaagaatatattgatactataattttgctaggtgtcatttgttcttgagggttccttgtgttggtatgcaatagcaaattaatccagaattgcaaggtagaaggaaatataacagaactcgtaattctgatcctgagtcagttagctgaataacttgatcagatcacatctaatttttctcaatgagagcactactggcatctcaggccattgtgtgatattggcctgggcactggcctcacaaacactgcaaagcagtagcactttcagccagttaaaatgtcacggacttctgcagcagcctcttgatttgtgtgttccagaacttgagctccagggacgatgggccaagtttgggagcaagtactagagttttaacttaaagttaaaagcggaggggtgctaaaatgttgactctgatacaggtctgtggcaatttaattccatttccccctctgtcttgaaccccttctacttgaccactaacagtttttagcctaaattatccggatacccaagtcttcacttcattctcccctgtggacaacccaatgcctgggaacatgatgttcataagtttagtattctccaatacatcaagatcttgatggaaaatctctctaaaatagtaatgggaaaaatcttccctccaaaattccaattattttgagtgaacatcatcatgcatataaaaccaatgtcactggcatgcatcagaaactttaatttaacataggttagcaataatcattagtagtcgaaacttcattgctgatcagtagtgggatggtgcctgtgaatagccactgcactctagcctgggcaacatagcaagactccaactctaaaacacataaataaataaatactttaaaaaaatcattagtaggtggtatgttccttctctacttaaaagcaaccaatgttgaaatgtccatttgaagttgttaaaaatttttaaagacatgacttagaaattgcgacttagcaactaaagctgtgactttgaagtcaatttatactttaaagggaatctattatcagttaagttttcagatctcataaccaaattggaaatctgaagaagtcagaagttctaaaatgcagtgttttgaaaggacattgatatatagttgtgatattgtcttagcaacacatttttctttaaaagaagaatttcttcttgtattatcaatccttaaaatgggtcatgtattcttggaaaacagggtattcatgcaatctttaaaacaccgtctaaacttcaagtgaacttcaaacagcccaaaccaaatatatgctggataaagtgtattgtggttactggaaaactttaaaatatgaaacattcctattgctgttggtattttacctctgagaattttctagccaaagttctatttgaacagaggtcaaaaatcagttactgcgtgggcttttcttaagggatgaatttaatgaaagggcctagttattgcaacatatgctgccttcatttcaaaagatttccttaaagcataatgattaaagcctgtggagaaaaaaatttgtacttttcaaaagctccatgaagtaccccacagaaggaaaaacaaagttctgaatccacatatagaatgaataaatattccttttagcttaaaagtcataaaaatcattagttatttttgctcccttttattgaaagtgttttaagagttttaaaagaccagtgtacactgtatcaaatattcctgcttatttccaaagaaaagtgaactgctttattttgaatttttttttttctttacacagagtagggaagaattcaaatgttcagcaagtattcttaagcacctaagtcattgcactaaagtaaatctcatttgatggctctcttaaggtggattctctagaaccaaagactgagagacacttttgggtacaaagagtttatctggaaggtgatgtcaacaagcaccagtacagcggggagaaatagagagaaggaaaggcagcaaggcagccaatatggtgtgagttaacaagcaggttactattgtggacaactggaagctaatcccactggagtattggggatgagaggttataacacagatcttactgttatcccacatgaggggcaagggagcagaggtagttatccaccaacaggttttgattgatggatgcatctggtttgtaagggagctctcccttgaaatgctctttcattcaaccactgctgctcatcccatacttgggcctactggacaccagcaagagtgcctttaggcagaaagcttcagttgtttgcctcgaaagtcatcgtaggaatgatgggaactcagaaaatattgccaggacactgactacatctgccacggtgaaaagctgtctctaaaatccaactacaaagtaaacaagtatttccccaaaagataaatgttaatagtaaaatacatatcagaaattatccaaactgtctagtaatcagaaattaaaacaggattaatccaaattgaggggtatttaattatcaaatttttataaaactgtgataaagcctaatatggcagggtactgttggtactaagaatattatttttaaaagccacttggcattgtgtttcaataggtaaatcaatgttcacatacactgacctaatgattaaatttctaggatataagtatgaaagaaacgaaataaaacttgaagagagtgacaatatcctatgtgtccacaaaaatagggaaatgattaagtagattatagtgtatgcaatcactgatatttttataatcaataagattagggttgttaaggtaagtattagcatgaaaataaatgcttatactgtaacaataagtagaaaaatgatgcacaaaagtatacatgcattccagttgcagctatcttatttttcaacagcattaaaaactactggaaggaaatacatccaaaaggctaatagtgattaaaatttactaccagtgtcaattacaatgttttatttgcaaggaacagaaaatccaactctcactggcttgagcaatgaaatatatttcttcatgtaactgtgtaactagaaagcccaagggttgggcttcaggtttgaaccagccagcagctcaaccaggtcattaaaggtctggttgtttctcttcactcttccttaatgtttgcttcatgccaaagcaggctgtcctcttggttgtcattttgatgccaacagaaactagaactagaaactagatgcttccatgctcacactgagggtcagaatgagggcttttatccctcaaccattgaacaaaatttcagaggtcatcttactatcagctacaagcctgtcggtgaacccaaaactgtggctgggggataagattggttgtaagcagatcagggcacccctctgcaacagtggtggagtcaattcccctctaagtctgtggcttccacccagtgaggaaggtagagagtgggtgaagaggagacaatgccaatatctacggtaatatatgaatatatataggtatatatgtcgtttttgcatgtgggtgcatatatgtaaagatacatatatacgaacacacccatcaacagaggaaacacaactgcacttaccacgctgattaatttttttatttactcattcagctgacacctactttgttccagacactatcttagagaccccagaaacaacaataaataagacagttaaggtccctgatctcacgcagctgacacctactttgttccagacactatcttagagaccccagaaacaacaataaataagacagttaaggtccctgatctcacggagctgaaatcccagtgaaggaagacaggcaataagcaaatgagttcatgatcaggaaaaatggtatgaagtaactaaagcaaggtgccagttggagtaaccaggtgtattttgttttcttttgagtggttagaggaggactctttgaggaggagacatttaagctgagatctgtatgaaaagaagagccatccaggcaaagatcaggggtctggagcacacagagaagaaagctcattagtacaaaagggctttaaagtcaaagtaatcctgggattttggagaaatcacaagtcctgtgaagcagagccatggtgtatgaaaagtggaatggaataaagagagtgtggaatggtatgtaggcaccaggtcatgtaaaactgtggagacaatggttggaatttgggtgtcatgcaaagagcaaggagactcatttgaatgtttttagtagaaaaagggaaatacctatttgtgttttttagaaatctgtttgggaggccaggcatggtggctcacgcctgtaatccctatcccagcactttgggaggctgggacagagggatgacttgaggtcaggagttcaagaccaacctagccaacatggtgacactccatctctaccaaaaagacaaaaattagatgggcgtggtgccacacacctgtgatcccagctactcgggaagctgaggcaggagaatcacttgaactcgggagacagaggctgcagtgagctgagatcatgccactgcattccagccggggtgaccaagtgatactccgtctcaaaaaaaaataataaataaaaaataaaggatctgtttgaggatggtttataagatggcttgtggagagacaacaggaaattcaggcctgtacttgtctaggcaagagatggtgacgacttgaactaaagagtaatagaggattgagaggaatggaaggcctgatgtatactgtgtggagataatgccctatgtcctactgatggagaaagtcatggaataaaggctaactcaattattttatgtgagcaactggtgggttgatgggctgtgaccaagatgaggaaaacgagggaagatttggaaagaaagggaagaactaagaacactttatggacatttaaagctcggggtgtctgttagtcattagggctgattacatatttgctggcacactccaaaagtgaaactgaggggcccttttccaaaaagcaatgggggaagtgccaataaagatactaaaatagaacacttttctttcttctgcaatctctctcttgactggtaatggtatttttttaaaaattactatttaatgtcattctaagtaaaaaaaaattaaaattgtttattacgagttttaacattcattcttacattgtgcaatgctattttcagcaaataaaatgccattttaatcatttaatttatatacagaatcacaaaaattatacaattcacatttcatagatagtacatgcctatgttttttgttcttatcaagatagaggaactactgtacaaaactagtatcattgtttttattttacttcttgatacatgaacaccctaccagccttctgtaccttcagcttacttatgagaaaggaaggactggaaagaaggggaactctgggttgttccatctttctcactttttctatgtcattatattcagtgtaatggttggctaatagaaataacacataatgattaggattattggtgtttcatgttttagaatgctatttctgcatttgaagcaagttctgattctaatggaaagcatgacttttcatagatgtgagaacctggagatgtaacacttttatcatgtagttggtttgagcctcattgaactctcattgtggatccatggacattctgtgcacccgagcattgcaaattcaatatgtgagcagggcagcaaagaacaatggacatgtatcttgcacatatctcctctgcttatgtgcattctccattgttcgatcagacttcagttacaaaacacaagctcaaagataaaatgatggagaatttcaggacaatgactgcagaacattaaactaagcatgggtccttctgagtactgggccctgtgtgactgcagaggcctcacactcatgaagctggccctgcattcatgtggaaatgtgtaaaaaatagatattgaagtcgggagagctggtgaaaggtcatttttggagatgtaggcttgggaattattagtatttatatatttaatatttagggcatagacagggtgagaccacctacagggagtgtgcagatgaagaaaatttctcagaaaagaatcctagacactccagtaacacaaaatgccgtggacctgaaaagtatattgagaaggaatggccagaaaagtaggaggatagcaggaaagtccaaaattctaaaacccattagaagacaatagttaaagtagagggatatgatcacttatcttgaaagctactgagatgtcaagcaagatgagaaaggaaatgtcattattggatttgccaacataggggtcattggtgaccttggtgaatacagcctctctagaaaaaggaggacaaacattcaagtgaatattcaggagataatgaatggtgagaaaggagacagcaatgttgacaactttttcaagaactttaactaggaaatggaacagagaaatggtgctgtgtttgccgaaggatggggtatcaagggaatgatgtcaatatgtttggcagcaattattttcaatgctgcatactattccattctctgaacctattgtaaactatatattcatgagtgtttagtatatacacatacctctgttttgcaaagcagtttgtcatgctactaccatcaacagggacaagaggtcccaattattcacattctaattcaaagtgtgagactctggccaaatgatccttctgacctctctgtaaaaagaccaagttctaaatgactttggctttcactttgatctctgttaatcaagatttactctgagctcccaaaggcataaagagctttttccttctggtttcttgcttctctccaagcaggactttggagtatcagtgggtgattacagtgatagtttccttcatggctttcaggccatgaacaaatgaaaacagaacaaaaggccaagaattccatgcttctgtaagtctgttatttcagggtaattacacatttacatttttgcagctagcagctgatggacattgtgcaaaagggaaaaaaagataaatgtagatttttttaaggttttctttatgactttgtttttaaagactactttgtgtttgaaacatacaaattagagctcaaaagtttccagcaattagtttacacagcaaaagagaaggaatcaaggccaaagaacaatcttatttaaaatgctgtggttggcctggcatagtggcttatgcctgtgatcccagcactttgggaggctgaggcaggcggatcacctgaagtcaggagttcaagaccaaccaatatgggtgaaaccccatctctattaaaaatacaaaaattagccaggcatggtggcgagcacctgtaatcccagctactctggaggctgtggcaggggaattgcttgaagacaagaggcagaggttgcactgagccaagatcatgccactgcactccagcctgggtgacagagcgagactccttctcaaaacaaaacaaaaaaatgctgtgtttaagaagagggtatctgaggatcatggaattttagtcacagaaaaaaacagaaatactaagtgtttattattcttaatcagtttcatcacatgtaggtcctgagtcaaggacttgaatgaaaatcgtttattttgaagaagttcccagggaacagcattagaagtatgtcgaagggaggaagggaagtgatgtagtcaataaaggatatgttatcaagccattactactgtgggcaaccagagtcaatcccactggaaactgggaggcatgatcaaatacaagcctcagagtttccccactggaggtgcaagggagctgggatatttatccaccaactttcttgagtcattggttgatggttgtttccaggagacatcaactctcttgcacttccagcctgttaggccttaagcaggctctggccatggaaaaatcacttcaacagaaaagatataaaggctgatagttagaagtcgagtccaaattcaataagatggtaaagagagacacagctggggaatcaacagaggcctgtaatcggtatggaagggacaatagtcgttaaaacaaagctccctctgtacttgtttctgacactaatccaaatgaggacctccaattcccccttaggaaatcatccatttagtccaacccatagattggcttataaggacatggaggctcagtgatacttagtgacttgctcaagggtgcacagatgcagtagagaaattggacatcttgatgtattaatatgtgagtttgatgaacatgagtaaaatgtgtcttcaaatatttagacagagagaaagaaaatagctgtctgagacattcaagtgaagcatttcaaatggaaacttcttagcttatacttagccccagccagactcagaaacagatataggcactagactagacagcatcaacattccaacaggagttttcccttcaccgtggaagattattattgtgcccacagaaaatgtctgtgcatagacagagcccatatgactcttgcattttctttcctgacttagacataaatttggcaaaggagcatcatgcgaagtggacagaacgttccttttgtcctttgaactagacaagaatcaggcaatgaccctgccttagcactttatttagagatgaattcccccgctctagggttttggtggacaggtttatttcactgtaagtgggaaaattcctggctgtttctcacctcaccgaagagtgctaacagagggattcccattgatctgatttgtttgcactgtaaggctggattcaacttcagcgtgaaatcatcttgcaatctgaaataatcttgattggatttccgtttggattaacatcacgtaagagttgatatccactctaccatcagagattgtggtctatgctacttcttttgtccctttgttttatataagtaacgagcttggagatgtaaatcagtcaccattttaaactgattgatcaaactcagtaagaaataaaaccttttcatggaactcactcagccttcaaacatttgcaaattaactaagtcataagtactctagaccaatttataaaaacacagttaaaatatctcaattaaaatcatacatactcacatgttcaaataaactgcaataagcttctataaaattgcttagaaaatataatttctgttttaaatttgtaaattatttcccaggtcatcaaattaataattgaaaaaaaccttctaataattggtgggtatttctgcctaattttcattaaaagtggtagtttagtctgtcctcctgaagcacttaacctgattttatatcttaataaaggaacactatttaggagtttggggactgtgctatgctgtgaaagccattccttggagcccatttttgttattgatgaaattcttccagtctgggatgaacaaactgtaaagccataaataaaagaccaaggagaagaaagacactctgatcagacattcctaattctaaatatagtttaagaatctgtctcctgttcattttagcaaaaggtttggagataacatttcacactgacatatttccatacaatcatttaaatttattatttccagtttttagtgtaaatatacatatacacatagtctctctttatatataactaaaaatctaagctcatcctagaaatattttgggaatatgtattttataaagaaacagaatcagaatataatttgttactcatctctctttccaaaggcaacccaagttaatttcctggaatctctcctagtagtatttttaagcattcatttgtcttttatctagctggaattaagttaaatgtgggattgtgtttcatgccattgttttatattgtaagatattaaaacataatatttttaagttgtagccatcaatttaatgattaactacacaataattcatacattacctacatttctatgagtttttcaagtctacgtgtgatggtgagacctgcatttgagataaggggcaaaccgagtgcatggaaggaggtacagaggtaatattagagagctgaccttaatcctgtagagccaggtcatgaaaagggagtagagaacctcaagagaagagcagagggagaaagaatgtgagtttgacgacaagttgcattaataaaaaaccaacaatcaagtcatgtattatttgtagacatacaaaagataaatactttttaagagtcttgaggccggatgcggtggcccaagcctgtaatcccagcactttgggaggctgaggcgggcggatcacgaggttgggagatcgagaccatcctggctaacatggtgaaaccccgtctctattaaaaatacaaaaaaaaaaaaaaattagctgggcgtggtggcgggcacctgtaatcccagctactccggaggctgaggcaggagaatggcgtgaacccgggaggcggagcttgcagtgagccgaggtcgtgccactgcactccagcctgggcaacagagcgagaccctgtctcaaaaaaaaaaaaaaaaaaagaatcttgaaaataacaatgttgaatcataaaagcatttcacattttccttgatgaccttctaacttaagcaatcttaactggcaaaactaaaaaatcaaaatattaataattcccccacgatatgtgtcctagtttagtttataagtcttggcacttaagagatctaatgagaacttacatttaaaacatgttttaaaataaattttaaaagctagagataaatccatggacagtaaaccatgctagaggtaaatccatgggcaataaaccatgccagttctcttttctgtgctaattattagattatcaatgcctttatttttctcccctttctgtcttcctcttttgattttgttttcaatgttaaaatgccaaggcacttataatgcttcccatattaggttttcttctgaaaaccatttgtccttttctgtataccagattctcattataactgggtctgtgcgtgtgagctgtggagcctccacctttgtaaacaagcctaaaaaaattgcttctgtaactaataagcctgatgccttcagcccatagggatctctttcatctctgttctaataaaacttactagcaattaactcataatcctaacctctgtaagcctttgtaatttatttttggtatactcattcctttgtcttcactgcttaataccttattaagaataaggactatgcaaacttttgtgtgtgtctttcagacaccaacccagtatttggcacataatatacctgccattaattaatatttttgctgagtgagccaacttcctttggatgggcatgagataaccacttctgtataatacattctctccagggcaattaaagcagtttttcagtgtgtgaaggttgtaaatgatcaactctcaacagtccttgatcttttaaagcacaatgagtgaaggaaacaaagctgttgactcataaaaatgaattaataaaaagtaacctctcctaagtaagaaatggaatataaaggatgagtgttgagtgaccacaagggccataactggaagttgtgatggagaacacatgtgagttatttgcaagaagagtaaacatattaaagatgaaaagctctgtgcaaagaatagtcctaaccaatactgtttaaaggactatccagagtacagacgatagatggaattcttagggaaacagcctgtgcttgttcccccaattatttctctgggctttgtaaacactgcatatttagtgtttgtccattaccattcggggtcattacaaaagaactcagccttgacctggattcctgagaaataaattacagcttttcttattaccttccagtagaacttgaagcaataattcaaactctacgttaagtcatcatatatgatcacaagtgagtatgttaataacaaaatggatattcatatacagacccgagtaaatttctgatggcagtcacatcttgataggaataaatactgattcattacaaattacttaataaatgtacatctggattctcaagcattataacagatgatagaatattaatcttgtttgttttcagagcacttctttttctttaagttatacttgctgctatttacttcgccagaagactgattgcattattggccccaattcttcatcattactacctccctggatccatgcccttagacatgtaactttataattgccttctactcagcaatgtgacacattgcaaatgagatgttggcaaatgtcacatctacagagaaataaaaagcagttgtgcaattgggcttgctcttagggttgtcctctgacactgccatgagaaggataggcccaggctatccggccagaggaggaatcacatgggctagagctgagtatccacagttgtctcaaccaaggcaaccctagataagccaacagcaagtctaccttcacacatgtgagcaggctcagtcaaggcaagcacgaccatgcagtctacccatacaagcgtaagctaaacaactacttattgttccaagcctctacatgttgggttagttcgttacatggcattagtatgaaaatacctaactgatacaccttgatttctcaatattcaaatataattgcttcttattaatcctaagtatagaagcatatggacaatgactagaaagactttgagtaggtcccattcataggatgtgatatcaaattaaattaaaaatacaatgtatttttcccacaaaatgctgagaaagtttgaaccattctgtcttcatttttttttcctacactaagaaccaggtgactatagaagagtctagctggccttatattgggttctctaggattatgtatggagggagcatgccgtgccacaggggcccacatagggaagcaccaggatcatcaggagacagagggagcaaggggaaaaatgtgagcaaggtcttttattgttgtttccacaggaacaaataggcaaggtaatgtaaggcaggcttaggattggcttgtttgaataatttcagcaggctctggggtgtaggagctctctctattgtctggtacctggccctgggtgatggagcagtagaatattggccctgagtatgacagcctaatgagaaggtggtgggtatgtgggctctggattggttagtttgtatatgacaggtgttgtccttgttcactgtctccaggaattagctagccctcagtggggcagtgcttccagtgtcagcgaactccaaactggggtggccccacatgtcaaagcatcaaaaatacagaaaataaaaaggcatgactaatacaaccttcccttcaaaaatacactcctaaggcaataatatattactgttcttagagagaaaagttaagggagttgcactgtacttaaagtcatgtagttacgctgtgataatgatacaatgaccacaaaaatctcaaaatatttttaaaggaatcctcagtcttatataaagtttgcagtgttaacttcttgctatactgtcctctttcgagggttttctttccaatgatcaacattgattgatgtaggaccttcttagcgttctgctaaatatgtgggaaaaatacatggcgtgtttcctgaatttgtggaatttttgcaggggaagcaataagagagaaatagaaggcaatgtgaacttaatatgctttaataatgatttactgcacaactactgggtgctaggcactatgataggtgctgggggatttcagtcaaatgccatttatgctttcaaggaactcatagtttaatgagcacaaattatatgaaaacaaatgattgagctatggtgagcagtcaactctgttggaattagtcagaaagcttcagggaggagatcatcaaggtgggccttcaaggatgagtttgacacagggctgtaggtgacacttcgggcaaagggaactgtatgtgcaaaggcacagagtcaggaattaaagtgtcataagaagctacaaacatttcctttacaaccaggaactggggtgtgtgtgggaaagtggtaagacattaggctaatccagaagcaggttgtgatcaaggaggagctcaaagtctgtactaaggagttagggctttaccccactaacaataaggaacaattcatgagtcttaagcagagaaataatataaacaacctgcctgcttaaaaggttattcaggctttgctatgaaggactttaagttctctgagggtaggaattctatccatctttttcacaatctgtaccccagcacctagggcctggcacctaggatgtattcatgtagctgagaacgctgtgctacttaaatgttccaatgctcccccgtacttcctagttctctttgcagttagactggagccctgtgattagttctgtccagtggttataaccagaagtgacttggcgaccatttggatataggaggtgaaggtgaaaagtgaacctaggatgacatttgaaatcttgcttggggtggttcagaacaggttataaggaacaagtatgggacaattttggatgtcctgagttcaagatgactgtgagatgaagtttttaattagaatagagctaaatgttacaaggtttgacataggcaacagttactatgggaaatcaggaaggtaaagtattaaacatgtagcactttgtgggttctgctagagtgactcactatccaggtttgcccaggactgaggagtttcttgggatgcatgaaggactgtcaatgccaataccaagagagttccaggcaaaccaggatggttggtcatcctaagcctgctataccttaccacctgcaaagaatagctattgagtatttctactctgaattcagaagtttgtattcctccgaacctctgtatctcaactaccattcagttgtatggaaaatgaatccaaattggccagagtaggcaagaaagtataaattctgtaaaccagtgttgtgcgagaaccaattcacaccagctcacaagagctgattttactcatttcttcacaactctacatttgctgagtcatgcgaataggttgcagttggccatggtgggagaattgacactatggaaattagcaagttctacatattagagcttctctcccctatccccaaccccagaactggttgttaaacatttaccaggacacctctgccataagctgagttgaaaaggtttggaagacattatattgtggggatagcccaatgtagatgctattggtacctcaccctgcatccctttacctagggagtgcacttatcccccaggtgctgtgagtgttggcagctaacaactcacaggcacccctttttctaggaattgtcctcagccaacaggagttgccgtggctggaatacctgggaggtaacgccctacacccaatagtggcccgtagcccatgattgactcatagagtggtgtcaaaggtcaggctttttaccctaagttgggacagcaccgtggtaccattcatactccagaactctccaggatcaggctgagaccagtctccagctgtaactacgtccttgcctagctgcctctgcttccctatattgcttcccttattccctcatctgtttcccctgagagcttctctcaatgaatccctgccttatgttcatattaataatagccaaaagtagaagcaacccaaatatccattgatggatgagtggataaacaaaatggagtatatccatacaatgtaatattatttggccttaaaaagaaaaattggctgggcgaggtggctcatgcctgtaatcccagaactttgggaggccaaggcaggcagatcacttgaggctaggagttccagaccagcctggcccacatggtgagactctttctctactaaaaatacaaaaaattagccggacatagtggcacatgcttgtaatcccagctacttgggaagcagaagcaggaggattgcttgaatccaggaggtggaagttgcagtgagccgagatcacaccgctgcactctagcctgggtgacagagtgagactccatctcaaaaaaaaaaaaaaagaaaaggaaaatgattctaacacatgctccaacattgatgaaccttacattgatgaaccttgaagatattatgctaagtaaagaaagcctgtcataaaaacacaaatactgtttgattccattcatatgatgcatatagagcagtcaaattcatagaaacagaaggtaggatggtggttgccaggggctagggagaggaaggaatgaggagtttttgtttaatgggtacagagtgtctattatgcagagtgaaaagagttctggggatggatactgtcaatgattgtacaacaacatggatgtctttaacactgctgaacttaaaaatggtaaaagtgataaattcttatgttatttctattttatcgcaattaaaaatacaaaataaaagacattaaatagtttttttaaaaaacataaaatacaaaataaataaattatttaaaaaccctcatcttaggctctgcttcaagggaatctaacctaacacagtcagcccaggagaatttctatggaatgaacatataatctccagtacatatgccatgtgctaacaaacacatgagagaactttatgatctgtgtgctttcgttgagcagagaacgtccctttgattcctgagcttactggaatatcattacgtaattctcccccatttcctgctgcatacctacaagtaatctcaaaaatgctttcaaggagagttttcaattttgcattttgaactttggatctgccttcatttaactaagtgagagaaggagaaacaaaattccagtgtattagcatgacatttaaggtggagaaatgtaggcagcaggcaatcatgtggagcagcggtttacagctgaattctaccatttgtagctacttaacatgctgaaccattcctctctgtctggaaaaatcataaaaaggggcccgtcagcactctgagtcactgctaagaagcttatgcagcctcacacctgcatttaaatgagtgtttccggggcaaaaatgaaggacctcagagaaatgaaacggagcactctagcagagaaaaacgatattggtttctgtctgcatttgtaaattaactacaagaagaacacttctagaattagtttaattattaatagaaatcgctttgaacaatttttttgcttcacattttattttaaatgaggacggtcatagaaggtttatcattaggtggcaaaatttgatcatattcaaaatgtaaagaaacagccactgataccaaggtatggtgcctcacacaaagtaggaattctgtacctatggggtgaactcatcaattacgtcaaactcaaacataggtttcaaaaccaggacttgtgcatacttcatctttagtttcttctttctcaaattttactgcttagtaaggtatagcttacatagagtacagtgagtaaattttaagtgttatgttttgactaatttacacaaacacacacacatacacacacacagacacacacacacacacacacacacgtggagcccccatccatattgaaatagagaatttctagtgccccagcaaccctccttaattacctccccaccaagagaccactactatagatcttcctaaattttcacgcttccatggaagaattgtttttccaagttggagcaggagtaatctagtcatagtatcccttgattcttatttcaagattctcttttttttttgagacagagtctcgctccgtcacccaggctggagtgcaatggcacgatctcggctcactgcaatctctgcctcccaggtttaagcgattctcctgcctcagcctccttagtagctgggactataggcgcccgccaccacacctgactaatttttgtatttttaatagagatgatgtttcaccatgttggtcaggctggtcttgatctcctgaccttgtgatccccctgcctcagcctccaaaagtgctgggatcacaggggtgagccaccacgcctggccctcaagattctctttagcccaacatgatcccaagaaatcattagtcttttactgcttaccctcagaagggatcacccttgcactgccctcattgggtgctcttgcccatgccatggccagggtctcattgtgatccttggagcttcggcttacttttggggggcaaaatgcttccaagactctcagtattatagctctaggtccatttctagatgcatgtcctaggtgctgaactaggtcttttcagacattccttacctgccagaggtaagactttctctgtgcatgtcctggagccagagccaccatgctgtcccataagctgcggtctgatggcagaggcagactccattgccaagactccagttcactgacccttaattgtgcacagctcagaagaggtcacagtttggctcagacttcttgaatagcttctagaagaattgtttgaaatgagaagatgttggaaagaactagaaactcttctttcatgatctactccacacacatttcactccaataatactaaacagcttccagttcctggtctaccatatcggttcatgtctccctgtctttgatcacgttattaactctttttagaatatatcacgtttttacccctcttgacgtgatgctttttctttttccaagtctgagctgagatgtcatattctagaaccacaagttcagctaagtccctcttctctagggcctcatgctaatgagcttctttagcattgcttccactgtctcctaaatgtgaggtggtctctgctccttgccagctccaagtgaccaaatagtatctttttataaactcaaatgtagacactatctccatgaaatcttttcacctcttctccaatgaagcgctttgcttcttctctatgtatatttgacacttcattaatacccctcagtggtttttcatatttttatttttcccgttagattgtaaaacctccttcagaagagttttgtttgacattgaattccaatctactccagtgcccagctcattaccccagattcaataaatgctcgctgaatgaatgcatgcagagctgagtggataagcaagcctccttgattaatcacatcaattaaactgggtcaaagatgttttgttatattggttccattatctgactttcggaaaagcaatgtgacctacagagttgacatgcccttgatatggcaaaagatgagtttcatcctcaaatatcccattagcattttattttccctgcttagagtatatggttgacttattcctgtcacagacctaagtaactactaatattgagattttctctctaattcttctgacacttcttctttttcttttttatttatttattatggtttttttttttgcctaaaaagcgtcatctttctggatcacgtcaccgactctagcctttggctttctatccagggacatttttcacaaagaaacaaaactgtttagtgatggtagcagagttatcaacatggtaagtagggaaaaacgtatttgcatttaaaagcaaatcctggacctgtggcagagccaggcttgataattacgtcccttacattggccggcctgataaagcttggatattcacagtgacaagtagcaacccgctatagaccttagtggtcactcacaaataggaaaaaaatcttggaatgttaaattcgcagattagagaatccccttttcacattttctgcaaaatccattttgatgcaaattagattacagaaaatttaagattctcataaatgtacatcatatttctgttagtgacgttttacccttgcccctccacacctttgtgtttaggctcacacatttcaatttcaaaacccagaaccatggtattaattctaaaatctgagctactaaagctggggccctcaagtaagtacaccatggaatctgcgagatagaaattcctagcctcgcattttagtttaaaaagttttagtttgaaagtatgggggatgagctggtggcataagctgtataacaatgatatttttattaaatttgaaggcctaaaaatatcctgtagtaggggaaagtacttttacccaccataaatgttattaggtttgtgtaattgtgccaaaattgtaagggcaaaaatgatctgctttgctattgtctaaaactaacgccagcactatcaattaaaaaatatatatatatatatgatctcaaaaagggagatggtgtagaatctacttagctttgagcagtaccaacagagaattctcctaggactcatactaaatgagttgggttattattaattagtaggagttaaaacaattatcagatcatgtacagcactgttcttaatgcagcctgcctagggaccctgttaggagggtgtgtggccatttgactcttgctttctttatgtaatatcataatgacccaagctagggggattccaacaatgatatacagcagcttatacaaaaggggacttcatgtcattccaaagagtgaaagaaaaacaggaaagcagatgcgagagcaaaaccattccttactgaagacatcatgagtcctttgtttttctttttctattttctattgtcaagaatatttatattcatccaggcaagattgcatggggaggaatatcacagttgtacatttgttgccattgggttctggtttacaactgtcttgcctgagattataaattttcaggttaatgcagtactaatgcagaatttgttcatcctggaatttgtgtatatagcatattaagtaaatccaaagagacaagtagcatatgaggtaaggagtcctgggtttgagctttttctagtaaagtagccagagattgtagttagtaaacatttctgaatgttctacagtacataactgtaaaatagaatgataaatgaggtgacttaccaggccacttccaattttgaaattgtaagatttcattcagtctctcccaacccccaccaaaataaaaaacttgtgaaaccaagtctgtaccagactgacgtgtatcgaaactgtcactctggtgttgagataaatagccataactcttagttactgtaaaaaatagttgagagttatggaggatatgatttaatacatgcttattgaatatatacttcgtgtaaggctctgcactgggaattatagagaagttcaagtatatttaaaacacagcttcttacacagtacctggtctgaagaggcctccaggggaggtgggaagatgaaagaaataattttcaaaattattttggagaagggtagagtagctcaccatagtagtggtctgtctcttcaacaaatgacacttttaaattgctttgatttttgtttctaacttcttaaaaaatgtgtatgcaaccaggattcatattttattacttatatagccaatgttaggaactaaattgtgctcaccccatattcatatgttgaagccctaacccctaatgtgactttatttggagatagggactttaaagaggtcattaatgttaaatgaggtcataagggcaggaccctaatccaatgagactggtgtccttataagaggaaggacaccagtccctcatctaagaggaagaaacatctgagaagcatgtgcacagaaatgaggctgtgtgaggacacagcaagaaagcagctatctgcagaacaaggagagaggctgcaggagagaccaaacctgtccacaccttgatttttgacttccagcctccaaaactgaaagaaaatacaattctcctgtttcagctaccaagtatggtgttatggtgtggcagcccaagcaaactcatgtagctgatttcatgaactttcatgttttctgcactgtggcttttctgatgtttgtaattttccccattccctctccagtcacaaaactagaacacaatcttgggaaaggacacttgttcccacctcccatccccagcacaaaaatctacaaacacatatcggacaagacaacccacattgggccagtgtcttgtgaggggtgtccgacatcatggtaagtcagcaagggggagagactgcacttctaaagtgtccagtacaggctccaagagcaggtggcatttgagctaggccaggttaattcccatcactgttttgtctttgggcttagttgtgcacttctctcattttatcagggtagacagaacgaagacatgaacaatgttttgaaactcactccttcattcaaccaataattgaacactgggcacagttctaggtgactgagttacatcggtgaccaaaacagactcatattctacctttggaatttacactctagtagcatgtggagaattagacagtccttgcctttgaaaaattcagcatcttgtggggagatggtccctgtcttaatctgtttgggctggtataacaaattactgtagattgggtggcttacaaacaacacaaatttatttcttacagtactagaggctgggaagtctaagatcaaggtgccagcagatttggggtctgatgagagcccacttcctggttcgtagacagaagaccatcttcttattgtgtcctcacatggtggaaggggtgaaggctctctctggggtcaatctctctcttttttttttttttttttttttttgagacagagtcttgctctgtcacccagactggagtgcaatgatgcaatcacagctcatgcagcctcaaccttctgggctcaagcaatcctcccacctcagccttccaagtgactggggctacagatgtgtgccaccatgccaggctaatattttaatttttttgtaaggatgagaagtctcattatgttgcttaggttggtctcaaactcttggcctcaagtgatcctcccacctcagcctcccaaagggcagggattacaggcatgagccaccacagctggcccttgtggtctcttttacaagggtactaatcccattcatcaaggctctacccttatgacctaatcagctccccaaggcccctcctcctaatatcatcactttggtggttagaatttcaaaatatgaatttcgggtggggacataaacattcagttcattgtagtcccacttaaactgatggtttcaataatataataaatgtagagaaaaggaagcctgaacacggaactttgaaagggcctggtaggagcctgggaatgactcaactgagacatccttgaagaattcctgtttgttttttgtccagagagtgccaaggaaattcccagcacaatgtacctatgacaaattcggaagtcgtatgttgggaattaatcctgctttattttcatctcattatatgaatgtaaaatatataagaaatatcagttgggttaattttagctccttttatggaaatttaattatttatacaataaatttagttccttaaaatataaaatcgatgtcacctttttctttgctctttggtagtttttttttgttgttgttgttgctatttctattgctgctgtgacaaattaccacaaactcagtgacttaaaacaacacacatttattattttacagttttataggtcagaagtctgacgtagaggttacttggctaagatcaaggtgccagcaggtgcatttcttcctggaggccctgggggaaaatctgtttcctcaccttttccagcttcatagaccccttcctccaacttcaaaggcagcaagattaggctgagtccttctcatgctgacatgtctctggttctttcttcaaattccctcttccactctaaagggccctcttgattccattaggcctacctggataatccagaataatcctactttaattttttttttaagttctggggtccatgtgcaggacgtgcaggtttgttacataggtaaacatgtgccatggtcatttgctgcacctatcaacccatcacctaggtattaagcccagcatgcattagctatgtttcctaatgttctccctccccctccccgaccttccaacaggccccagtgtgttgttcccctccctgtgtccatgtgttctcattgttcagctcccacttataagcgagaacatgaggcgtttggttttctgttcctgcgttagtttgctgaggataatggcttccagctccatccatgtccctgcaaaggacatgatcttgttcctttttatggctgcatagtattccatggtgtataagatcagctgctagcatgcttaatttcatcttcaaccttaatactcacttgccatgtaacctaacacatccacaggtttccaggattaagacatagacaactttggggagccattattctgcctaccacatgggtttacttaatcaccagggagacaaagtagataataagcacaaagtagataataagcaaaagaagccaaaaaaacttctgtgtgtcctgcaacactaaagaacataaagaatcaaagagctttatttttcatctaactcagtttggtaagattccaatttagaagctaaggtaaaggaaaactgacttcctatggtacaatttaaattcagtataaattcagtgcttgcccaagtagaatgtccagctgtgggtacggagcaaaggtgtcagtaaactgtattcacacccagggcacttaagagacgttattttttgagacttgcaattgatatgctttgcactgtaggggccacgtgggaatttccacctgagaagcatttgttgttaagcacttttttcccctgtctttgcttcagattgtataccttccagggacagatatcagtattatacatagctctttgtatattttggggggtgactgagaaacatatttcattacatgtaacttgctggccatcccaaatattacagtaacaataaccggtacagcttgggtatcccatatctgaaatgctcaggaccagaagtgttttgaatttcaaatgttttcaggttttggaatacttgcatatacatcgtgagatatctcggaggatggaacccaagcccaaacaagaaattcacttatgttccatatacaccttatacatgtagcctgaaggtaattttatacactattttaaatagttttgtgcatgaaataaaggttttgtacattaaacaatcagaaagcaaatgtgtcactacactatctcaagcccatgtggccaatctttgaccactatcatccctgtctctgaatttatatgttactgatgagcaatcatcttcttacacttattcacacctaagtacctagtaaaaaaattgacaaaccattaatacagtaaaaaaaataatgtgttcaggataactaagcagcaaagtagcatcaccagattacttgtattttatcactattacccatagaggtatctgtaggcctttttgacattttcaacaatatctttacagagcagagaataagcaaaaagtaatgcatgcaggtcttggcttcatgtgggacatcatggggaacctattgttggcatttctggccagcatacgtgccattttattaattgttctgggcaatgcttacaggagggagtctggataagggcagaaaatatatattgcaactgaaggggcctgagagggtctttttttccccttggagaagccgaataaactgtgtgttgtgcacctgcattttgacggtgactcgtcacatgtgatcaggagtggaattttccactgtggcatcacatcatcactcaaaaagtttcagattttgaagcattcagattttggagttttggattcaggatgctcaatttgtatttctgtttttaatctagcagttacactgagggccaagactctatgttaaatgcccaccatatattatctgatttaaacatcacagtgatgctgcagggaaggccctgcagtggccattctcaatgctggctgcacattagggccccctgagcagctcatgagattccggaaacccaggctgcacccagtccagttaatcagaatctctgagggtgggatccaggcccctcattttttaaagcttccaggattttctatcacacagccagggttgagcctagattcatctgattccaagcccagatatttttgcctgctgagtaagtagtatagcccaggcctttccccatcttttgccccaactctctcactcacaggccctgccccccatatcttacacgcatacttagtttttaagagacagagtcttgctccgtcacccaggctggactgcagtggcaagatcatggctcactgcagcctcaacctcccaggttcaagcgatccttctgcttcagtctcccaagtagccaggactacctgcacaagccaccatgcccatctaatttgtgtgtgcgcgtgtgtgtgtgtgtgtgtatgtgtgaagacagggtcttgctctgtttcccaggctggccttcaactcctggcttcaagcaattctcctgacttagtctctcaaagtgctgggattacaagtgtgagccaccacacccagccccatgtaggcttttattcccagttacatttttgcccacaaaatgaaaattataaatttttgaagtccttagtataataccaatgataatctgacattgtttctactgaaaataaacattactgttattggcattttacttttgtttttattagattttttatttttatttttttaatggggtgagggaggtgtctttataagtaacagtgatagtaattttgcaatactaattttgataactaagaatgtatcattttatataccaggaattttatggactttgccttgcatgttttgtgacattttttcggggaagattctattatcaggaggaaactgaggcttactttctgcaaagacacagccctgacatttaagcccaaatctgtgttattttattttattttagaggcagaatcttgctctgttacccaggctagaatgcagtggtacaaacatagctcactgcagcctcaacctcctgggctcaagtgatcctccaccctcagcctcctaagtagctgagagtagagctgtgcaccaccattcccagttaatttaattttttgttatagacagggtcttgctatattgcccacgctggtcttgaacaccctgcctcaagcaatacttctggcctcaagcaatcctccacctcaacctcccgaagtgctaggactacaggcatgaaccctcatgcctagcccagatccatgttattttaggacatcagtttatagcttctgtttgatgtattctaaactcgaccgaaaataaaactctcttgagaaacttgttgccctcctgaaaattctgtctggaatgggacttagcaataggatttttaagtttggtccatggtgttcctgggctactccaccacgctacaatacattgccttcaatcagggcttctcaaacactcatgtgcttgcaagtcattggggatctggttaaaatgcagaacctgatgaagtaggttaggggcggtcctgagattctgcatccctacctagttcccaggagatgtgatgcttctggtccacaaaccacattttgagtagccacttagtgcctggtaacttaagttttctgagagcaaagttctgagagcactgttgattctccactcattgtagtgtctttttgcacattgacttgcaaaagctccttagtatatctttgaggaaaccaaaaaaaaaaaagcacttttaagacaatgacatcaatatgaactcagtgctttaagtgcattttataaatagcacagcagataaatcacctcttttagaaagaaaatatttaaccaagtgtaccttgtctccattagacactaagcacatctctaattcattcttagataacagagttccttacccaaattaggtgtttaaaaaggcatttcttaaaggaataaatcattttacaaacttttgaattgtttttaaattttgcatcccatattctaacaccgaggtgcctttttaaagatgcatctgtgaattttcattcaaaagtatatatagactacataacatatgcatcttaggtgtaatacaaagacatagaatatttaaaggcaattaatatgtctatacaaaatatttatttatttttttattatactttaagttttagggtacatgtgcacattgtgcaggttagttacatatgtatacatgtgccatgctggtacgctgcacccactaacttgtcatctagcattaggtatatctcccagtgctatccctcccccctccccccaccccacaacagtccccagagtgtgatattccgcttcctgtgtccatgtgatctcattgttcaattcccacctatgagcgagaatatgcggtgtttggttttttgttcttgcgatagtttactgagaatgatgatttccaatttcatccatgtccctacaaaggacatgaactcatcattttttatggctgcatagtattccatggtgtatatgtgccacattttcttaatccagtctatcattgttggacatttgggttggttccaagtctttgctattgtgaataatgccacaataaacatacgtgtgcatgtgtctttatagcagcatgatttatagtcctttgggtatatacccagtaatgggatggctgggtcaaatggtatttctagttctagatccctgaggagtcgccacactgacttccacaacggttgaactagtttacagtcccaccaacagtgtaaaagtgttcctatttctccacatcctctccagcacctgttgttccctgactttttaatgattgccattctaactggtgtgagatggtatctcattgtggttttgatttgcatttctctgatggccagtgatgatgagcattttttcatgtgttttttggctgcataaatgtcttcttttgagaagtgtctgttcatgtccttcgcccactttttgatggggttgtttgtttttttcttgtaaatttgtttgagttcattgtagattctggatattagccctgtgtcagatgagtaggttgcgaaaattttctcccattttgtaggttgcctgttcacactgatggtagtttcttttgctgtgcagaagctctttagtttaattagatcccatttgtcaattttgtcttttgttgccattgcttttggtgttttggacatgaagtccttgcccatgcctatatcccgaatggtaatgcctaggttttcttctagggttttatggttttaggtctaacgtttaagtctttaatccatcttgaattgatttttgtataaggtgtaagaaagggatccagtttcagctttctacatatggctagccagttttcccagcaccatttattaaatagggaatcctttccccattgcttgtttttctcaggtttgtcaaagatcagatagttgtagatatgcggcgttatttctgagggctctgttctgttccattgatctatatctctgttttggtaccagtaccatgctgttttggttactgtagccttgtagtatagtttgaagtcaggtagtgtgatgcctccagcttcgttcttttggcttaggattgccttggcgatgcgggctctttttttggttccatatgaactttaaagtagttttttccaattctgtgaagaaagtcattggtagctttatggggatggcattgaatctgtaaattaccttgggcagtatggccattttcatgatattgattcttcctacccatgagcatggaatgttcttccatttgtttgtatcctcttttatttccttgagcagtggtttgtagttctccttgaagaggtccttcacatcccttgtaagttggattcctaggtattttattctctttgaagcaattgtgaatgggagttcactcatgatttggctctctgtttgtctgttgttggtgtataagaatgcttgtgatttttgcacgttgattttgtatcctgagactttgctgaagttgcttatcagcttaaggagattttgggctgagacaatggggttttctagatatacagtcatgtcgtctgcgaacagggacaatttgacttcctcttttcctaattgaataccctttatttccttctcctgcctaattgccctggccagaacttccaacactatgttgaataggagtggtgagagagggcatccctgtcttgtgccagttttcaaagggaatgcttccagtttttgcccatttagtatgatattggctgtgggtttgtcatagatagctcttattattttgaaatacgtcccatcaatacctaatttattgagagtttttagcatgaagggttgttgaattttgtcaaaggccttttctgcatctattgagataatcatgtggtttttgtctttggctctgtttatatgctggattacatttattgatttgcgtatattgaaccagccttgcatcccagggatgaagcccacttgatcatggtggataagctttttgatgtgctgctggattcattttgccagtattttattgaggatttttgcatcaatgttcatcaaggatattggtctaaaattctcttttttggttgtgtctctgcccggctttggtattagaatgatgctagcctcataaaatgagttagggaggattccctctttttctattgattggaatagtttcagaaggaatggtaccagttcctccttgtacctctggtagaattcggctgtgaatccatctggtcctggactctttttggttggtaaactattgattattgccacaatttcagctcctgttattggtctattcagagattcaacttcttcctggtttagtcttgggagagtgtatgtgtcgaggaatttatccatttcttctagattttctagtttatttgcatagaggtgtttgtagtattctctgatggtagtttgtatttctgtgggatcggtggtgatatcccctttatcattttttattgtgtctatttgattcttctctttttctttattagtcttgctagcggtctatcaattttgttgatcctttcaaaaaaccagctcctggattcattaattttttgaagggttttttgtgtctctatttccttcagttctgctctgattttagttatttcttgccttctgctagcttttgaatgtgtttgctcttgcttttctagttcttttaattgtgatgttagggtgtcaattttggatctttcctgctttctcttgtgggcatttagtgctataaatttccctctacacactgctttgaatgcatcccagagattctggtatgttgtgtctttgttctcgttggtttcaaagaacatctttatttctgccttcatttcgtcatgtatccagtagtcattcaggagcaggttgttcagtttccatgtagttgagcggttttgagtgagattcttaattctgagttctagtttgattgcactgtggtctgagagatagtttgttataatctctgttcttttacatttgctgaggagagctttacttccaagtatgtggtcaattttggaataggtgtggtgtggtgctgaaaaaaatgtatattctgttgatttggcgtggagacttctgtagatgtctattaggtccgcttggtgcagagctgagttcaattcctgggtatccttgttgactttctgtctcgttgatctgtctaatgttgacagtggggtgttaaagtctcccattattaatgtgtgggagtctaagtctctttgtaggtcactcaggacttgctttatgaatctgggtgctcctgtattgggtgcatatatatttaggatagttagctcttcttgtttaattgatccctttaccattatgtaatggccttctttgtctcttttgatctttgttggtttaaagtctgttttatcagaggctaggattgcaacccctgcctttttttgttttccatggcttggtagatcttcctccatccttttattttgagcctatgtgtgtctctgcacgtgagatgggtttcctgaatacagcacactgatgggtcttgactctttatccaatttgccagtctgtgtcttttaattggagcatttagtccatttacatttaaagttaatattgttatgtgtgaatttgatcctgtcattatgatgttagctcgttattttgctcgttagttgatgcagtttcttcctagtctcgatggtctttacattttggcatgattttgcagcagctggtaccggttgttcctttccatgtttagcgcttccttcaggagctcttttagggcaggcctggtggtgacaaaatctctcagcatttgcttgtctgtaaagtattttatttctccttcacttatgaagcttagtttggctggatatgaaattctgggttgaaaattcttttctttaagaatgttgaatattggcccccactctcttctggcttgtagggtttctgctgagagatccgctgatagtctgataggcttccctttgagggtaacccgacctttctctctggctgcccttaacattttttccttcatttcaactttggtgaatctgacaattgtgtgtcttggagttgctcttctcgaggagtatctttgtggcgttctctgtatttcctgaatctgaacgttggcctgccttgctagattggggaagttctcctggataatatcctgcagagtgttttccaacttggttccattctccccatcactttcaggtacaccaatcagacggagatttggtcttttcacatagtcccatatttcttggaggctttgctcatttctttttattcttttttctctaaacttcccttctcgcttcatttcattcatttcatcttccatcactgataccctttcttccagttgatcgcatcggctcctgaggcttctgcattcttcatgtagttctcgagccttggttttcagctccatcagctcctttaagcacttctctgtattggttattctagttatacattcttctaaatttttttcaaagttttcaacttctttgcctttggtttgaatgtcctcccgtagctcagagtaatttgatcgtctgaagccttcttctctcagctcgtcaaagtcattctccatccagctttgttccgttgctggtgaggaactgcgttcctttggaggaggagaggcgctctgcgttttagagtttcccgtttttctgttctgttttttccccatctttgtggttttatctacttttggtctttgatgatggtgatgtacagatgggtttttggtgtggatgtcctttctgtttgttagttttccttctaacagacaggaccctcagctacaggtcagttggaataccctgccgtgtgaggtgtcagtgtgcccctgctggggggtgcctcccagttaggctgctcgggggtcaggggtcagggacccacttgaggaggcagtctgcccgttctcagatctccagctgcgtgctgggagaaccactgctctcttcaaagctctcagacagggacatttaagtctgcagaggttactgctgtctttttgtttgtctgtgccctgcccccagaggtggagcctacagaggcaggcaggcctccttgagctgtggtgggctccacccagttcgcgcttcccggctgctttgtttacctaagcaagcctgggcaatggcgggcgcccctcccccagcctcgctgccgccttgcagtttgatctcagactgctgtgctagcaaccagcgagactccgtgggcgtaggaccctccgagccaggtaagggatgtaatctcctggtgcgccgttttttaagcccgttggaaaagcgcagtattcgggtgggagtgacccgattttccaggtgccgtctgtcacccctttctttgactcagaaagggaactccctgaccccttgcgcttcccaagtgaggcaatgcctcgccctgcttcagctcgcgcacggtgcgcgcacccactgacctgcgcccactgtctggcactccctagtgagatgaacccggtacctcagatggaaatgcagaaatcacccgtcttctgcgtcgctcacgctgggagctgtagaccggagctgttcctattcggccatcttggctcctccccctgtctatacaaaatataaggagcaaaagaagactgttaagaggctaaaaataacctaaacatgccaaagaagtagagagaaaattgagggtgtttttaacatttattttaagttcaggggtatatgcgcaggtttgttacataggtaaacttgtgtcatgggggtttgttaatacagatgatttcatctccgaggtattaagcctagtacccattagttatttttcttgatcctctttctcctcccaccctgcaccctctgataggtcccagtgtgtgttgtttccctctatgtgtctatgtgttctcattatttagctcccacttataagtgagaacgtgtgagttggtttttaatttatttccctgacttgtgatacccattgtgaaaatgtatattatgggtttaaaaataataatggtaataacagaaatgttaaaagctaacatttcttgagcactttctatgtgctaatttgtactgatcactgactgagcccttgtgtagatgaggaagtggaagagttgagtgactgcccccactagcatggctgtgatgtgcaaagccaggactcacccaggttattcattcctaaactagaacacctctgagcaagttttctttgcacttgagtaaagcagatggattaatgtttgctagaaagctaccagacattgatagagagccaagtttgcaatggaaaatttgtctaaacctgctagtgttaactggtatgatctccccttgttttgagaccaggcttgttctggaagtgttgcggctgttttcttctacagctctatcaatcccttcctctttccctcccttgcagcaccaacaccttcaccatcatcacccttttatctcttaggtcttgatggcttccacattttaggatatctgatggtcctccaatgtcacttaatgtattttccattgggcagcatcttctctagcctcagataagaattaaagttctctcatgagactagtttgaaaagctgaacctatgagacaaagtataattttccaatacccataatgatggatattctaaataaagaagagtatatgacaccaacaccaagttttttttttaatcaaaagcaaggttgactcttggtattcctagaatagaggcttttataacagaccttaaactgccttaatttaaagcaggtgtataaaatacaaaatggtatttaaagaggtgtagagatattaattaaaataggcttgctgaaatgccagggatatcatcacttctgaaaattgaattaagccctgaatgtcaatggtgaattaacatgaatagacttatctatccctgtccaaatatattttatccacaagctgtgtaatacacgatgattaaccagaggttacagattctagctgaaacccaatcaaattcttcagaatcctaattgaggaatgcattcaggtcaaagaatattaacagaaaagcctctgtcatttaaagggcaagcagagtgagtgcttaaaagtgttcaaaattttgcttaattgttctcttcttgagctattgttcttgatgatttagaaaacctgtgtgctgcaagtttaactgctttaattacagtgatgtcaaatacataggcctttctatttaaagggattttaatttctgtggcttatgaaagagaaactgaaagcatagttaaaagtgaatatgttagttgagaaagttcctgttcttaccaagcaataaaattttcctaaatggatgtttgaaggagagctggtgttcagaggtgtggttcagttgaagctcctctggtagaagcccagcattttgtctgtctagtttttttgtccttagcattgcttacttttgtaaagccccagatatatataactcattgttaaagtatcacatggtttgtacagcaggatgatttgcattatatgaaggacaccgaaacacagaaaatgaaaggtctacggtgtatgacaaacaggacaaatgctctagcaaaaataaattctactttctctcaaaattagcatacttgttatttaaagaaatgtgccagaagagaaatacaagattttcttttcttttttctcattgactttaactctctctgaatggcacctataactaaaaatacatctcgggaatcaagtaaccctcttttatatacatccctctaaatctatggctaagttcaatgtttaaggttgtcaaagtggctcccatccaaaatcgggttaacatttgcactttgcctaaagtgggactcctagataaaattcaaacgacctttctggtaatcccagcgtgtgggttttagcatcaccagctggctccaaatgggccactgctctctctacaaagaggagggagccttcaacacaggggccatgcttgtccattcaactgtgtctaaattcacagatcagtgtttctctcagtccctagaccagcaacatcagcatcccttgggaacttgttagaaatgcagagtctcaggccttgcctcaccgaatcagcacctctggggttggacctagcaatgtgtgttttaacaaatcctccaggtaattctgatgcacacctaagtttgagaaccacttttgtaaatgtgtgtttcaacttgacactaaccaataattctaccacttaacattaacagctttcaattttatgatcctttgtgttggacaggtcaaagtgggtgatttcaactgcttaatgggtacagaattttattttggggtgttaataatattttggaactagatagaggtggtggttgcacaaccttgtgaatgtactaaatgccactggattcttcactttaacaatgagtactattggccgggtgtggtggctcacgcctgtgatcccagcactttggaaggctgaggtaggtgtatcacatgaggccaggagtttgagatcaacctggccaacatggcgaaactctgtctctattgaaaacacaaaaattagctaggtatggtggcatgtgcctgtaatcctagctacttgggtggctgaggcatgagaatcccctgaacccgggaagtggaggttgcagtgagccaagatcataccactgcactccagcctgagtaacagagtgaggccctgtctcaaaaaaaaaaaaaaaaaaaaaaaaaaggttactttgatattttatgttatgtaaatttcaccttgtttttaaaaatatgtaatataaatgaaactcaagtgttttagatatgccagtctaaagaaatctgcaaattaaacaatttccaattcttaatcattcttattttgagtacatcctaattctttttttacacatatgatatgatgcattctaattatacaattactaaggtttcccaagtaaacatataaaacagagtatctgtaaagctgtgatttgagtgcttttcatggaaagtttctcattagaatttcttgatcagccaaacaacagttttcaactacaagcaaaacaagggaaagcattatttggttgtctgtcattgctagggtgaagactataaaagaggcaggaagagtaaaaaccaggcttttaaaattaaatttcaggcaatatcttatagtacctccaccctcatgttgggcaattcaagaggtctattcacattgcattgtatgaatagaattttatttcttttgaaatgtaatatagaatattttattttataatatgatctgaggatgcctcctggaattgtgcaacacaaaggtcttgggtgttgtcctttctgggtagagggtttgttagctactgaatatatttgttataaatatcactggggatttttttaagtaaatttattttttaaaaaaccctaatcctatgaagtttcactaaatgtaaaaaacataaatcaattaaggcttgaagtaacattttattttactgtataaccctgtaatcccacacacacacatctattatagacataatacattactatatagaatactggaaaatatcgtaaaatacattaaaaaaacaatttcccttactctcagaactgagaagtaaaatctgttgtatcttgtgagagtatatatgtatgtgtgaacacatatcacacatatatagagtacagttaataacaaacagcatattccattttaaaacctattttcccttaccatatcagattttttttcttaacgagaaatattcttctacaatatcaatatcatttgaaggccatatagtatttccacttatagacgtagttcacttgattaattttgaattccccttaattgaacacacttaatacttcatttttctttaaaatataacaaccttacccctatattttgtgcttttgctgattacttgtcaaatatatttatttgtggtatctctttttatactagaaacatcaacctctttgtcaaattgttcttccagtttattgtatttttgttaattttgattttaacatgtattttatgtttggtgttttcttttttttttttttttttaaagaaaaaagctctcattcttttttaaaaaatagattcagggtatatgtgcagatttgttacatggacaagtttcataatgctgaggtttaggcttctagtgtacccaccacccaaaaagtgaatatcatatccaataggtaatttttcaacgttcactctcctctcatcctccccacatgaggagtccccagtgtctattattgtcatctttctgtccatgtgtacccatggtttagctctcgcttgtaagtgagaacatgtggtatatgattttctgtttctgagttatttcttttaggataatggcctccagcttcatccatttcatccattttactgcacaagacatgatttcattcttttcatggctgtgtagtattccacagtgcacatatagtacattttctttattcagttatccattgatgggcacttggcttgattccatgactttgctattgtaaacattttatgttcagtgttctctttcatagtgttgccttcctattccaatattatgtacaaattttcctatagtttcatcatcatggttttgttgtttacatttaacgctttatttgaacatcaatgtgatctgtgagatagtaaaaagacctaagtcaatttttccaaacagttaaaacatgtttttatcatttattaaataacacagtactttctccatggatttgcaaaataagattatccaaccaggagcataaacagagcaagttatttaacctctctgtgccttcatttcctcctctaaaagaagaaagccagtaacagcatctccctcaaaaaactgataaaaaaaaatccacaaggtgcctgacacggaataaacttcatcaatattatatgacaaccactagtatgattacaattattattagtgccctaatgctaccactagtatgattacaattattattagtgccctatctacccaactcaatatgctagtgtcttttttaggatatttacaattatatttgtaagtgagatggcctatgttgtctgtgcttacatcaattctgtcaggctttgaatgagggacttgatggcttcataaaattaaaaagttctgcatctgtttattttattactaaatgtagaatttatccttgttgtgatagattgacagaatttctctcaaacctttatgagccctaaacatttctttaaaacaacacttggaaaagtatttcaaggtctttcttaatttttgatctgttgttaaaaatttccctttcttttggatcagttttggtaattgctacaattctagaatgaattgttggggagcatgcctaaaagtagacaccaataagggagttgctctaacagtttaggcaggagatggttcccaattctaaatccatagctttccctaatatcgggcttgataaataacaacacagtaccccccatttataatgccaaaaccagggaattctcctgaatttctttctttcccttagcaccatttaccacagtcccacatcccattcctcagccaggcctgttgcctccatatccaaattacatccaacgcatccacttctctccatctccatagacctcacattagtccaacctccatgaaatagactcagttgaaatagcatcttaattggcttcctgcctccagttttgcacattggcagacaaagtgatcttccaaaaatataaattaaatcatttcactcccctgcattaaacctaatggacttcttttgtgtttcaaatagaaatctaaactccatccctctaagagcccttgtgacttggattagaatttgccctttgccccaaccacctcatcacagatcactgtgccgctctcttgctatgttccagcctctctggactctgtgttcctggagcaagccaatccgttcccaccccaaggtatcagcacctcctggaactttcttctcttctccagactttggtgtagcccctttttcttttatctaatgttcctaccccaatccactcattattttaccttaccccattttattttcatcattgacttcttctctgaaatgttcttgttcattacagttgtgtgtttattgctcttctacctgtaagcattatatgcattatttacatgtgcctgacacatgttttgccttcattaaatatgtattgcatgaatgagtgagtgaatgaatggatatagtcagaatgattttaaaaatgaatagactgaggaatttaagaattagaatttttaaaagttagatataaaaatgatcccccaaactgatatgaggtaatgcttatgttaaatagcttgatttagccattccacagtgaatacatgtatcaagacatcatgttgtacaccatatatatatacaatttttactcgtccaacaatttttttaatgactagaatatacagggagctgggagtgtgtgctctatctctatgtacttgggtgtgattacaggatgtgtaaaatgtagagatcatcaagttgtgtacttaaaattaatgcattctgtgctctttaatgcatgcatgttatttctttaaaaaataaaaccataaatacatgtttaaaatagccagagagagcacaaaatttaaataatatgtgtaacttaaaagcttccatttttacatagtctaggacctaatatcacaggcaaatttaaaatttctttgaaaatgagctttgggattctgtaaagatttggggctctaccatgtggttgataaacaaaattactctctttactcaaggacctaaatggactttaaaatgagctggaaatcaactctggcttcaaggaaaagggtatacccacagggcaaacttgttttgcctcaaaacatactttatcatgtaacgtcccattcctcacccaaattagatagccttacattatcatgtgacatctgttaaataactcaaataagaaaatagttcctgatatttagataaggatacttagatttatagggtattttcctgcataagacactaatgacttttataaaatgtttcataaatgtgttttgtgaaaacacaaatatgagtcagctggcatagcaacatgcacagtgtagcaactcaaacattttctgaataaataaatgaaggaatgaggataagaaataaaaatattagaggtaattatttgggttccagatagagctttattttaattatagtttcttaaatttgaatgaattcactattttaccataatcagaagactgcagcaatcatcaattgcacaacagtgatggcctctgtaatttggcactattagctcctgaaatgtattgagatgtataaatataagcatcttaatcttttcaatataccctagcaaactggccctagcatccctagggctttcggagctaaggggaagttaaatgcccttctcttattccctgccaaaataagaaaaactttattgatttgaaagtgttaatttcctccaacttttcatatatgcagtaggcatgtcaacagagcaaaaatagtcttagctattggaaatgaggctacagattttattaggttggtgcaaaagtaattgcggtttttgtcattactttcaatggcagaagctgcaattacttttacatcaacctaatagattgacttatgtcataactatacatttcccaaaaatacaagacatggttcaaacattaatatttgtgacttagagcatcagaatgaggagattaaaagtttgaaaatgctccagcacttggatgaggcaagaatagtgaggtacagtttaagagagttaagaattaaaagtctttatgccaagctaaatgtgtccttcaaaagctgtgcatgttatgactgctggctccaacgcatctatctagtcagtctctgctattttaaccatcttttttctcttcaatttaccacctattattaggccaagaaaacttgagcatctgtcaagagtaaaaatattttgaagttttcttcaaacacactgaattccatgatttacacatggttctttttttaagagatgggagtcgtgctgtgtcaaccaggcttaagtgcagtggtgcgatcatagttcactgaaatctcaatctcctgggctcaagcaatcctcctgcctcggcccactatgtaggtggtcagccacctacaggtgtcagccaccatggccagcttcatacatgtgttctgaagcaacttttttgaaagcatggtatacacatcacaaagggtgcacaggtactttagggtgaatatctgtatttgcacaccaataaattaacccttctaatgtaaacaattcagtggtttttagtatatttagtatattcatagatgtaaaatgagcatcagtatataattttggaatgttttcatcactccaaaaagaaaccccctacccattaataagcattcttccctccttcctcttcccagaccctggtaaccatttacctttctgtctctatgtgtttaactattctagaaatttcatataaatggaatcatataaaattatgttggtgcaaaagtaattgatgtttttgcttgtgaaagtaatggccaaaactgcaatcacttttgcaccaacctaatacctggtatgtagtgactggcttctttcacttagcataatgttttcaaggttaatccatgttgtagcatataacagtacttcattgctgttaattgtcaaatattactcaattgcatgtatataccatatttgattttccattcatcagttgatagacatttggattgtttttattttttggctattatgaaaaatgctgctatgaactttcaggtataagcttttgtgtggacatgttttcatttctcgtaggtatatacctaagaatgtaattgctgggtcatatgatggctgtgtttaacatcttaaggagttgcaaactgttttccaaattggctatgacattttaccttcccaccagcagtttatttgataaattcctttcagatagaattcataaatattttctcccattctctttgttgtctttttaccttcttgatagtgtcctttgtagcacgaagtttttgttttttataaagttcaatttatctatattttattttgttacttgtcctcttggttatgtaagaaaccattgcctaacccaagatctcaatgacttatacctaggttttcttctaagatctttagagttttagctcttacatttaggtctatgataaatttcaagttgatttttgcatatagtgtgaggtaagggtccaagctcattatgataatgatgagaagttttattttaaataaacatattttaatgtatgaaatttgctaatttaaagaaaaatcttaaataaatggtaaactataaatatctaagaaatgtatctcttttcaggttttctaggaaaatcaacctaggatttatattagtaaggaaatttatacttaaaattttacttttatttattttactttttatttatagaaggtaaggatgaaatgatgaagtgggatagaggttgacacctatatatgtgccaagctctttgtgaatgtaaaattctattttaaggaaaaaaatattgtgttttgaaggctaagaaaacatgtatacaagaaactaaaatggtgccattgggcaccatcttctttaattcttagttttaaaattcagggaaatactttggttttgataagcttaagcctaagtgttgaaaaattcttaagtaaggtttaaaattaaaacgacatcagtaattgttaataaagggatcaccaaaaaaggcttcactatagtcagttcattcacatcaagttacctagtcagtctgggttgattaccttaaaatgtaagaagcctgtattatgactttattttaataataaaaaggtcctttcagttctaaaaacatggctatatcatgttttttacttcttgagcctataaaaacaatttctttataaggactaggataaccaggaggcctagtaatatcaactaaaaaacattttattgatgaaatagtttacagagttttattgaccgtgcaggaaacattcagggactcttcaatcaattctcttagtatttccagtggtagtttgagaacattcccttggcactgtttctatatctgcaaacttttaagagacgtattagctgggcatggtggttcatgcctgcagtcctagctactcgggaggctgaggcaggaagattgcttgagcccgggggatagagtctacagtgagctgtgatggtgccactgtactccagcttggatgatggagggagattctgtctctaaaaggataaataaaacaaactagagatatattcacctcaagttttctctgttgaaaaaccaactagcttttaaggaagtttgtaacttccttaaaaacagttagttggcctttctctgtgctccaaaagcatttatccctttgtcctaaaaggatctacgtattttcctcttctaccagatcattagaagcttgagggcaaagactgtgccacattcataaacataaccctggtatagaaaatggcaataaaggcataaagtttgttgaatgaataaaaaacacaaatgaaaaagtatgtttatggtattggtagagctcctggaacattcatttgcatataggtgaatcaattattgtaggagaggtcgcttcagtaaatgttcagagttttcctgggattctatgacataaagatccacaagtcagctttgaagaaggcagctctcaagccctcatctttgccgtccattggatggaggaagggtggcatagcaacaatggttgtttcactgcttaacccaactccctgtagtaaaattccagaggtttcaccaggaagtccaactacactctggtttacatattccatagggattaaatgtcctgtgctccataggtgcattggattatcgcgcatccactaaaccccatagatctgtagattaccttagacctttctgccccagttactgattgagccacatgtatcaggttgtttaggtttccatagcctcccctgtgctcttgagagcttaaagccccttccctagcagagcttcattacacaaaaatggaactaccaacctaattaatgacacagccatacttctttctataagaaggacattttctgaagtcaaatactctacccctgagctgtacccgcaagaaggacattttctgagacaatctgaagaaagtcaccatctgttaatgacttttcaggaagaatttggggttctaactagataaccacatttcagtgttacccttagacatggcccagcttaacacatgagtgagcagagacagatctggatgtgagatgtgtgggtgggtacaagcccattctgtttgctttatttttaatgataaagcagtagagcttggaactgtggatattggctctattgcatacatgaaatgtgtaaatgctcgtctctttatttatttaaaagaaaaaataatatgttgaaaggcaccacaagaagtgcccaatactgtccaataccatgctgaattcataatttcttctatgtataaggaattgtgtgccacacacttagcctaaacagcaatcatataaaatgacatcaatgaccacaactatcaattatgatatttttattcaagtgctcaggtattagagcataacaattgcagagccatttcagggttttctgggggtgatgagtttaacaatggacaacatttgggtactgaacttcagggacattagccgtgtctgttagcaactctgcaagttgcttttgctgtatttgaacttacaaggtacaaaatatacctcacaaggggaaattcagaagacagtctaataggtggctcccttctgtgctaatatgtgactttcaatccatgtcataagattcttataaaaggtttagcatttgtaagtcctcatgtatagattgaaaagaaactatcagcacaaattcccactgaaaagaaaacttgattcttagttgttttgaaaaatgattttatttttatatttttctcaatattatagtaaggaaatgagttcatggtcttgtaagcatttataaagtatataaaatgatgaagagaaaataaattcctgtaaattgaatatttttataatctcaaggtaaggaaagcttttttatacatggcaataaatcagaaaaattacagtgaaaatattgatagaaccaaatataaaaaaattaaatttctataggagaaaatgccacatcatttgacattaaaccaaatgatacatttgaaaaaaatattacaacatatatatcaggcaaagggtcaataaacacttaagcagcccaaaaaaaggttgtttataaatcaataagaaaataaatcctacttgaatagggggattatagccttaacaaactctttctactctaaaagacatgtgaatggccaataaataagaagatatatttccaataactagtcattttaaaacacaaataaaaacagtaacaagatattctattatttttcagcagactatcaaagataaaaaaaaattgtcaataacccatgttggtgatctcacatgctgtaggtacgataagttgaaatatcaatacctttggccctgcaattacacaccaggaatttatcctaagtaaattatcattcaagtattcaattatatatatatatacacacacatatacacatacacacacacagatgctcattgaagcattgtttataataataaaacctgtccaatgatgagaaatatgttaaataaattatggtgcatctatatagtagaatactacagaaccaaattaagagggaaatatatttctatatttataaatattttatcagtatatcagtaagcagtcaagttacaaataaatatgtttactttgattctagttatgtaaaattctgtgtgtgtgtgtgtgtgtgtgtgtgtgtgtgtgtgtgtgtgtttatgtagagaaatgtctacaactgcaccattcaacttggtagacactggcctcatgttgctacttaaatctgaattaatttaatttcaaccaaattaaaaattgtgttagccacatttcaagtattcaatagccatgtgtatctagtggctaccatattggacagctcagatttggaatagtcccagcatcaccaaaaatttctgttgacagcactggtctggaaagatgttctccaccatgtttttaatggttgcttctggctagtgggatctggagttaatttcatttaattttctaaattgcttgaactttttatgagcatgcaattaattcatattcagaaggttctgtcatctggaaaaaactcacctatgattccaccatgtagaaataagcattgttaatattatgttgtatttccttgcagtctttgttctaaatgctcatagttgcacagaatgacaatatgtacatgtttttaatgttgtatttatatctaatacaccataagcattgtatcttattctttaaagctcttcataaacattactttaaaaagctgcatactgttctgtctaatgtccttaaatgatttttgttatatatgttgccttgaatgtactaaaatatttaagaattttgcaaatcagttgggtttgggaaaatcaaatttatagggaagacagtgatttatagttcttttgttatatgtagaggaccatctaatacatcacgctttggagatgctttttttgttccaaatcactattcaaaaccaccttcacaaaacataatagctttagaaatcaatgtttttgataaagtgcctttattttcaagtatccactttccctactgaatgcaacaatgcacagacatctttgttattatccaccttctgagatttatccaaaatgtgtcacctctctttgaatccctttagaaaccattctttgatgaacatactttatttggctctcctggacaacattttgataaatataaaatgactttaacacaagaatcaaagggaaaaaaatttcagaattaaagaacaatgacctgaaatccatggaagaggagcacgtgtaacaaatttacttgacatcttgctctgcaagttgcttttgctgtatttgaacttctctccggaataaaactgaaatcaggggctttgtgttctataccataccctggtacataaaacctttccaattacatttatgttctcctaggagggatggccccaaaggcacctcagactttgcatatcaaaaaccaaactcataatcataatcataccctgtactcctccccaacagggtccttctccagatctccctgcctctcttgactacaactcctttctctcagttacgcagttcagaaaccgagggttgttactgacacctccatttcttcaaccccaaaactgaatccaacatcaagtcaagctgattttgcctcttacatatctctccaaatctgtcccccatattctagcaagtcacattccatccttcccccgtttaaagccatttggtggcttccccttgcttgagggcttagaatgccttgacaagaacaaaccttacttccttgcagaatctggctccttacctatacagcttcatttcacccaaccttctctactagcttttaattttctcatccttgctgctcttcctcctaccacaagaaatttgcataacatgctactccactgcctgaagtgcttcttactaaaccctccttcatctaagactcttctccatctttcaaatttcaactcatcatatgcttgtttagggaagccctctctgatttcattaattatgttagactcacctactaaactcttttgcacacattaatgaggctgtttgattaatttaatgcccgtttccttgccagaatgtaagcaccaccagggtgtaagcatctgtttttgttcactgatgtagctccattaactagcacagtgccagataaatagtaggtgctcaataaatatttgtttactggatgaataaagaccatgagacagatgcccccaagcacaaggaaaatgctgagtcttctacaaaagaatcttggagcactggtcaacagcagagcctctctaaagaaacagattcccccatgaggagaaagctgcataagtcatcaaactttatagtgaaatatcctaattacatttccctttgagttggactgtactgtatgtactgcactcagtattccccaagaatagtttgtatctgagatatagagcccaggaggctaggcccaacaggactattcttggggaatactcagagtggattctatttatgtatcccagagaaggcctaaggagagagatcttgaaagcattcatgatgcaatctcctgctgggaagaagaaagccagatgggagctaaaaattgatgccaataagagatttggagcaatgctgttcaaactgaggccttttcctgtttcccaggagcatagagtcatccttctactaagttttaagacttacagaccacctgtaaatgtaactggcagtgtgctgaagccagcttgtaccagttcatgagagccaattgttaaatgtttgctaaatttgctacagattgatacacacagccattatgataaattaaataatttaaacttaaagctaaataaattatactaaaaatgcaggtaatgaatactcaaaactcatcactttctaattattttattaaatgttatgattaagtatgattttgaggctatttatagtcttgtagctctatggtgaaattgtgtgctacttgatctttttttcaattctgaattcagtgagatcatcagggtggcttgaaattggctatgttgggagtatttacaccatggaaaacagtaaatgctaacattcggggatttggaggcttttgttgttgttgttttgggttttttggttttgttatttattgtttgttttgatttgttaaaagcctgttgttgaacatttaccggcataccacaagaggcaaccaattcatggcccaatgtaatctgtctttttgtacttcattgttgaaattacctagcaatactaggaaatcttaggtcgaagtggaattgtgaatcttccaatcgtctaaaccacatttcttctaaactacatttcacaaaaacatattgggtgggactcgtttgagaaaaaaaggttatatatatatctttttaatcccatatcatatactgctattttttaagtacctaagatagtgtttggtataaattaaccatatagaaaatatttgaataaattaattataggagtcaagaagtataataatttgagttaattcttgacaataggatgatttgaattctcttcatataaaatgggtggcattataattcatttcaaaatatttcatgcattaaatatcttcttaggaagatgcaagaacacttgacttcccagttttcaaaggattttaaaaatcctctgggaaaatattggttggggagagaaatgatggctgtgaagagggagatgaagagaaaaatgtgaaaaaagtgaacgagatttgagaacaaaaggaaaaaataattgcctaaaaattaatcagtgcaggccaacaactaaaagaagtgactaatgtcctgggaatatttactgcttttttgtaaaatttttttaaaattaagagagctttacactccttaaatttcctttctattccctatttagaattgtactggctgggtgcagtgtgtcacacctgtaatcccaacaccttaggcaggcagaggtgggaagatagcttgagcccagtggttcaagccctgcctgagcaacacagtgagaccccattttccacaaaaaggaaaaaaaaaaagttagaattgcactaacaattctggtgatagcttttacaatcatataacataactaacaatagacacaatcacataactcacaagacaatttttttcttattgaaaattgaggtcttagagatgacaactttggtcttcatgtataatgtgttttgatggatcaatagtaaggcattttagaagacattttcttactttcacctcaaaagaagcacacacacacacacaaaggcatattgaagacggggcttatttaaatgcaactagttattccttataaaagtagacatcaaaccttatcaaggctttgaattgttaagatctttatatccctgtgtttctgatggtatattattgatttttatgtattatagaatatagttaacccatgtgtatctagagtaacacaaaaggtatataaataaaacaaaggaaataaatctgaaaatcaaatagtatttactcttagaatatttttataactttcagcaaatacgtattcacatctatatttagctttatagataaattacccatttacttcaaactccttcagttacctgtagtgaactggtgggaaattttctcgctccttttaactcctacaatcatttataattttaagaagaaaaagaggccgggtgcggtggctcatgcctgggaagctgaggcagatggatcatgaggtcaggagtttgagaccagcctgaccaacatggtgaaaccccgtctctactaaaaatacaaaaattagccgggcgtggtggcatgtgcctgtaatcccagctactcaggaggctgaggcaggagaattgcttgaatccgggaggcggaggttgcagtgagccaagattgcaccacggcactccagcctgggcgacagagcaagactctgtctaaaaagaaaaaaaaaaagaaaaaaagaaaaagataagtataagctaacatttatttcactgcattttttcatagcattcttaaaataagtaatcatgtcagactccacaaaaatgtattaattctttatgtacatgtgatacattagagtttgaggatttaattttgatcaccacactaatgatataaggtgaacagacattgctattatcattgttaaagctttgagaatatgagttgcctaatttacaaagctagttaaatggaagaaccaggaactgaaaagatctagaaatgacttgtcctttagcactctttaaattaagcttcccatggaaaaatgaattaagggaaaaacaaaattaaagtgcaaatgtttagaatataggtagtcaagtatacacaaaccatgaatatattcctaaatgtgcacacaaatatacatactgatcgacaaatctcaaagtaagtaaatggatatacatacatatactaaaatgttcttgtctctataagagattaaagtattcagtatgttccccccatattgtgtttcattttcatttgtagaacttttcagtgtctggttcttccatttaactagctttgaaaattaggcaacttgtattccctgagcttcaacttagttttccctcaaggtggatgataatagcaatgcctggtcaccttacagcattagtgtggtgatcaaaatcaaatctgcaaactctaatgtgtcacatgtacataaagaattaatatatttttgtggtgactgacatgattgattacttattttaagtatactaccagctattaattttttttcaagtactcacaacttgttatgtgcggctctcagcccttaacatataatgattcatttatttcccataataacctttttaaggggacactactattatcctcatcccacagtttggaaaactgaggcacagaatgattaacaaaattttttaagttcacatttcttcaaacgacagagccggaactcaaagccagacagaatgcaggctgtctggctgggcacggtggctcacacttgcaatcctagcattctgggaggcagagatggacagatcacttgaggccaggagtttgagaccagcctggccaacatagcaaaaactcaactctactaaaaatacaaaaattagccaggtctggtggtgtgcacctgtggtcccagctatttgggggctgaggcctaagaatcgcatgagcccaggaggtagaggctgcagtgaactcagattgcaccactgcactccagcctgggtgacagagaaactctgtcccctgcccccaccaaaaaaaaaaaaaaaaaaaaaagaaaagaaaagaaacagaatacaggctgtctgctgttttcctccatgtgtcaaaagctcacagcatagatgatggattttcttaacaaagggaacatcgtgtttgtcattattaataaattgtcatcctccttttttgatatgtttgattttaaattatgctctgaggttttagaagcccctttgacacatctaactatagcacagtaccatggaaggaagtagatatcattacaaaataggaaaacttaaatctcaccaataaagaactcatcaactagggagatgctgcggactcattgtaaaagtgtctgtgcattctattaacaaacaggcgtcattatgatagctagaagcattgaccttggatgaaagttgaggggaatataatgcttttcatgctttgtcgggggtttaaacaggaaggcacataggatcctaattgtctgctttgcacacaccattacccctcagggcatgtggattttttatgcattgcagtggtaagggctgtgcatacaaattttgctggcagacaggtggtagcatatgtcaaaaagactggggggatagtttaaaacatggctgaaaagttgtctatactttagaatttttaagtttgacaaatactgactcaatgaggaggaaaaagctaactactttttccattgactagttttcaaattgctatagttcatgcacttttattttcagcaaggatgattgtacaaataatgattaaaattgaccatttagcttcgactctttgctaggaaggcaagcacttccatgagaccacctttctttcctattttgatttctcatatgcattattttatatttttaacaaactgcctaaaatatcgctaaacaaggtaacttgaatgagtgctatttaagttttattctgccaattgaactatttgcactattttatataaactgcatcaaattggatatactttgtaacacggtgtgatatggagagggcttagagtttaccatcaggtgtacttggattcaaatctccctttacaccattttataaaactgagcaaattacttcatctttcagcacctcatgtgaaattggaataacaatagctatttctctgtgttagtttgcagattaaataggtggaagaagatacagaacagctggtgtggtagttgacacagtcactaattagaagaacttgttgttatatgtatcatttttatagagaactgaacagagtcagcactttgggaggccgaggcaggcggatcacgaggtcaagagatggagaccaccctagccaacatggtgaaaccgtctctactcaaaatacaaatttagggggtggttggtggcgcgtgcctgtagtcccagctactcgggaggctgaggcaggagaatcgcttgaaccagggaggaagaggttgcagtgagccaagatcacgccactgcattccagcctggtgacagagcaagactctgcctcaggaaaaaaaaaaaaaaagaatcttagtagcctatctgatgaaattctttcaattatagatcccatagaatacatgaagattaatcaatattgagataacatttccttatttcctataatcacttctttaatgttgtaacaggtgtattcaatccattgatattctattggctcactcacagaggttacctaaagagagttcccatatagtcctaagaatgttttccggctatggaaatgcaagagagcacaccaggaatgactgtccaccagtgatggatgagactgaacagataaatgctgcagtttccaggctacttagggacatcctaagatgtgttcttcattctgtctccaaatggcactagtgttttgagcctcagttgcccaaaatggtaaaccgctaaattaacacagtctttaaagaccttcttccctccttgtcttacttccccactcctcactgtgctttctgcaatcatctccaaaataaattacttgtcctcagatctttgattgggtcagcttctggggcatccagacaaagatcctgtctgccaagcatgtgtattgcaacctgggaaactattagattggtgcaaaagtaattggggttttgccattacttttgcaccaacctaatagctcaggcaatgcaactttttgaaataggtaatagcagcattttcccagctctgaagctgtctctccacattctgagcccaattttcttggtccaaggactgtggatactttatttcaatcccattttctgcttcttctatggtcagcctgcctgaatgccctccagcagccccttatctttccttccttcctagctctcgaaactgcattaaaccagaccctgagcttgttcctggagatgaggaaaatctaggatgctatttagggatgctcctttaactttatttatctcttctctctgactgcttccaagaacaaccaaacttttagctccatgggaactccagggaacttttagcttctctgtttgtgaaccaggagaatattatctggatgatcgccttcgtgtttcttctaatttttttttgttttagacttaaatagtgtgttcactttagctcaatcaattcaagcctgacagcttcaaaccgctttatttcagatgaagatgcatggctaagctaattatattttctcttcttcatcaacagttttctatacttatacagtgactttataaattcatcattattccatcccaaaacaaatatgaatactcttgttatggtaatgccactgcgggatatgaaagggcagtcctctaccagctcgtttttttcctagtatgtacccatagttgcttttctttgacatagtcagtctgttctccttctactccctctagttaaaaaaaaatagctaaaaaatatttaaagattttccatctgttacttgtgggaaagaaatacttaaacaagtaacatcctccgagtcttttgctctatttagaagaatattcacagcaccatatttcagagccatcattgatgcaagtggataggtgtttcctctataaaggcttgctggctgtgtgagccgcctaagccactggtacaccctggtgaacagaatgatagccttcatcacactcatatataaaagaaagaaaccttgaaaatgagaggtatgaggataagcattgattcaaggggaatttgttagtctgtgttttattttctgagatgcaaatgttgaattcaagggtttgatgggaaaccagcctggacgtaaatttatacatttcctccacaatgaaatttgaataaagcatagcaagtcggctctgccttcaaagaaaaggtagctttatcactatgaagctgaatcacacgaatctcacttaagtataaggaatccatctctttcatttccaactgttgtactgagtgctactggaaagcctcttatatgcttgatgattgataggaatggatttgagttccatccatataactgtaattcagattgagaatattgcattaagtgcagggaatcaaattaacctacacaaatcattggataagcctacaatccaataaagatacatttcatgagtatgaaaaaatgagtaaggtatatcttctgcacgaaaaatgtttctggtatcaaaaataaaatctaaaggtcatgaagagatgttttattttgtagatacttggcatgcaaataaaataacctttttaaaaagtggtattaaaaagtaaggattcaaaccagcatttaactctttttttaaatcatcctttagcctgtgtttattccttccattaattttgaatattttaaatgatataatgcagtaacacatgctgtaattgagtccttgcttcttaggtgtagaacagtctttactttcttcagtggccaattacctgaaaatgggaatcattaacatgagctttaacaagagcaaaactcaactttctttgcaacagacatgaagtaatttaatcacaaatcctgatgattgagagaaaatgaatttacttagtcagacagtctttatttggtagcacttatgggaacagaaatgatctagatttaactttaaaagtggaattcaattatagctgccaggattctgagttggtctggttaatttcagctgtggagatacatctaggatattctgcaggtatttacctacttgagtaggtaaatccttctctggaaacttcttaggaagttgagtctataagaaatactcagacataaagctccttggtagaataggtttgggagataaggtggtttgcatgcaagttgtctatcagtttgtgttattgttgctattttgattttatttgtttgtttctgaaacacagccacccatttcccaagaactgagaatgtcatactctggaaaacaaccactttttacacatctgttttcatcaaattccttctacctataaagtcctctaaaaacttgatgcatttgcagtttgtccgtccagacaatcccctctttgtgtattctctgaaagtctgaaaacaactgaggacaacttgaaggtacaagtgtctttctcggtctaccccttgcgtatcaatatgctcaacaaagagctgcattcaaaaatagatacgttattgagtacaggtcaaataaagagtgaacttgtttcttaaaggagaattctaacataatcaaggttagtgttgataaaaatgaaataaatgaagaaaagatacagttttaaagataaaatgaccagtgctggaaaagaaagcaaagcatagtttaaatcaatgtgctccatcaccgaaaaaggacgttagtaagaaacttggcttgttacatactttaaattctctgtttacattcagaactatatggttttaaaatattgtggtttcttctgagtaagtgtttctcaaatctaagtgttcctttagttcatacacagaaacctttttaaatttttttttcccaaatgttaaccatccagatgtagaatcatgtggtgagtcctcaaatacttacccttcagattcaatcagcagcatcattttaccagcctgtttcatccacctaattccagacatcacttctaaatacttcattataaatttctaattatataaagaccaatagtcttttaaaaaatataaaacacctgtaatcccagcactttgggaggctgaggtaggtgcattagctgaggtcaggagttcgagatcagcctggccaacatggagaaatcccgtctccactaaaaatacaaaacttagccgggcgtggtggcacacccctatagtcccagctactcgggaggctgaggcaggagaatcgcttgaacccaggaggtggaggttgcagtgagctgagatcacaccactgcacaccagcctgagcaacaaagcaagactccatctcaaaaaaaaaaaaaaaaaagaaaagatatatgagcaacaattactggggaaacttttcaaacaaagatttcagagagttggtcatgtttcttataaattcttagtggaaatcccagaagctcttttccagaattgttttctactctgagcacctactctgggtggtctttacttgcctcgagttcctttatcttaaggatgattcaagagaatccctgacccccaaacctagtatctgcaattctgagaggtggcgatctttaaccaatcatctgtttatcaagttttgagcaaaagtattttgaatggacatgagaattaggcagtaaaataatgtagactgaacaaaaaatgcttgggggagaaaaaagccggagaatgagttgtgtggctatcactggaaggaaagaaagggtccaatgtatagatctgattcatctccaaatattttcccactaaagactgtggaagtaaatatattgatggactctgtaatcactgatttaaaacgtgtgatttataattacaagtttcaggtgatttctgagaatgctttttctcttctgagtgtaccaaaaagaaccccacaaaattacaagtactaatatgttttctctttgaaccttgtctcaatggtgttcaaaaactttgatgcaattaatcaattcataaaacaccttgttatcaagtttaattagccttcacaaaacattcattcttcccgaacattctcctttaatctttcgttaatggtagagtgctaaatgtttcccttttttgctattattgtttatttaataaaacttttgatatagacctctccttttctgggtcatgcaaattgatgttttagtgatagcatttgatctttctaggaggcttgatgtacttgataaggtttcaacttgttagtgaaagtgagatttcagttatattaggcagagctttgaaatggggttttctttcttcataactttcctgaaaaggtgacttttcatgcagccaaacagagaaagttttattaactaaagagagaattaatggcaccaagtaaagtaactcagctggaaaggttttgtttgttttctttcttggttgtgtgtggtttatttaaacatctactatttttttaaacatctactatttagattttttttaaacatctactatttcttcataaggatgctgtatatcaaaacctccaaaaagaggtcagaatagccagtctaagtaatcaggacctgttggcccagtatttagctaaataaataagaatgtaagtgtactcctggctcagaagctggccagcaaatttgctaagtgattgatttgatgctaattttctgcatggacttctcatttccttcagggcctgtcctatgggaggaaataacttcagccaagctgactgagccctattttaggtttcactttgagctttgaatgtttggaaaactccctttcccagcaggactacatctccaaaggatttccatttatgatgacccaaagaatgcaacttgctctaaaaagactgcagaagttccctatgtccaaatcccagtacattccgaggacagaactgaaatcaacatatgcatggcaggcactacgattttgctcacgctaattctgtgtctctttgcatcagtactgactgttggagcaggtctacgctgagagccagggctgtgtttcttccctagtcctacgtaggcattgtcatattttaatttcagaataaccaccttctttgtcttagtgcattcaggaattaaggagaagaatagagatttttcattgcaatacacaatttatgggatgattgaaggaaatagagaaccatgacacataaaaatgtgtgataggatcacagaaagagcacttaactgcaggctatagtcttgagccagaaattgtctctccactacctctgggcaagttgcttcatctctctaggccatttgtggaatgggagccttaaactcctacaattttctagtaagaataaaagcaactttgttttgaaatcattctaactcaacagaagttgaagttatgctatcacgttggaatctctagttatagactaattattttcaatatttattacccaggaccccaaattacgtgaacttttggatgtggggaacatcgggcgcctggagcagcgcatgatcacagtggtgtatgggcctgacctcgtgaacatctcccatttgaatctcgtggctttccaagaagaagtggccaaggtatggtggatggaaattgctaaagcttatcatcatgatctgaatccttgagctatcatactaatgcctgcaaaagactgaatttttgtcatatttagcatgtgttaaaatttcacctaaaaataattcagctgccaagtataagtgcaattaaaatacttctaaataatggcatcaacttaagaattatggagatttttttcataaagaataagccatttggccgggcacggtggctcatgcctataatcccagcactttgggaggccgaggcggacagatcacttgaggtcaggagtttgagatgagcctggccaacatggtgaatccctgtctctactaaaaatacaaaattagctgggtgtggtggcgggcacctctaatcccagctaattgggaggctaaggcaggagaatcgcttgaacccaggaggtggaggttgcagtgagccaagatttgccactgcactccagcctgggtgacagagtgagactgtatctcaaaaaaaaaaaataaataaataaagagaataaggcatttgatatagtttctttgcataacaaaatacaaataaaaccacattctatttcatctaaacactttctcccaagtcattctctcttagcctcatccctatgccacttctaagtccgtgtcatttccagctctctcctaggggacagacatcttcagccctctttaaacttcttaatccctgggcagcaactagcccaccataatccatgtagtagttactcagttaatatgtagactaatgaaaaactaacagtttaaaataaaaattttagataataatgaaaataatattaagtaagaacaaataatatttattcaattacggattagaaagatgaattagatatggcccacccactgaggagctgccatttcactaggagcaagcctttcagatatttacaaaaatagctagaaaacaggtataatgtagcaaacaagaagctgtgaacatctaggacccctggattcaagtgcaatgctttctctagaaacgtccaattgtcattgaaagaatactgaaatgaacatatttaaagaagagctttctttttccatttttatagtttataaaatactagtgatagtccttctccttcatataacttccttcaagagttgagaatatgaatctaagaaaactttgagttctgcatataatatatgtgccttacagagcttctcatgtcatgcatcacaactacagggtcacttcatgtcagtgtgcattgtctaagtattgtgatctacaattttttaaccctcagtgctctggtgattttctgagctacaccagatgtgttggcctggttccttccttcctttctttcttttctttcttttctttcttttctttctttctttctttctttctttctttctttctttctttctttctttctttctttctctctctctttcttttctttctttctttctctttcctttctttcctctcttctttcctttctttctctctttcttttctttctttcttctttctttctttctttctttctttctttctttctttctttctttctctttcttctttcctttctttcctctcttctttcctttctttcctttctttctttttctctctctctctttcttgtttttttttttgatggagtctcactctgtcgccaggttggagtgcaggtagtggctcctgcactccacttggctcacttcaacctctgcctcctgggttcaagccattctcctgcctcagcctgccgaatagctgggactacaggcgcatgccaccatgcccagctaatttttgtgtttttagtagagacggggtttcaccatattgaccaggatggtcttgattgtcctggtttctgtgtcattagtgattattggcagggatttatttctaacacttatgtaatattgactttaattcttataatgggatgcataaaatgccaaccagttttaatattctaatgtctttagaaactactctttccaagtatgttgtaaacagaatctactttctctctttataagccaagttacccatttatttctatagtatcatttatacttggagagatttcagttcaatgaacattgtctgtgtgacatatactttattttgctgtatatgaatggatagttggatggataaattaatacagaaaaaacagattctaagtgtttgcaaaatatttttaaaatatgtttccccaaatgaactatattccttttataaaaagtgaccaatttatgggatgcactaaatctcaattaaaaacatgcaataaatggcagtggctttcagggaagcttttgctaagagtaaatatatttatattacacatcaatctgcatatcttaagttgcattaagcctttgtgcagtcctatctaaaatatatttaatttcctcttctctgtgggttactagccactaattttccttagggatttttatctccaatccctgtaatattccctctcaggagtgcatctgtagagattttcccaggggctacttgatgttcccagtataattaatgaagctatggagaatattttgccttccctggctgtgatgttctatagagtattttcccccacactgaaagtgctcagccagaaacttaagatttgcaagtaccactgttaccttggagcatcacgtatcacagtcacacagggagcctgttaaaacacagattgttgggccccagccccagcaggtctgggatggagcctgagcatcttcatttctaactggtcccaggtgatgctaatgctgctggtccaggcaccacactttgacaatctcttccttagagaagcttgggcacagtgttgccagatcttgaattttcttctaaaaggagctgcaaaatccatgaaaggtgttaaatattggcaacagttgtttaaaaacaccatgtgaaccaaaaaaacattaactatggtctgagtaagacttgggagcttccatttggcagctttttggtctagattcacattaagtaagaaaaacattgtgctaaataaaacctcaggtcctgaccactgaatacaatgggggaagcacgtaacattatcttgcagagcagaatcagcactctccaccacatttgttcattctctaacttccaaaccattcctagagccctctgggtgcctaagaaatgtgaccttttagcacagcatttttcagtagacagagaaccatctgcccccttaatggtcattgtggaaatttttcagaagttttataataggccacttttttgtgacttagattggatcctattcttaaccacagcatctctcatcccctataaaggaaagagagacagaataatataaaaagaaaatcttttggatgtctccaggttccatttttaaacatgtaacttgaaaattagagaataagggagacaaatcatgcctttgggccaaatttaaaagtcaagaagaacacaatcactacacaatgtccttacaacactcaacccattaattcaacaaatgaaaaccaagcaaatgagaaattactcctggaggagacaaatatgggttttttttgcttttttttttttttttttttttttttttttttgcctgctgaaaaaggtaagactttgttgcaaataaaatatgttcccctgaaaggccataattttgactctttttgagaaggaactaagtggcacagaactcatactcatgagttctgtaatttgggccccaggaaggaacacagtaaacgggagagagcactagagaagatgtctataaatgagaaatgttagcaatactcttctgccaaatggatatgagccttcaagcccgttgacagtttgggtacattcttcatccataaaatgaagaacttggattcgttcactcatttattcaacaacattttgttaagccttctgcaatgtgccaagtcctattctagatactggagatcaagcagtgaagaaaacagataaagacccttgccgatgtggagcatacattctagtgtgggagacacaataagtaaaataaagaagtcagccacgcagtgtattaggaagagagtgatattgacaaaaatgagatagggatggagagtgcagtggaaaagggcattaaatagggtggtcagtgtagccatctctaggaagtgacacttaagcaaagactggaaggaggtgagggaataagtcaggaggatgtctggagagacagcactgcgcttgcactacagcaggtgcaaaagccctgaggcaaaagatagtctggtgtactttaggaacagccaagggcaagcgtgacagcagctgggtaagcaagattgagggaaggtagtagcagagggaactgaggaggcaactgcaactgattttgctgtaggatggcataggcttttgaaggactttggcttttactgtgagtgagatggaagccccgagagggtttcagctgaggacagatgtgatttgacttaacatttaatccataatggaccgcatgggggaggggaaataatggaagcaagcagattcgttaccaaactattgaaatatttaggtgagttgctaatgacttagaccaacgtggaatgtggaggaaataaaaaggaatccaaatttgcatgtatgtacacacacacacacacacacacacacacacacacacacacacacacatattataaagaaggaagtgatggcatgtgtttatggattttatgttgcatgtgaaagaaagatgcatggaatcaaagacgatgttaaagttctggcccaagaggaaaagatagaaatatcatttactgacatagggaaaatataaaatagaatataattttttgtttagaagtatatagcagaagttcagttttggttacgttcagtttgagattattattaaatactcaactgggtgattttgagtaggtagttggatatatgagcctggaggtgagtgccaaatataacacgtaaatttgggggtcattgggtatttgattgtattaaaaagtcatcatactttttaatgaagctggatgagatcagccaggaagtgactgtagatagagatgtccaagggctgaatcatggacagtccaacataaaaagaatcagaaaaacagaagctgagaggaggcagccagttaatgccatgctcatgggaactgagccagattatttaatgttttactgaaatgtagcatacacagaaaagtgcacagtttcttactccataccctgatggagttttgaaaaaggaatatatccacctaatcaacatccagatcaagaaacagagcataaccagcaccctagatatccaccctactaacacctctatatcggcagttaacatgatagattagtcttacctgtttttaaaatatctgtaaatgaaatcatacaataaagtctttttggtctgacttctattattcaacattatattatgagatttatgagattcttctatattttctgtgtaattgtagtttgtccattctctttgctaagtagtagccagtaatttacttacagttcatgggcattcttgtagttgtacgtttagggctgctacaaataatgatgctgcaaacatctgcctttcagagagctagatattggagtgtaatgactggtcatagatctttgtgtgtactgctttgatagatactgtccttttctcaaacttgttgagccattttgattttttaatattatttcacacataaaagaaaaatttatcagaggatctctgtaggttaaattattacattttgaagtagctgtcatgtcacagaagaaatgcgctctctaaaaatatgttatataaagtgaacattagtctttaatgtttgtaattttagattcttccccctctgtagctgtgagtatcttggagagtctaattcacttatttcaaggatatgagtgagattttctggaagttttcgttaacttcgtctatatcagtttcttgtgcacaatctagataacacaccagctctctgaatttcctaactagctctcacatctctttcctgctccccattcttcctgccatcttgttaagcccttgacaggtctcatggatagtcattacctacctatttcctgaaattctctcacactttgctctacaaatctgcctgctcatctgcataagaatggccttttaaaacaacaaactcattcctgatcatattttaaatcattttcattctctattacctgcaaaatgaagtttctgtgcatttagtgaacaaacatttattgagggcctagtatgtgccaagcacctcgctgggcactgaggattcatcagtgacccaacatagtccctaccctcaggtactgatgatccaccactttgactgttgcaccattctgttctagcagctcctaactacttgtgattcttctacctttacaattgtaatattaatgcctttataatatggtagtttcctagactgcctttctctcttttgtccaccaagaaaagtcctaggcctcccgagggactcagcatcaactcagttcatccatctctcgctctatctcatgacttccatgcatagcccattgttctttcatctgttgttctgtgaaccttgaacatattttcaattacagtcattacactgtaattatcaatcagtgtgtcttataatctatcctgtatttgcgagctgatgaaagtcaaaaacagtagtttagtctgttttgtgttcccaggatctagcttagtgcttggctcaataaatgcgagaggtgtgagagaggaaaggaagggaaaggaaaggaaggaaaggggaaggagaagggaaaggaaaaggaaaaggaaaaggggaggcttttgaactcttgaaaataagtgataggtcacgtacaatcttagagtcatagtggcttttaacaccatgtgctgcaatcttttcatttagagttgggagaaattaaggccccttagcagattggttgcttaaggcttttcctagaataattctctctccagcttgccaggattctcagtaggaggacccaggtggcattcattacgatggcttccattttcctaatcttttttcccaaagctaaccttattcccactcagagttactgtgactgtcacttccctacccagcagttactccacgctttcttaagcaaatgaaaaatagcttctatttaccaaatagttgacacctttcaggataaggaaatgagagaagatgtcacggagaggggaatttcttttaagcaaaagaaattatagtctatgggataaaggtgggaaatagaaaagaaagagggacaagtgaagggttctgctaaggccacctccgggccattcatcaaaaacttcaggaattttcttagagttgccctaaaataatagtattagctatttaaaagtgacctcaagagacatgaggttcttatatttatttttattctgggaacatatgcattgaggtaagaattttgaaacacttgcgtatattctgtacaaaatgtgtgctttatctcgtttctattttgaatttcaaacaaatttatgatgagtaagcagtagctgtaagtttgactttaaatgaaaaatgattaagaaaaaagaaaaggtggtgccataaattgtgttcagcaatttgttttgggacataatggaaaactgtgcatgacttccttgcaggtagaatacatgtgccaaaaagatcactgtttgcaaacatgaaaagttagatccatgttattgtgttttgtgagatcatcattacctgctattcctgaccttattatattaaaaaaaaatgcctgtgtcatcttaggctattcttccacccaatcataaaaaggaccaaattcttactgtgtcaatacattgcactatttgtcttggaattttatactggtaggtgtcctttgttggagaatgagatttactctacattctgcacattttggatatgtgtcaggcaaatgaaggatgcacaacttaaacttttatattgtgaaaacatcgtctatctggaacatttgtttaaaagctcataagtcaaaagaaagacattcgtattaaaaagatttttattaaaaaaggggcaacttggatttcagtctctcccttacacacacagaagcagcagcaattgctattctggtgactgtggaagaaagcacccctgccttctgtctcctgggtgtcttttctgcatttgctagacaagaacttttttggagccagagagtgctcaatggtgcccacataaaaacaattaatgtcaaactgaagggaaaatgtcaacgctgagacatagaaatgactgtgatttcagactgtgggttactgttagtacaagcccacctctcccctgaaagagaaaacagaaaactgcatcagcaatagcatctcttctttccttccatccactccattgcagagacaagctactcttctgcatacctccatctgcctaccttctgatgcctggcagctaagtaagccctgattgcattaccggtgtgcctagcctggaagcaagaacatgagcaccacaaaaaaaaaaaaaaaatcaccgtgactttttggaaggaagaggagttctaagaaaatctggcttccttgtttaaatttctccctccacatataaaatattggtgttggcaggggaatactgacatactttgagaaaggcaggttgatctgtttcacctactaccttgatattggttgtcatctttagtagttaagccaaatgatgcccaatgaaaagctggcactaaggattaaaaatactttttgaaaataccttgctagtaattttcctgataactatattataattttcattcattcaacaaatatttacaggcataatcagccaatgaaaaggtgaaatcagaagagggaaattaaggaagatattacaagaaaatatctgagagctaaacaaaagtactggtcttaaagtctaaatagcaagtacaggaatggagtagattcaggtaatgagtaggaaactggaagatgacagataaatgaaaaagacttaatttttttctctccaaaaaaaagttaaagtagaagggtggggataaatgtaccagaaatgtattatccaaatataaaccatgctaaaacatgtaagattttcaaaaactgaaaaaagaacttaaaaagataaatatatacttgttattaggaatgttcccttcggaaagccatgtgggttatggtgttggaactgaaacaaataatctgatatattctaatatatggcctagcagaaaattatagttgcaatttcatactcatgtaaatttttattatatttgttttaaactttcagaatcaatttatatgcaaataaagtcataattatgaatgcggaacaagataaaaactgaccatttattttatttattgatttatttttgagacggagtctcgctctgtcgcccaggctggagtgcagtggcgccatctcggctcactgcaagctctgcctcctgggctcacccgccattctcctgcctcagcctcccgagtagctgggactacaggcacccgccaccatgcccggctaatttttgtatttttagtagagacggggtttcaccatgttagccaagatggtctcgatctcctgacctcacaatccgcccacctcggcctcccaaagtgctgggattacaggcgtgagccaccgcacccagccaaaaactgacaatttaaaagtgagtttaagctaacgagagttggaagtaaaaggaatggcaggtaaatgtcctcctatcataaaggagccaagggatactatttttaatgagtggatcaagagagtttgagtatgttgcttgagattgtagaggtgacagggaggaaagggcacaagtgatagaactctatcacaagcaaggagaaagggcaggtgagagatggaatcagagatttaaagcctcctcaatcagagcaggatattatagtcaaattctaaaatcagtcaaggaaaaacattatacacgcacacacgcacacacacatgaaaaaagcattacacacccatatatataaatagaaatgtgtaagtaaaccccagaaatttaagaatagaaatgctgaaaatagttgtcaagaaacagaactaggacgtagaagtgatcattgcctttccaacccctctgaacaacttttaagaaactctgtctctgtttcatcgataaataatagttttttaggttactatcatttaacaagcatatattacacctgtcactggtctaacatgaattatcccaattctctcaaaagccctatgaaataaattctattattgcttccattttataagatatatgaatattggaggacaaatttaaaaagacttgtccaacatgattctgtctttgcatttggcctggagtaacagaaaaccaaatcaaacaatagctgagacaaattaaggatttttaatttgtgttttgttcagtttttcttttcttttctttttttctcatgtagccggaaccctgaaggtagtgttgtgggtgccactgcctggggtgggcattgtgggtggtaagagaatttaccaagacagtgataggtaaagaaaggcagatttattagagaaagtttgaagatatgttgcaaaggtgcagtgggcagcacagcagagaaggggctgtctgcaaagaggcagggattggagggaagtttcatagggtcatgatggaggggttatgtgcagaatgaggtcatgcttctggagttactgggactacgtgctgaaggagctatttgggaacagagtgttgtgccagcgggttgtctgtgattagccatctcagattgttctccccaacctagggccctttcctcattgttgcttacttatcttattaggactccacaggtggtttctggcactgattcaggagctcagggataacaaggctgagtgaggcccctatgattctcgtggcctttttctcatagatcgagatgcctctgtagctctagcctttccatttacattccctacagtaaaaggaaaagagatctatatcaggaaacacattttcccagaaccctccagcaggcatctgcttacatgtgatttgccatgtggcacatgttggtcacccagctgctaaggacattggaaaatggatatttttttttcagttgaacatattattggcctgagcactgttgggcctctgttaggcaagaaggataaaatagatatgagatagcatttggcagaaggtcccagctagaaaatggtagaattgtgttctgaaatccaataaattataaccatgataagctagaacaaggatctgcaatatgaaagtcaggaagagccattaaataaactgatatcaatattttacttttaaattagaagacaagaaaaaaaaaaaaaactgtgtttaagagtcactattccaagaccttcacaggcagtgagaatggtcaaagatggaacaatcaaggccaaagacaaagaatcgttcttatagcagaggaagaactaacgggattgagttaccaagggcaaaataccctcttcatttgaagagaagaatctagcttgcaaaaaggtttaaaataaagttggaaggtataattaaggtaatttaaaacaaatttatttccaaatgagaaaattatatttcagcagaattctgtcattaaattataagttaatgaggaactacctgtgcctcgttcactaatcagttttcaagtaatgcagttttaagattgtcgaactgctttcataataagcagataagcagcatgcttaatgcccaagaattgcgattgctcccctttttctgtttcacatacatcttactaaggaaattagcagtgcttttttcttttaaaatccttttttatgtgatctcttcaaatggaattatttttgtaatgaacaacgatatcaattataattacagaccccgcttacatttattgtctatggtacacagcaccgaggcagatacaaccaaagtaataattaacactgagactgctaggattcaaaggcataatagcaagtgttttcataagaatgacatgagactgttggaagaatcatttcaggaatgtgagggattgacatgaaatccacaaaaatgaaactttgggggttctgtatatgagcacacaattagcattttctcagttgtacaaatgaataatgactcaggaaactaggaggagggaagggaggaggtctccccagtggatgctaagaatacacctgagactcccagtgatacagctgcagtcgtctcattgtgaaaacttcaacagaaacaaacatctctccgttcttctactctgtgccatggacgttgctctttgggggagttttaatttttcccgtggaagaattttctttaagttcattttcatttcatttcaccacgttaaacttttcccatttggcagaggaatgtcaagaagactgggacatactagaactggcagcctgaactcttccttagagtatcaggataccatttagaagaatattgcttcacttacctgaaaaaaagatacttgaacaacagttcttcagaatacagcccaaaacatcaaccaaagcataataagtatgtctacatagccaacatagatgcccaaacccttacacaaaagcttctgtactttattaattggagagcttgctagtcccatgttatatccaggactcctaatgtttgtaaactattccagtatagttcacattacaacagaaatgcataaagccagtattacaagccctctagccaagaatggttattgaaacttataacaatagaggagatataaaaattaatttcaaaagacataaatcataaagcatggaagtcagtctctttcatttacacattcacttatgcagtcaactcagtgattatgaatctattacctattttataaaaaagaatgcgaggcagaactatgagatcccacataagttatgaaacaacacacaccctttccttccgtctgctttcccacaggactcctaggtaatgggcatatgccatgtttgctatactctcccctcttctggtcattgcttccttcccagatccaattacttggttgtcgtggacactgctaggttcttacctgattgattgttcaagaggtagaccaatcagacctttcccagcattcttgttactgaaaatggaggaattagccagaccttctctggtggtgaaagataccatatgtgacaactcttggtgaagttggtggccatggggaagaacccgtcagtaaggaaaagaaaaatgccctcaggaagagagcagagtaatagcaatcaagaaagcccttttgcattcagtctccaaattcctgatgatcatgtatttattataaatgcattttttggctgcagtttgtccagtttttccttcaattacaggaaacgacccattgcacttgatactttctcctatttcttaagttagtttgagttgtgcttttgtcagatgtagcttaaagacatttgaataacatgatctgaaaataattatgcatctttccttgatttgagtaatattattatgctagttgtcctaatcatgacaatattgagtcctaatatgtttcctagctttttgttagttgggtttttttgtaattatgtatgattggcaatcatttctcttttggtataagataaaaacgagagcactttgactatgatataagatccacagagaaactataccagaattttttccaaaattctagatgttcagtatagtatcaaaagtgcagtcagttatcagatagtcctttctgattttaacaaaaggctttccagctcctgtaccatctttcaccatgaaaagattcttcactgcgtcattaagacattaaatgctcagcaggatgaattctgatgcatgccagtagtgacagaaatgtgttcagccaggtgaggcaacactgactgaatcacacaatgttcctccttactcacatcacacactgccacccccttatgagtagaggtaatcagaatgacaccattatcaatgacagcaataggagtttgccaataaataaaaaacaaatataaaatattaaaaaataggacctttacatgtctcaccaatattaaaatatcttgtttaaaattattatatgtcccagtaacttttaaatattaattcaatagaggacgagataaatagtgaaacacagagaatttttagggcaatgaaactactctgtgtagttaaatctccccaactctttctaatgctgtacctttttctggcgtgaaactagcctctggtaaacatacaaaactgtatcttgccctcagttatagatacttttaccaatgcagaaagttggcatggagctagaaatgtctaaagcttggccatgagcctacaaaatattataccagaaacatatttttgaaaccagtggttattattcttagtttaaaattatctattttaaggaaaattgatttttaatttgttagatagttactgtgaaatgctcttctgtgtcggcataaagcttggtgagcaataattttgcttctctcttgcagctattctgtactgtctttttaagtcctcctccaacatatagagttcaaggtctcagtatttctcacctggactactggactattacagcttcctaactgagttacccttctttggattctcagcctcaaatccatccttgacctggctgccagataatctgtctgatatgcagcctagccctggcatcacattttttactaatttatctccagacacctaaatgctctttatcctctgaccacaactctagtttgttgtcgcaaccccctccctcttttctaattcctattagactactttttgtttgctctaactcctgccatgttagctcacctctagttcttttcccagttttctctgctcgggattccctcttttcttccccatcactctatgttccctgctcctccagttccatcttgaatgttactgtacacatgacagcgtattatcggtgccttaagtcaggaagcaaaaaaaagacaaatcaaacaaaagtagaaacaacaaaaaaacaggtggcaaagcaattaaactaaaagacattatttcactttgggaggctgaggcgggtggatcacgaggtcgggagatcgagaccatcctggctaacatggtgaaaccccgtctctactaaaaatacaaaaaatagccctctccctctccctctccctctccctctccctctttctccctctccctctccccatggtctccctctccctctctttccacggtctccctctgatgccgagccaaagctggactgtactgccgccatctcggctcactgcaacctccctgcctgattctcctgcctcagcctgcccagtgcctgcgattgcaggcgcgcgccgccacgcctgactggttttcgtatttttttggtggagacggggtttcgctgtgttggccgggctggtctccagctcctagccgcgagtgatctgccagcctcggcatcctgaggtgccgggattgcagacggagtctggttcactcagtgctcaatggtgcccaggctggagtgcagtggcgtgatctcggctcgctacaacatccacctcccagccgcctgccttggcctcccaaagtgccgagattgcagcctctgcccggccaccaccccgtctgggaagtgaggagcgtctctgcctggccgcccatcgtctgggacatgaggagcccctctgcctggctgcccagtctggaaagtgaggagcgtctctgcccggccgccatcccatctaggaagtgaggagcgcctcttcccggccgccatcccatctaggaagtgaggagcgtctctgcccggccacccatcgtctgagatgtggggagcgcctctgccccgccgccccatctgggatgtgaggagcgcctctgcccagccgcgaccccgtctgggaggtgaggagcgtctctgcccggccgccccgtctgagaagtgaggagaccctccgcccggcagccgccccgtctgagaagtgaggagcccctccgcctggcagctgccctgtctgagaagtgaggagcccctctgcccggcagccaacctgtctgggaagtgaggagcgtctccgcccggcagccgccccgtccgggagggaggtgggggggtcagccccccgccctgccagccgccccgcccgggaggtgaggggcgcctctgcccggccgcccctactgggaagtgaggggcccctctgctcggccaccaccccgtctgggaggtgtacccaacagctcattgagaacgggccaggatgacaatggcggttttgtggaatagaaaggggggaaaggtggggaaaagattgagaaatcagatggttgccctgtctgtgtagaaagaggtagacatgggagacttttcattttgttctgtactaagaaaaattcttatcctgttgatctgtaaccttacccccaaccctgtgctctctgaaacatgtgctgtgtccactcagggttaaatggattaagggcggtgcaagatgtgctttgttaaacagatgcttgaaggcagcatgctcgttaagagtcatcaccactccctaatctcaagtacccagggacataaacactgcagggtcctctgcctaggaaaaccagagacctttgttcacttgtttatctgctgaccttccctccactattgtcctatgaccctgccaaatccccctctgtgagaaacacccaagaatgatcaataaaaaaaaataaaaaaaataaagacattatttcattgaagagggagccaagtcaactacaacaatatcagatgatgacctaggtcttgtgtcatcttctcttggagaattttgtaggggtttcagcccagaatgtgttgtgtgtttcaaataatcacgcagaatggaacttctatatttttttgtagacttgctcttttccattatcttggaagcctagtgagatcattgctttctggtatgaggtagggattatgattaggagattagtgagatattgacagtgttgggagaagggagaatattgcatattatgtggccttgtgactacatggtatggagaatttctagaactgtagttaacagttaaagataccagatatagctgctttggcatgagtagtagagcaggaagattatgtttgcatgttctgctggaaacatatttgatcatattttaaatttttaatgactctttatctgtttataattcaaggaaatagtaaaatgtgcttagttattgaagggaaacagagcaattttctatttatacaaattttaaaaagcagaaaaacctttatgtacaaagaacatctcctttggaaaagagtagtctctcagggacttgaatttacttatgtcatttttacccaaaaaagggataataatacaaaacaaaacaaaaaacctttggcatgcacattgaactaatgtgtcttcctggaagccaagctaaaagcatgtgtctaatgactgtgcagtatttaagctaatgcaagtgttatttacatttttcaggaatggacaaatgaggttttcagtttggcaacaaacctgctggcccaaaacatgtccagggatgcatttctggaaaaagcgtaagtcactctaattttattgctaagggcgttgcttcttctgagtcagtttcctttctcctttgtgagtcttccgtttatgccatactgacttctcacattgataaacacaaattttcctttgggatttattagagaactgatacctcccctgttcagaattggaagacttccaagaaagattgctctttcctccaagctgcacatctgtgttacacctgggctaagttcgcatgaatgtcagtgcttttgacacacaacaaagagacacttccaaatcctggcagctgtgctcagaactaaaaattattaatttcagataatcctctgcttctacatctgtgtgtgtcctctcaattattaatctgaggaacagcatatgttcctcatttctgtagagttatagatagatgctacaatacctttcctgactacttaaatcaataggctgacatcctgattccatcccatgtagatgatcccagcaagtattagtaagaaaagagaaaggatctaaaggaaagagaagaaggaaaataaggaaagaaaagcaaaacaaattgccagatcactctggaattgccacagcccttctaaaaattgtttgaccaaggaaaataatgacttaggcaagatgagcagcaaggaaagctggttgtgttcattttggaagctgtggttggtcaggaggttaggaagtctttaaatcaaaaccacaagtagaaacattaataggtggtcctctattttgtttaacagagttctgtcttccctcttcttatgtaagacatacccatcattccagacctaatacctcagccacattcctttattttactcttctatgaattccttttgcttttagtcaatacctcaggtcttcatttaagggcttttttatgggatcgcctcctctcctgagtttgttaacttaaggactcttccttcatgcctccacctcttcccttcctttcttcctctatgtttttaccttgtctttgattttatcatccttcttctagaatatgttttccagacaatgtttctagaacattcattcttccatgaaatgttagtgaaaggggacacagaggtaaataacatgttttatctgaaacatagcatgttattgctagttggctaatcaatctctactacaaatgtctattccagaaagatgtctccctatgaatagctactatggacatgtcttttagtgaacatattgttaatatttttgttgcacacatctagctttgggattgctgggccttagcgtgtgcagcttcctgaagtagaattcccaatgtatgcatccatcaacagtgacctagagttctcattctgagaatgaatatataagcaaacaataagcaaaatatggttagttctcagaaacatgctattgagtgaaagaagccaaacacaagagtatgattccttcatgtaaggtgcaaaaacaggcaaaagtaatctatgctatttgtagtcaggataacagttccctttggcagggcgtttgggaagggcttctggaatgctgctaaagtgacaatgttctatttcttaatctgggtgccaactgtggagacttgggcagtttgtggaaattcagcaaaatgtacaaaggcatgggcttttttgagtgtattttattgttcaagaaaaaaaagcttttttaaaaaaatcaaacccttgtttttctgcttctccaacagctatactaaacttaagctgcaagtcactccagaagggcgtattcctctcaaaaagtaagctttgtgagcatttctcattattcattttattttcctcaaagatctgaatccatgccatggctctgttttgtttctccagcagcctaagtgggagtgtggaaatgcgtggtagccctgtcctccctcacacatgtctcatgtcagtgcagctgctttcctcatagacgtctccccggggcttccctttcctctggcattattttcaagaaataccaaagcaggaagtgggtggaggaagtggagggacccttgctactaaggccgaaaggccatctgagattcagatctgttctaggagtggaaattggccgacctcagtgcctctttctaccaagatggctgtagccctcaagcagggtttgcaacctcagatgctaactggagccaggcagggaatgtaaatgatgaaacaggtcaggaggaggaggaaaaactaaagagcaaaccctgtctaaaggagacaacagctcatctccaccatatatcctgtgggactggtgagcacctgacactagattgtctaatgtctttatagaacccataaacctaaattagtatattaaattgtccagtacttaagttctatttttaaatcaaattagtaacgaaaaaaagtccatctctaggtcatatccagccaaaagtctttaacttttgacttacaagctactagaaagcttctgcgaatacacaaattaagccaagcacagtggctcatgcctgtaatcccagcactttgaaaggccaaggcagaaggattgcttaaggccaggattttgagagcagcctaggcaacatagtgagactctatctttgcaaaaatttttaaaaattagccaggtgtggtggcacatgcctgtagttctaactactagggaggctgaggtgggaggatcacttgagcatgggaagtggagactgcagtaagctgggatcatgccactgcactccagcctgggcaacaatgtgagaccctgtctctaaaaaaaaaaaaagaaagaaagaaagaaaagaaaagaaattaatttaaaagtaaacaaattaaaaattaaatttattaataatgcaatgtacaccttggggcaatgggtagtagcagcaaggggacagaattaataaggatgtttattttagtgcttaatattagagattatttaatgcaatattttttaattgggtcagcaccataatcctaaaatactgattttatactagacaccttaattttaaaagcacgcagttgatctttcagaagacagatgcaaatgcatggaggaatggttatcttttagttctttaaatatgaataataaatagatttgactgaatggaatattttgagttggcatcatctgttagtgctgtgatccatgtgccatttaaacctctctcctttgttgtgttcacttcacagcatatatcgcttgttttcagcagatcggaagcgagttgaaactgctttagaggcttgtagtcttccatcttcaagggtgagcatgtgtgttatgctatagtttgaatgttcagcccctccaaaactcatgttgaaacttaatccccaatatgacagttttgagaggtagggcctttaagaggaaattaagagcttccatgattaatgggttaatgaattaatggattatcatcggagaggaactggtggctttataagaagagaaaaacagacctgagctagcatgttcttccccctcaccatctgattccctgtgccacctctgccaaagtggagagtccccactagcaagaagacttttgccagatgtgccctctccaccttggacttcccagcctttgtaactgtaggaaatacattttgattcctatatattatacagtttcaagtattctgctatatgcatcagaaaacagagtaagactgaaaattggtaccaagaggtggggtttttgctgataacaaatatctgaaaatgtagaagcagctttggaactgggtaatgaacagaggctgaaaaaagtttatagagctagctagaaacagccaagacttggtgaggcctcttttcactcctataaccccagtatttcaatctagaatgacccttgctttttgtagataaaaaagtcacctaatcaggtaatatttttaaaatagtcaaaaaaggctaacattatcaagatgacaatttgaaatgtggtttcaaacttattaacaataaacccttcttgatgttttttttaagatattagctaatgatagtgttgagttaggaggcgagactcaactctggtggtggggtatgaacaccggaccaaattaaggaccagctaaaacagggggagcggaagcagctttccataagatatgtccatgtcagtttaccattgccagggcaacaccgaggaattaccaccgctttccacggtaatgatccaatgacccaaaaattgccactcctatcatagaaatttctgtattaaccaccccttaatctacatgtgattaaaagtaagtataaatacaacctcaaaactgcctgagctgctactctgagcacactgcctatggagtagccctgctctgcgggaacaggcatggagctgtaacactgctgcctcagtaaagttattttcttctaccctaccactggctcgtccttgaattctttcctgagtgaagccaagaaccctcgcaggctaagccctactttggggctttccagccctggatcagtgtgaagccgttatgtttaggaagatatttgaaatattaatttcatctcaccttagcattttaaaatgtttagttttaagatgtataagctatgtaagcaattagtatgctgctatgtgcttataaataaatatatttacatactttacagagctgtgctcagaaagtttttactgagggggtgcaggatctaaacagtttggatctaaacacctactttgctcatacggtggtaaagtaggtgagaggacaagcatgtaacatgctttcatttttatgcctgacacacacaaggtacatcatatacattaaccacctcaaataaaataatttgctttcattttgattcatttctacatgactggctctaaaatgatttgttactattgtttctggaagtccattgcataaaatttttttctcgtgcagagctctcctttcattatttttatctgagtatctaagcaacaaggaagcctttacctaagggtaacatgactttataggaagaacctttgagcccctcaaaatgtgccagcaatgttcaagttgcactgaataagtttgcaaagccattcttagacttatgattgaattataaaagtattgagtgctatggttaaatttatcagccaattattgttgtgaagacttttcaaaacagcaaagttcattaacaactttggtgggtcacaagaaagaaataagagcacctcttcactatcacctttcttctataggtggaaaaagctaatgaggctgcgaaaagtgagcagagctgtggaaaggctcccccaaaacattttcaccttcattttataaagcaaaataaaatgcttgaacctgcttgctattgcttttttgttagatgctttggaataggaaaaatataacaattaaggtcctgtccccgacttcaacaaatatttcttgagctcttactatgtgcccataggcattgagaatatggtggtgaagaaaatgaaactcaaggtttcaaggacaatagagtcttctggggaaactagccaataagcatgccaacaaatgcgtctgtaaactgggggaagtgctataaaaagaaagactggagaactactattgagaagaagggaagctcattccagaaaaagaaaacaatgctcgcaaatccctgaggctggaaataatttccctactggatttaagcaactgagaaaagaccaccgcattcaagcataaagagaaaacatgagagatggatttgcaaagacatgcaaagaatttttttccttttgcaatcacttctgattttaccttttctggataacctctggtaaaatataataatcaaaatatttaacttatgaatctagctaagggaaagaaggaatagaaaattaaatgtatgaaccaattccccgtaaattgtaattttctaaacaactggattctgagcagtcaataaatacacattgagtaatctactatgtttattatatgttcaaactttcagaccaatgtcaattgcaggcaaatttaaaaggaaaatgagattcaaataacatgagttatgtttaaattagaaaaaattatctctaacaaattaaatgtaatgataattatctgaagttggagaaaactttaaaaaacctctatgctaaaactttgaaaaattattattcatagtaaagtataatttacttggatgacttatagaattagaatgctttttaaaaatctaaaaaccaaagactgtttcagagctaggaaataaatgtttctgtgaactgactatgatgtatcaaaactctgttttaaatctctgtgataatttcattcctacataacaatgactctagaaaatatccactaattagcaaaaaattttggccatattcacaagaggtattttaaacaagccacggaagaaaagggttatataaatcatagttggttctgcgtaaatgggagcatattttgtagccaagtcatttaagctagatttaattgtgctctgtaaatagatatattaccagaaacacagtggatgtcctgttgagatttctttttaaaacatgatattactgcacattgttggggataaataaggcacttgaacttgtatcctggctgacgtgatccactagaataacatattcctttagaagatgctactctttagaaatcacagttgctagcctgaagttaccctaattgttaaaaggtagtactgtatccaaagagagagacaaagcaattactgtccttctgttaacaacccaagcatattttccagtgagacccttgaaaactgttccgtgttcaaaaaattaccactttacccacaaactttctgagaactgaaaatagtttatttgcaccaaattcccttgatttaaggcttattaacttgaaaagagctcagtgacatctggaattgtataatagtcttgccacagcactggcatacggagttgcattttaacgaagaagatcaggaataaacccatgtatttgtttcaaataataaagtttactgtagttggtgggcacacatgtaatacaaagagaaattaattattttaaatttgaagaattgtataaattttactaaatactatgaataaaatgtataaaataacttctgtgtgtaacttattagtatgttgcctttcttctgtgccttacatcctgaatataaatcagaagcaatcacttttgtagttgtgattcttaatatgactaatatcaaaattctactttaaaaccaaattaagtattccgttcattatgagtgatttacttgtagttatttcatgtattccatggctaattcaatgttttatttatagtttcagaataaaaatattgacagtatattgaatttctgaatttactgggaaattgtccatcaacttgtcaagaaaaacaagtctatatgtggactttattcattagagtctgcttcagtgaattaatatattttaaaataacattttttctgatttttttccgaaatttaagtacccatttctcatataattattttttaaatcaagaaatatataacgaagaaaatgcagaccaccgtcccaaaactaataggaatatttagtgtactggtttacagtataaggtatagaattaagcaactcagattcaaaatatagtcattgtgacctcatcacacccatttgctcaacccaggaccttagacaagttttgtaacctcctagcacttgtgtgttcctatctataaaagtagtacagtaataatgccaactgcatagagttgatgggattacatgaaaatattcaagtaaagctcatagaactatgtttgatatactgtaaatgctaattattattctcattttgagtatttttcatatgcatatattggggggatcttgtttttatttttaatttggcatttggatatgacattaccaggtctatggaatctagaaatgcaaatgccaccagtactaccaccaagattgttaaaatcttttcccttttgagattccttgtatataagcatggtattgaaacacttccattttttcaagtttgccagtactttgcagtttctaaaataaatgggcctcattcagattactaatttagattatactagccttcttaagtcatccttcaaaaaggccaaacaacaacaagtcatcactgacagtgcgttttgtattgggtgcctgatgtgatggaccacgtcctggattaaaacagaagacccaaggtctggtatcatctcctgggttcatccagcaaacactgattaggtatctattatataccaggcaccatgctgggaacacaaaggaattaaataagagattgtcatgtcactcaaaagctcatagttcagtagaaaataagaaatataaaaaataaaggaaaagctgtgaaatggatgcaatgatgaagatagataaagggagactgtgaacacaaagaaaaagtagtgtcatgtctagctgatgtggtcaggaagggttcacggaggaatatttgaacattgggcaggatctttagagtattagaccttggatttcctcctagacaaacaggaaaaatgaatccgtgccattcacttcaccaagctgtgagattgagaaagagaaagtctgtgaattagctttgtgaatttcagtcttgtttaagatgcaaggaattagggattatccatagcttttacctaaacatctcccctatagcctttcatctcagcatttaatgatgcttacttattttaactcctctttatggaacattttttcttccattttcacctactaaccccaaagactttggggtatcctcatcagtcaagttgggcaagagaaaaatgagacaaagaaaatcagctgtattgaaatattttctttcttcaatatgctatcatccaactcgcaatgaaaataatgttgtgtttattcagattatctctttaatttgactcctcctaattcatagctggtacataaacaatgctaagattttagtaaagcatattgttctatcaaattatgtgtcaggactcttacgtaaatgatgttagttaaatttgatatttcaaaggaaataacagcacatgcgtgctcgctatccatttctccacacttctcaataaattacatccattcatttagtaaatatttatttatacctactgtatgtggcacactggaaatagagccattaacagacaagacacatatcctagctcgtgtacatctgcagattagcaaagactagacagaattgtatagctgggagcacaatacattgagtgttgaaatgtgagacatgcaaggtgtgatgtgtgcacaactggaagacaaaatccagttcaaggggaaggcaaggctttccagaaaaagaagttataaatagacgggaaggaaaagagaggtcagtaagtgaaggatgacaattattgctatccttagatcaaattaatttatgtgtacgttgagtgaagttggtgaaagggggaatgaggtgaactctttttagtagggaaaataggagaacacccttggggttcataaaatccagtaaagctggaggcacttgagttggccagcagtgccattgagcatgttcttgcaattgattttaaatatttctcttccttgtgtctaacagccaatgagtatggtagatagggtcattttcatctattaaaaccatttacagagctcctggtgtccacttagagagagggtggtactgaaaagtgagcactctccggctaaagagatttctctctttctataaatcaagaggacttttggaaacctgcttgcaggttatacttgttccctttttatgaatggcaaaatactaataaaacaattcacaagaagtccccactgctcttggatttgaccgcttgtgcttatttcaaagtttgtgcccaagtagcccaagttataatgatacaacacatctatgtataatgattcatgtattgttcggttgtctcaaaattctgttttgcaaaatagattttttctatctctgtaaatggatttagcaaaggaaatattacttcattcattcaatccacaaatacgggtcttctgctgtctgccaagtggtgagctaagttctcctatctgtttgcaagtggtgaacaacttcagacaataatttttagacatttgtataactgtacatttcaaaacctatgaaaatagtcaaaggaagggtgtgttcttttgtttaagggcttgaaaaataaaaataatcacattaacacatacctgaaataggaagactgcatgaaaaatgtctttcctgttaacaaaggcttgaatacatgcttccggtttccatggcagcccaaccaaacagaaaaataagtcatagaagtggccttttatatcaatgacttgcttcctaaacaataggaccaggagcagtcagtgaaaaaataatgactggtgctgtcctacttatgaaaactgttttacaacttatcagattatttaaaccagagggaacatagtttgaaaataattgacacaaaattggaatttatgttttcattttgactatgtctgtctctagggtcattacttaaaaaaagaaaaaaaaagattcaagtaggaaaaaaaaaaaaacctaaaaataattctgtcaaacagactatctttcctagatctaacttgctttagaaaatgtatataggaaattgcattaacatccctttagcaggagacaattcttaaacttaaattaaactgaaaaagccacagaaaaaagggtttgacaccctaaagccagtgtccaaatgaacgctacggttgacctcataggtgtgttatgaatgtttaccctgacctcctagaagaaaaggaaaaagaaaggaaagagagagggagaaggtgagggaaggggggaagaaaagaaaggagagaaaagaagacagagaaaaaacagggagggaggaagctggggaaggaaaaagaccatttgctgactccgttgttttatttcccagaatgattcaatacctcaagaagatttcactccagaagtgtacagagttttcctcaacaacctttgccctcgacctgaaattgataacatcttttcagaattgtaagagtacacattttaagccatatctttttcagcttgcattgattctcaggtggctagagcaggacttggagtggtaattggagatggaagaacatcatacactgtgtctaaaagcaatattcctgtgtgatgttttggataggatcacacaatcttgcccctgaggtgcaaccactgcttttaatgagtacaagtttgctgtgatatattgctggaggtagttgtttttgtatgctcagataactttgtatggttgaaggattatgggtagaacagggagtcatcttggcttagcagaaatagactcatgtcgcaggaagaactctggattgggaaccagttattttatctctctgagccacattagcgacatgagaagtttggattactaagaaccctctcagctgaagaattatttgcttttctgttagaaattataaacttatatcaaggcattacctttttttgaaagattagaagaaaaaaggaaaaaaaagaaagaaaccaaagcactaaggcaaatgtggggaaagtagcagtttacctttcttaaaatactgaaatccacatgacagaaaatcaatacaaaatgtggtaaacaaaataaggatttcttcaaatggaagacaggtaaacagtactgctgaaaatgacattgcatattcttgctttgtgctgttcattgccatcatatatttactgaacatctgcaacatttgtaccactgaatttgtctttagatggtcaatacaattgaaatgggaagtttgaacaatatgttgaggaattatactctcttgttgaagcctaactgtaacttttaaaaacactcaaacgggttgtttactttaagtaatgacaataaatacatctttaaatgattacagatatatggagttggatgattaaatcaaaaatttactgtcataataaaaaaacctctgtgttcggtttagagtggtgcacccttatgcacatgatgcagtgttttcccactgtgggttttcttacccatttggtattttgcaagagcattgggttttagcggtagcaattgcacaagatatttgtagcccatagaggtatagaaattatggtggagaagcacagtgttttcagggcaagataggagtttcaatatagcattttcttatcaagtataagattttatttccctagagttaaatgcaaatattagaatgaaacttagtttaaaaaattcttattgcttggtttttcattgtttttagtggtgcaaaaagcaaaccatatcttaccgttgatcagatgatggattttatcaaccttaagcagcgagatcctcggcttaatgaaatactttatccacctctaaaacaagagcaagtccaagtattgattgagaagtatgaacccaacaacagcctcgccagaaaaggtcagtactttctttcacaccaaagggaagctcttgtttctgattgggggtagtcacacgctgggagttaggaacaccagtgatcgttaggttagtttcctctgtttacaaggcattcctttcggtctgaaatcacttggtggttcagtgcactaggtttttctttaaactttggtgtgtgatttttttgtcattgttgttatatgtatagatgcatgtaacatatttttaaaatgtctaatcctttattttgtttcaaattcacgcagtgactgaatgcatatttcatacaggaaatcactatctttaggttacccttttgtctttttctagtaagttctgtgaagtggcccacaagtttttctaacgttctaaaactgaagggaatatttagtctgtgagacccttatctttttccagtatatactatctgataaatactatctgataaatttttctacttggggaaatagtctaaaatttggctgtctgtgtaaaaaagcctagtgttgtaaatacaaaacaatccaaaaattgatagcccaaagacagctctaagttacctggaagtttttaagaaatttatatttttgattctgggaaaatgaattgccaaaataagatcatgaagatgtaattactgcaaattttcaactatatgtggcagcactgtccctgaacaagatcttccactgagaagactaactctcatctggattgaaatatcttcaccaagaaaattagtgtgttatcactgatgttattgcagattgcctagatattccatagggaggaaaataaagtacaattaaccaattattgaaaagaaatcaattatatattaatatgcaggcattttctaaagtaacagaaatagctctagcaagcttatggtcatcaataagaatgattatcataaaagtaaatttaaaagtcttttaatccattgtgtttaatctggaactggtcctctaaattgaaaatgaaatcatgaagtataaatgggcccaggcactgtggctcacgtctgtaatcccaacactttgggaggccaaggcgggtggatcactttaggtcaggagttcaagatcagcctggccaacatggcgaaatcctgtctctattaaaaatacaaaaattagtctggcatgatggcgcatgcctgtagtcccggctactcaaaagactgaggtaggagaattgctttaacccaggaggcagaggttgcagtgagccgagattacaccactgccctccagcctgggtgacagaggaagactctgtctcaaaaaaaaaaaaaaaaagaagaagaagaagtataaatgtaaaatctaaaaatctattaatcatattctacatgctactagttgggaatttttagatgcaattttttagttttcatttgttttcttggtgaagaactttgcctttgttgttgttatcattttcactgatgctgtgaaggtgagattagttaaaggaaacaactagcccaacagtatgtcttggcatggccaggcctgcccctccaaacctacttaaataggttgcccttccttccctagtacacaagagatgagatttccccttatcatgaagcagggaacatcttggaggttttgcccatgtagcttaggagttctcttctaaaatccaaacttctccaaaaataacgaacacattgttataacaaatccaacaacacttctaaaaatcagttagcccacgacactaggaaaacaaaaagcttttctgaaaccagtgaagcactccaaagtgtaagccttttccttttctccttccttcacaccacactgctgatggcacaggcttcagctggtatccaatgcctccatacatcatcctctgatgacttgcacgatgtagagggtacaaagagaaaaaattgtgatagattactgtaaaaccccataatcctagaaaaactgattttgattctaatggaaattaagatgatgtctcctagcatttgcaaaattatttagtgccattttatgaatttcaaatcgaaagaggcacacaaaatatttaaaaatttaaatatttttaaaggcaactttatctgtttttctataccttaatatgacattgatcacaaaacctctgtgtcaaccttaatagcagtataaagaagcaacatagaataatggttccacttttgagtttcaaagctgagatccacctcactagtttcatagccttatgcttaacttctctatgccttaattatttcatcttcaaaattaaggacagaagaattcttgatacgcttttcatagatttgaattaaataatacctgcaaagcatttggaaagaagaatctgggcctgtgtaatgtgataaataagtgttaactcttctcaatgttttgaagtgtagtatgttggttttcattcctcaggtgtcgttgtccattttttctaggagatcccatgatttctgggccttaaactttcttctgttttccccagcacctagaagatgcacctgctcatgatgaaatccttaatgtagacttgtagttgtgatctaatcagtgacccaaagcatttgtgccccaacttatcacttaagaatattgcctagtggtctctgtacagaaaaattttggctaatgctgtctctacctaaagccttatctagcacgtgggaaggacagaggctttggagtccaacggctagaatatggctaaagggccagccacctgctaccgtataacgtgcatcctcagtcaccccaggggactccagcacccgttcagaagttctggctggctgtatttgtagctccttcttctctagaatccatatgaaagaaattcaactcttgaggagttaaaagtcaaattacaaagaccttagtagggtcacttcagctttaaggcatgtacacaaaaacggactcatgatagctgccttgttttaggataaagggagattgtgcctgtttatgtttagttcagcgcacactagtcattcagtaaatggcctaaattgttattaacactgtttaaagcaggccaaatagtactagaggaagcacacagtctctggtgttctagtcttacaaactcaaacttacaagccaacctacgttaagtaattcataacttcagtatttaataaatcttcagtgaaaggcaagaggctacacacagtgacagacccagagataaaccctgtgcccctagagatttgcactcctcttaaaagtgtatatatatataattatataattatttattatataattatatataattatataattatttattatataattatatataatatacaattatttattatataattatatataattatatatttattatatttattatacagttatataataaataattatataattatatataattatatattatttattatctaattctatattaaatataattatttattatctaattctatattatatataattatttattatataattctatattatatataattattatataattctatatataattatttattatataattctatacataagtatttattatataattatgtatataattatttattatataattatgtataatatgtaattatttattatataattatgtataatatgtaattatttattatataattatgtataatatataattatttattatataattatgtataatatataattatttattatataattatgtgttatgtataattattatataattatgtataatatatatataattttttattatataattatgtataatatataattttttataattatgtgtaatatataattatttatcatataattacaatatatattattaacataatatctaaatatattaataatctaatatctataattaatataatatataaatattacttcttgaaatccaacgtgcacctgaatcacctgagccgttgttaaaatgcagattcgagatcctgcatttctaacaagttactgggtgaggcagaagatgcttagcaaaggcccacaccgagtagcaaagctctaagaagtaaagagaaggcgcattaagcatgaagataatgagatttcttcctgtaggggacagttcatggaagagataacatttgggctgaattgattttaacacagatgagctacagactttaaaactttaaacttttagtcaagtagttaatacatttggatcaataaacacataagaaaataagtagggaagtttagtattacattataatttattcttctgctgctttcattttaactgttttcagatgtgcccaggtgttagttaaattggtgttgatctcagtgctgatgtggaaattgagtcttatttacctgagaaaggcacttccatatagcctatacttgttataaaatgctaagcataagatacacacataatatacataatagaatataaacatatatataacatatatatacacacaacatagatatacacacaacatatagttgtgtgtgtatacacatacacagagacacacacacagtctctgatatcaataaacatatcttaaagtaggtgttaagcaaataaataatatacaaacctgacatatgctgtttagcttttatgtacattttacataatttttacataaaagatagacttgaaattaaatgaaaaatttttagtgtcaccaaaagcccaaatgccaaagccgaccatagtttagctgactaaaagtgtgacacatggaagtatgaaatgaaactccagaagagacaatagactttgatcttctgaggacctgctgtaattagcatgtcagccacatctccatgctggaatttctgttttgggagatgtgtatattggttataaataatcagaggatttctgtgcagtctaaggccaaatgggtcatgtatgtgggttccagaaagagagaatttgaagcttgtcacagaggatactattctcctgggagtgtggtttatttttactatttaaaaattacacattgaaaaatgccatggcctctggtcagcaaaagttttttcctttccatcttgtttgcactgtagacttaaatattcctggcacaggaatatgcaatgacccctgcctcttccaaacaaaatgttcatgaatatcgtactttcaagatcagtgtctccaaaacagttattttttatcacttaaactcttcagatgaaagacagtgagtaaaattagcatgaaaaatagaatagctctataggtacctttggtaacagaatgcagacttcaactgatatatctataaatgaagtccaaattttacttaaataaactgccaaaccaaaagaaagcagtaatttttttcatgcttttattctgtggagatcaggtgttcatgagtgtttgttaaataattgaattaatgtagcagattataatagcagatgtttcaaactacattccttttatcatcagttcttcctcctaaatttttataaggtatactatacaaaagcgtccccactttgttgtaattaagtcataaaaatgaagctctataatcccttttagtgatcactactcgctgagttaatagtttaatagttgaaatgaactcaagattataatggcgaagcaatttggttttaggcaaagttcagatacagcaagtgctttagctttttttcctttaaatagacctaagccaataatgattgtatcagtaggaaaaaaaaaccctattgcattttcaatatagttttatttaaagtattatacaattaagctatattctctcactgtcaacaccaagaaataggctgagagtgatagaaagagactggacttgggaaacttgaaaactgtagttttagttgagactccttcagttgaaaaacggcagaaacttaactcaaactaaagcactgaataaatttgcttgtgcatataagcaaaaagtcaaggtgttaatggtttcaggcatgactatatccaggagctcaagtcatgttatcgataattgtcttttttcatctctcatcattttctcatactggctctagttcttgggcagattttcctgaatgataagacagccaccagcagcgccaagcctatagctcaccagtcctagtatacagaaatcctttttactcatggttcctgtgaaagtcccagaatccagggcatggcttcggtcactcaaggccacttctaaattagaatcacagtgtcctgaaggatgggataaaaataaatggacaggcttaagtcatatgactccccctagagcccataaggggtcaactacctaaagcacaaaccacacggaccgacaattggagagagatggttccctaaaattcaaccaggatgtgcttcctaaaggaaggaatagtggtctcttggcaaatgaaaagagtagatcacactaaaactagttcagaaatcattcattcattatgactttttatttggccttataaagccatttaacttctttgactagccctgctccctagttttctcaactttgaaattatttcctgacagaattactggaagaattaaataagatgcttttgttaaagaggttacatatatttattgttgttggctaaattgtcatttacctgaactaatgaaaagtgatcattggcatttatgccaaattattttaaaacatttatgagtctagaagtgagactcagagccttgggctgaggcattcctgaacattgctgtttctcatctaacagccttatttaatgtactgcaattaaggataagtataataatttattaatgaaacttgaaaaaaatatggcatgtcacatctgtgcacaaatggtcctttctgactcaatcattcttttctatacctttttattaaaatggaattataattatagtcataagtgtaaggatgtacacttgactcttactatttacttcattatcacttcaatttcctagtaaattttttgaatcatatttttccagcaccatttcgctttactaggtagaagttataaaaactaatgatggtgatgattataatctctattctccatccttgaaagatcaaacatgccctaattaaagaaataggctggcatagtgtcatgatgaagccagtaaacctcaggcaagagacttgacttgtgtgagcttcaggttcttcatctgtaaaatgggatgagaccagcaatgtagcagacacctgtgctattcccatgtcccttggcaatcatggttccaacccagccacctacacacttggcaactcttcagggccttctatcagtccatccacagccaggctacaattcccagggactgcatgcctcaggagtagttgaagaataaataccttatcttccatgccccttgggttgcaaagttctgatgtgtgttctctgctttctcccagagttcctcggtgagactgagccctaactgcccacagctgtaacctgcctgatacccttctccttcttagctgcctttccttcttgtctcacttctcttctctactgttgtttcatagggtcaactcccaaaaaaggtgcttgcactcaaatccttgtctcagatcctgtttttggaagaacccaaactaagacaagcacttttctataaatggccttaagggaatcaaaagtgaaagatgggtaaggtcagagttgctgagcattgagagaaaaaaaaatggaaagaggctgtgcctcatcattcctgccaacctatcacgttattgtcttcgttgtttccaatcacgaagccctggccagtggcctccaatcatagatttccagtctacaaaggacttagccatttagcttagtcaaactgtcagtttattagaagaggcagtttgcagaaatggcaatgttgggaccaagaccatgttttctttgtcccgctactccagacatccacctaggcactccaacaggacttgcttagaaaaaagttgcaacacagaccatttagaagttagtgatcgatgtctatagcagtggtttccaagctggtcctagacatagcaccctttgtttgtttcttctaacaaagtctcgtgagaaaggccaatgtgtagggaaaagctttaaaggtgctgtcttggtggaatagaggggagcctggagtacaggtgatggtggctgttgccctatcactctttctcctcctgacctaccccattctctgcagggatgtctgcccaaacccagggatattcaggatactcagtttaaaaaccactcctctgaaggaaatactgactagtttaaagatctgcctcacaattaaggtggcatccatttaagtcattttatatagattacctacaaagtagttgaggaaacagaaccgacgtgaatcaacaaagtcaacacaaataagatcaattttctcccaaaagacaaaaacagaggaaaactatatgatgtagccaatgctttcatgccttaattaagttactacactgaaaaagctgctgaaaagctactctaggattttattgatcgaaatctcatttaaattcctcctattgactctctaacctctgcggaaggttacagaaaaatggcattgtcgtccctgagtgcattccaagttcttcttaacttcatgtttggtatgttcatagacttctctgaaatatttcagattgcctaagaatgaaaaaaaaatttttcaagatcgtcattgtggatctattgttcattggttgacttggcaactccctttgctttcctttccgttattacatttcctttattcccagaaggcagggcctgggcctgaggaaaggcaaaggcctggcctaggaattctgtttcttttctcctttatttcagtgacctcagtgtctgctcaggcccacagctctggccagaaagtcacagccctgtctactcacagctgaaatgtcctttgttcagaaaataaccagacaggaaaaatataaacagtaaaaggcaaaatcaaatgccagtccacaggatagataagtgagcttggtagcctcatcaaccccatagtctgctgagtcttgttaaaacttctttccttcatcacacctttcagaggtgccttgccatttcatgggagagctattgggacagagcagagaatggcttctttccccctagatgtgacctcccagcagaacacagcattgacaattgttggctagtatagctttccccttgtcagcagggtctaggagcaggttgcagtgcgtgtggggtggggtggaggggactctggctcagtcaaaactgcctggcaggttgtactgtgttgggagggagagaggccacaggcgtttggctcctaacttcggcattatccagggtcttgtcaatagtcaatgtgatacaacagataagtgggagggaaataggtcgaatgcagaaaaaaaaaaagcaaaccacagggaaaccagattaagtgagggatggaccttccaccctaacccttaatagaaaagctgaaaaatgtaccatagtagggaatcctgccaggaagtggacagtgaccaaggatttcaaaaatctcttatggagattctggaaggtctgtcttaactctgaatcactacagtctctaggatgccagctgtgacagcaaagattatctccaagctagggatagcattattttaacaggagagttaattgagaatgatggacaaaatcaagcttcttacctaagcattctaccttatatgtagaaaatgagcccaaaaaatgcttctgaacaatgtggctatatgtctttgttgagggttttcccagaagccaactttgaaagaagattcaagtccatagagtttggaaggtgattccaggaagtactagtagggcagtagggagtgtgaacgaggaagagaaagcagcttacaaaaaaatgtgttgtcaaggcagtcattcccaaccacagccattgttggaggatgctcttagaaagtgttaattcttaggcctttccagcctgcaccacataaagtcagccatcaggcagagatgcagatacaagtccagcccagctgtatctcctggagcaccagtacagtctgctatgatattattaccagcaaaacactattcacgatactataaaaaggatattcccacctcactttgcagctttaacaagaatctccagcatatcaaaaaagagatccttcaaagtacctgatgcttattgaacgcatttctttattctaacatatacctaatgcagttgcgtggacactttaacaatcatgtattacccatctaacttatgaactgctagaaaggggaacaaaatccagataagatatttgctctcaaggagcctataattacaaggagaaaattctaatatcacaaataattataaaacaagttataatgtgattcacttccatttcttcatctagctaatattcattcattcgtaaatatacttccattcattcatctagcaaatatctattgaataactatgtgcgagggaagcttgaaggaaaaggaaagttttgtttattgacattgtggggagtttccggaattgctctaagctctttacctgcaaattgccatggtacatttttcagcttttctatttcttgtacaaaacctcagacaagtcttcaagtgcatattattattcccattttacaatgaggaaagcgagtctttggatggtccagacatttgacttgttatactgtttgggaatgagttgagaggtaagtctaaaaatgtaacatttgtgacctgaatggaagccttcatgctattcttgacttactcgttggtttatttactcagcacacagttttttgagtcttgctacctgtgtcaacccttgagtaagacaatgaaaaggcaccattcttcacctatctgggctctcaatgtagtagaacctcctctgtagtcagtacagtggggaaggatgtgctgaaggcatctgaagaggaaactggcattccatgctgtgctttatgctgcagagcagagggccaaatgagagacaagaggcacttagggcactaaaagataacatgttttaagtagctcatcagaaagcattaatgagaacataattatgttctgggtctgcatttatgctagactatggaagagatgtaaataaagtgaaggccatggtccttgctcatacaacgccaatgtccaatttgatcaaggaacataacattctggtgaaggagctagaacatttttcctcccttgcattacggtcaggaaccactgtggagggtctcctctcataaagcactgtgacagtgtactcataaaaggcaatggaattggtttcctaccctctgagaacctctaattttaaatgataaatcagtacttatacaaatccatgttccaaacacagctctaaagctgtacttaagagagacaggttctaatctggattctgttcttatctttctatgtcattttaaaggggctatttaatctctcttgggacaactttgcttatctgtcatgttaaataataaaactgtcttctgcctaccaaatagaatgatgaggagtaaataaactcacagatgtgagaatactttgaaaaacggaaagtgctaaatcaaagtaaggtgttattattgagaattttcacacaaaaccacatcaaatagtacaacttaatacagggaaactgcaagcacacagaaagctgtgagcactgcgtgaagagctaatctgcaggagcttttgagaagagtacatagccatttaggggccattatcacaccatatcttggagctgtatttgcacatagttatggtaatagcacagtttttgcaatcaagatggaataacaatatatgacacttttcaacttaagataaaataataacacatgaaaacaggtgcagaacatactgactccagatttaggggaaaaatggtaaaataatgaaagaagccagtgaagttcatgtaatgtacaaaagcacagttagctggccagtgtgataggaaagtttgtgcccgggcaaagataactgagaagggaacatttagattatttcttaaaataggcaaatagactttggtgagccatgggatattaatgccatctgcacttactttctctgagctgatctagcagaattcgcaagggccaaagcaccaggaaaaaacgtgagccgagaaattgcttttcagtgctgtgcttagaagtgatttaaggaggtgctaaaccactgggctggtagctttccagtatgctctggtattattgcattaagagtgaagattgagcaatgatgaatggattctcaaccacctaatcccagtgacatccaaacatctgagtgccagatcctgcctaattggcatttggcacagtagaaggaggctggtgtccatgcaagctggcagacacattgtccagttttcccatcttgactgtgattattctacgtggatttatgggccatctgtcttccaaggcaaaatttgtagatttttctgtgctgcagagctctgaagatgttatttgcatgtgtttagctgtttttattttttaaagctaacctgcatattttttgcaaagcccacaaaacaatgtcacttcttgtgttcagcatttctcttgtcctcatgttggcatgacaagttttctgttatatttcatttttcttcctaaaaatcagattcatgggttgagggataaaaatgctagaggacatctttaaattacttgcagagattagaatgtaaattaagtcgggaaaagaatttggaccttgatagacaaattcaaatcaaagagctaatcctcacgcctctgccagatgggtcatttgtccaccggagctcagcttctttacacagaaagattaaagtaacacgttttagagagataagtaaatcatgggaaaactctgccttggtcacatttaggattatttttaggaccaatgcagagtgcccagattgaagccaactgccaagaaggcaggatacctttccttcccatcatccatgccccctatccaggccagtgttaggaaagttatgtggataagcaccatcaaccacacccaccactatctgtctttccattgcccaggcatgatatccagatccatttcacaccaaataaccccgtgccctcagacaagttgctaacatctctaagcctccgtgtactcaactgaaaatggtaatttaaaagtacgtctctcataggatttctatgcctggcatgtggtcaatgctcagtaatagtagctcccattattatgataattattgttatttaccttcttctatcactagatgatgtgtgatgtctacagcaagcagcatagcatcatgtttaatggcatgaaacacaaagactgactgcctgggctcaaatcccaacttactcacttatgaattgtataaccttgagcaaccttatctttgcttgggcacaaaccttgagcaagctacttgcctcaggtttcccatctataaaatagtcataaaagtacccacttacagagttactgtgaggataaaatgagttaatacttgcatatagcaagtagcatatcataaaagattgttaaacaatatgctggaaatattttaaatcatgaaactcttctaaggctctcttcttccttgcactttcctgttatactctttttttttttttttttagtactgcatgtgtaagcatggcctgccacatgttctttccttgatcctttttcctttagcacttggctactgctgccttaaactgcttttgggactagctcaggagcagttccatgctagttctttgatgccatgatgtgggcatttcctagctaaccatccagatatgcataccgagcagggaagagcctcagtgggggcccttccagagaccttagcaatgtgccatgagttgtatttagggattagtttttgactatgccctatgtacttttttcttgccctgattcacagagctcatgcaaagtgtaatgagagaattacgtgctgaggacttgctactgagctcagaaatttcagttaaatgaggggcatcagcttgtgttaccagaccttatttaaagttacattcagctgggcacggtggctcacatctgtaatcccagcactttgggaggttgaggtgggtggataacttgagatcaggagttcaagatcagcctggccaacatggtgaagccctatctctactaaaaatataaaaattagcctagcatggtgatgcgcgcctgtaatcccagctactcaggaggctgaggcaggagaatcgcttgaacctgggaggcagaggttgcagtgagccgagatcgtgccactgcactccagcctgggcgacagagccagagtccatcccaaaaataaataaataaataaataaataaataaataaataaataaagtcacattcatgaactcagtggaaagtgagagcctattaaattatttcagatactttacttgtgaacctaataggaaattctaccagggctgagcaaattcggaagctaagaagagatggcactgatggagcaggtggctcgcaatgtgcaataccttgaagtacagccaactctgctgtcacttaaggattgatttggcttattctgaattattctagtccccttttccagtctattttgatagctttgagcatttaatgctgtctggttagcacttcttctaggcagaggtagggtgtaaggataaaactttcaatctctctaagactttgttaggactcagccccccaaatccctgtctttcttccgcatatttgttggacttcagggtaccgttagtcagtgccagcgaggcctcttggttctgttctgtgagctgttcattgcatttcttcgatgttttcttcttagtccttcctttgtagtgtcatttacggctgaatttggaattgccgtttttagttgtctatgatacaatatcgtttgagatatctggttgccaagatgaagcacaaaaccactcacaatataaattaatacataaatgttaatatttggggacaaaataatcattttttcaattaatatttgttgagcatttacaagccaggcactgttgtgagttctaaagatcagcagtgaactagagaaacactgcctgtctgctggacttcccactgagtgcctgcatctctttgctgacagctctctttagctgccagagccccctcttcccaagggcgcagttggccaaagagtattggggaattatcccccggaagcagtcctcaaacagtgactgatgggacttggtataaatactccagctccctccccccttaaatgggatcaccttcaagtacatgttttgtctcatttccttcaagggaaacacaaactaagacactccatcctcatgaaactcacaatccctggatgaagagaccaaaactagcataccagcaaatatatctattagtacaatgacagatggtgataaatgctatggagaaatataaacagcatatgagacaggagtgccagcaggagagattgctatttgtatgggctactcaagaaagacttcatgttgtggtaatatttgaggagactctcagtgcactcaaaacaagtctctctctctcactctcaatttctattttgaaataacctagagtggtggctaagcactaagagccttccctagtgcctgggcatcagagagggaatctggtccaagctggtagcgctgcattacctcattcttttctggtcttggtcattgaccatccttttcataaccacagactcagctccatctttgccacccttgagtggaccgaggaggaactctctaaggctcaggcccatctacttagacacttctgcttcaataggttctggctgcttgggaataccagcagcaactttctggaacaccttctgggaaaggagccacagagcttctctcttcaggacatcaggcttgtctgcggtttctcctagacttgaggacaaggaagcctcggtatgagaatgtcctcaggaccaagcagaagaatgtaccttttcattcttctttctctgccatccctttcttccctaaagcaaaaggtcaaatgctttgttgctgcttgttttggaaaagagtaagagggactggtgaaggataaaggaggaaatatgtcaactctcaaatatgacaggattgaacacatgatttattttatcaccttagaatttagttctagaagtctccttattttttttagatttgatggtataatttctatggcagtgttttgaattcaaattgcaactttacatgacagacttagggtacagaattacaaatctggacataatttcctggcgattgaatcaagtatcaacatatctgatgaccaccatgacgggagttggacaagtcaccagcactcagaaaatcaaaggtcagcttgactcaatgttcactcctttagaaacgtagggagttgactgcttcttgcacgcaccaccgcacctgttccacaaaagcggccttgtgagattggcaagagaagccaagatatccaagctatttcccacctaataagtacctgggagctcaagcttcctctgtggctctgatggcactctacctgggagaagatatagcaaggagaacctgacagatcatccatatggtgccatctgtggtaagagattagtcactgcatacttctcattagaaaaaatataaagaaagccagggaatcccatgataagtcccagccaggcaaagcagaagaccttctgctcttcccatctgattcaccattacctacaaatacaagatcaaagataaggaacgtaagatctgacttttaaacttaatcaacaaaaatatctgcagtatggtatagtagaaccatggaacttcaggataaatatggtagattgaacatattcaactaactgaactttcttgaaaccacaccaaaactccattaaaagagacttttaagggcataatctggcaagggtgagggataatagataagaaatgaccattacataatttaggtatctggctatatgtttacagcagttgacagatctgagaacctgatcattgatcatccgtgtgaaaacctggaaccaatccaagttattttataaaaaaccttaaaagtctcagaaattgatgatgtttgtttcctctggaagtgggattcaagataaggcataaaacaaagaggagagttgacagctacttaaggaacaatcagaactcccaccttagagggactatttatgtatttattctttggagtcaggaaaacagagagtgtgaggatgacacaaagcccagatgaaagcaggctacaggccgggcgcggcggctcccgcctgcgatgccaacactttgggaggcttaaacaggcggatcacctgaagtcaggtgttagagaccagcctggtgaaaccctgtctctacgaaaaatacaaaaattagccgggcgtggtggcatgtgcctatagtccctgctactcaggaggctgaggcaggggaatcacttgaacccaggaggcagaggttgcagtgaggcaagataacaccactgcactccagcctgtgtgacagagcaagactctgtctcaagaagagagaaaaagaaagaagaaagagagacaaagaaagaaagaaagaaagagaagaaagaaagaaagaaagagagaaagagtaccattttgaaagcaagaagataaagtaattgtaagcatatgaaaaaatgctgagacctcctgcattcttctccaatcttgctctagaatgctggcatccaggccttcactctatcctggcaagagattagatagaagttctcccaagaatctaatctgcctaagaggaaagacctaaagatatcaatattagggattactccgaaagatacaaaggaagatccctctgcagtgatgccttaccaactctcatacttttcaagcacagcaaacacatccagaaatccaatcagctttttagtctgccaacttgaaatatgaacagataattaagtgttactagacatatgaggaaaacttccttaaaaacaggaaaaagcagggaaaaaagtaactttgtaggaaataatgactatatagtgagaattcgttaagtatacacatatcattaatgtccatagaaaaataaccaaatatattatgtccatgaaaaagaacagaatgctaattttttcaataaatgtcagagaacataaactggctgttaaacacaaaaacaaagcactccaaaaaaaggtggaaatacaattgaggaaatcttttagagagtaaagcaaaaaaattagatggaagattggagagaaaatgtataaaagtttaaaatccggtcaggcatgttggctcaggcctgtaatcccagcaatttgggaggctgaggtgggtggatcacctgaggtcgggagtttgagaccagcttgaccaacacagagaaaccccatctctactaaaaatacaaaattagccgggtggggtatggtggtgcatgcctgtaatcccagctacttgggaggctgaggcaggaggatcgcttgatcacctccacctggaggtggaggttgtggtaagccgagatcgcaccattgcactccagcctgggcaacaagagcgaaactcagtctcaaaacaaagtttaaaatccggacaaataatattccagaatgaaaaaacagaggaaattatcataataattcatgtttttttccaaacaagacaacagctttcagactgaaaggtttcaaagagtgcccagcataggggatagataaacctatgccaaagcacatcattgtgaaattttaagaaacggggaccaaaagtgctagaaattgccagagggacaaaaaccaaaacaaaacaggccacacacctgtttttaggatggtgaatcacaaagtcttcaaacctcttaacagagctaaaagacagtggagcaaatttttcccacaaaaatcttttaaaaaaaaatccaacccaaaatactgtgtccagcaaaactagcaatcaagtgtgcaggtgtaaagaagtcatttttagacatgcaagcctcaagaaacttaacattcatgaatgctttctctggaagctactgaccaatgtgctctaactaaaattaaaaaattaacaattaaaggggaagacatggcataaataaaagagatttagcacagaatagaagtgaagaaaacagaaattaatcaatctagattggagcagataaaaggctccagaaaagacttcaagagaatctaaccaagagaacacttgttatatttgtacatattgcaaaaacatttagctaaccgggggatactttggagttggactggagatatatgcaaaaaattaagcaaatgataaaacaagataattaactatagggaaaattttaaaaaattgtgcatgaagataaaaataattgttaggttactgtatgactcaaccctgaacacactgtgtagtcatgataacataaagactgaacactgtaactaaattatagtattactgtctctgaaagaatgagagtaatgtatacatgtgctacaggagtagagataagaaagagcaatattctcatctttcatggtggtaagtcaaaaatagcaatacatgcgtattattttgagatacagaagtaaataccaaaagcttctgctaaaagatttgaaggtgtttgcttctaagtaaggagacatgaggaagcgtgtttctattaaccatcctagtaaaagtggtgctggatggcagccatagaataattctaaatttagcagataacccttggcttctcgaccatgttgtttttcctattcttgtctcctgaagtggtatctgcacatcaagagcaaatcacacaggtggcttcttagctccccttggtgactccacacactggagacattcagcccctccctactccttccttctaaacttagcccatcggcaatcaacgctgactgatttttcttcatcttcaaccagacttgggcagcagaatggtagaaaggaaactggagcagagctggatcaaaatgaattgcttctttcagaagagtcctgaaatttacatccccaagaaggttcctatctggccaacatgaaattagtgtgtccactaactgattgcatgggctgcaactccaaactctttcgtgttatatgcactaagaactacactaaatgaatagaaacctgaactgatcagcaacaggaatcaaggatgaattttatgtgccatgtttttaagttcttgaaaggcaatgctctgatggacacatccttggttatttccaacccttgacacatagagatgcaccctcagtaaaaacgtgttcattggtaaccaccagtaaggaataccctagctccagggtgcgttcaaaacattttgctgttgctggagaaatatgaactgaaaacatcttttcccatgtacctgaaacaagagagtcaacccagaatgtctccttaaaagtaggtttttagaagctaatagataaagggatccgaacctgagaagatgagagaaccactccacaatgctcttctagaccattcttcctttctgttctccagggctcccttttctggatacagatcttcctcattcttaattgttgcaaggccaatgggatggccctgagtgtagaggaggcatcagagtagcccatagcccagtaaatactcaagggcctttgtatgcatttgcaagcatgatggcatccagctgagtgtcactggatacacttcagggttttaaagcatgattttaaagcatccctggaaggtatcattacgtcatagcagaattttgaattgatgtctttctgacatctttaggagcattgttttttccattccttgagggatttacatgttttgtacttcagctggaagtggtacaaacactatgtttgtttatgaagacttttaaatgccattatatgagtgacatgtccaatggcatactgatttattattaacaaaatatataaggtaatttatttttagcctttgtcaactaactttatccttctgaactcaatttctctttctggtgattttatttcagaaaacagtagcattgcttttactgtttcataatctcactcaaatgtgggacattttgttttaatttagctagaaataattcctaatatattagcctgattgaattcatagacttttagagctagaggagactgaggcatccatatagtttactcatcctataattaaggaatttgtccctgaccagtgaccactggcaagaatggaagaaaactggatttcttgtgctgttactaagttttttagaaaagcaatgtgttttgttatcttaattctcaaggtttttcattcttctatgtgcctcagtggaccagagtggatcagaaaaaaaaattgtaaatttttcacaaacagtgcaagtttgatagaaaagggctaatgcattttagtcaatggcgacaataatattccagctgaaggttatatggaagggatatcctcagagtttgttctctgccccaagtctttactagtcagaactattttttaggctaattcattatgacaaaacatctgtatttttgcaaatactcttgaccccttagctgacacctacaagattacaaactgactgctctttatctttacattttattggctttccttgactttgacatatctctgcctaatcatttaatgtatcaaaaatcttcagcatttgctccttttgttagcaaggcaaagctttgggattgaaaagttgatccctggttcacagttacagttccctgattgcacagttattttattgctatgatatgcatgtgtttacaagaagctcactggtagtctacaatcatattctacccaaactacccttcaaactcaatctttgttcttattcaagtttaggtaaattccttcaccagggatttttaaattctttaatataattataaattatcctcacactcactcaccaaactattgttgtttgttgattttaatgtatactaaaaattctgttaaaatattttattccaatgagataataaaggtagagaaaataaccaaaaaggttatggtttaattgacctgtagggtattaactagtctgtattcaatttagtaatatctgtctagtttgtgtttttggtttttggtttatttgcttggtttttgttgacaaaaatatacaaatacatacatacaaacacatacacatacaaacacatacatatatttgtgtatatatacttatatgtatatatgtgtgtatatgtgtgtgtgtatatatatatatatatatatatatatatatataatatatataaaatcagtgtctcatagcctcctttgacctggctttgacaacttccggattaaataaaacttggatacacattctttgcatgttccaaattataccttgaccttgattataatatcttcatttgagtatgacaaatatatgaagtgtacaccttcacttttctatcctgtacccaaggcagacatcaaaattaatcacaggcatggttcagaatctttctcaacacaagcacccagaagacattaacaataaatggaatttggagctaaagttaaaatccatttgtcatttctgccctattggcctatgttgttgttttttcttgcttttaaaagttgctgatcaaaccaaaggatgtttattcttgcatttcattcttgttcttctttcatgttcaataaaccattgtattagattgcacagttattttattgctatgatatgcatgtgtatacaagaagcatacacttgccagttttccataccctgtgactcccccagtatgcacactcatccagcagttacattactttcctttcctggcccctgaagatacttgcatttattgcctgtcttttaaggaattgttatagttagagattgggttgtgtgaaattgccttttgcataggtgaaaaacagcaaatattacaaatttcatatcatttgacctaatcagaacataagaatcaaacaaaatgctgctgtctttggtgatcttccagtttcaaaacaatttattttctattttgaatcccaataatcatccaaaagaagtagtgatttagcacccactgtgcacaaagcatctagtagacaccagggacgacaaagatacatgcacattcagcttttaaaggtgctcgtgcctgggtttcaaggggtgaatggccttattttctattagacggtgagctctttgaaggcagaggctgtgttttactgtgctttatttttctgtgcatttatcgtatggtagatgttcaataaacctttgtgaaattagtgaaaggaaaagagataggggagaaggaaaggaaatagagagaaaaggagaaatagagattctggtgtgaaaagcacgtgcccaggcccagctcagcggctcacgcctgtaacctcaggactttgggaggctgtggtgggaggatcgcttgagtacaggtgttcaagaccagcctggggaacataggaagacccctgtctctacacagagaaaaaaaattacctgggcatggtggtgcatgcctatggtcccagctactcgggaggctgaggcaggaggattgcccgagcccaggaggaaggtttttcttttgcgaaacagctcctctcatcaaaagagccaaaacaaactttccttcttattttttattcttggacaatagtaaaagcaatttagctattgagtttccagaacttgggaaaagcagtcatcggtcaccttgagaaatgtattgaatgtgaaaagatttttactgtggtaaataatcagtgctagctttgccatttacaaatggcacatctcttagcaatcaagaataaataatgtttaaatcagtaaaaattagaattgttaaatgttgtcattttactgataggtttggcagtaggggagaagagaaggaaaacagatacttttatataccattggtgaaagtcaattgctaggactttaacagaaagaaaattggttatgtgtattaaaatcctcaaaagtatgcgaagtctttgaatcagaaattctatttctgggaattcatcctgaagaaataattaagtatttatacaaagatgtaaccatcagagcagtcaatgcaatgtcatttatactagtgaaaaaattagaaacaactttaatgatcaatgataatagaatattatttcatattatactgctatattttatgatataaaaatatagatagttgcatattttatgctatagttaaatatccgcatagaatttatttttacattaaaaatgttcataatatattgctcagttaatacaaaggttactaaattatatatataattatatgtatgtgtgtatatgcatgattacagcttcataaaagaattatacacacacacgggtatttttctgggaggatacacaccaatgttttagcagtagttatctctgaaagaaaagttagggatgttcaaaacaagttttattttttctctctgtttatctcatttcccaatttttctttaatgaacatattccacttttatagtaataaaaactgtttcaacaagaaaaaaaaaagaaatgctaccctccgacatttgttggcaacatatttactacccgcaaatatgttgtttgaagctttgattgtcaagattgaagaaacaaattgtagtgatagaccaaaatacttaagatgatcctatgtatctatgaagattatgacaaaaaattgtctcaatacgtgtatcaaaacatccagttgtacaccttaaatatgtagttttttaaattatacctcaataaagttgacaaaagaattttgtcaatatttagtattagtcaactcagaaaggttacaacatagaaaaatttctaaatagaatctgagtaaactaaattacctgtgtcatatttctgccatctgaagtaaaataattcttaatatgagatttaaagatcttttttcatgagcattcaaatttttattttcaggaaagactcatttgtgggcatctttattttctgtttcagagaaaaatatcattatttgaaaacaccttttttttttttgagacagagtctcgctctgtcacccaggctggagtgtagtggtgcgatctcagctcactgcaaactccacctcctgggttcaaacaattctcctgcctcagcctcccgagtagctgggactgcaggcacccgccaccacacccggctaatttttctgtatttttagtagagacgaggtttcaccgtgttagccaggatggtctcgatctcctgaccttgtgatctgcccaccttggcctcccaaagtgctgggattacaggcgtgagccaccgcgcccagccccaaaaacactttaacattattttaaataataaaaccacttgtaaattatttatttatttatttatttatttatttatttatttttattttgagaaggagtctcgctctgtcgcccaggctggagtgcagtggcgccatctcggctcaatgcaacctccacctcctgggtgcaagcgattctcctgcctcagcctcctgagtagctggattacaggcgcccaccatgcccgggttaatttttgtgttttgggtagagaggagacttcgccatattggccaggctggtctcgagctcctgacctcaagtgatccacacgcctcagcctcccaaagtgctgggattacaggccacttgtacataattttgattataaagtaacatacattaataagaaaaaaaattgaaaaattaccccaaattctattacacagagataagcactgataacattttagtgccgatccataaagttaataccagtcttacattggaaaacaggaggttggtgtttatttaaatcctctgaaaatttggtggggctcatgtaactacatgttttctctattgtctgtgacatttggaaataattgtagtgaaacagaataatcctacactcttatttatccatactaaaatgtcttctaccttggacactacaagatatttctggaaaaaaaaaaaaaaagaggcgacttgacacccataaaagaatgcattcacatcctttctaacttcatttcctccaggacaaatatcagtggatgggttcatgcgctatctgagtggagaagaaaacggagtcgtttcacctgagaaactggatttgaatgaagacatgtctcagcccctttctcactatttcattaattcctcgcacaacacctacctcacaggtatgaattttctagttctttgttactttagccagtctcaccaaatttcaccaacctctactttctgttgttcggaagctgaagtgtgttttcttccatttcctgcgaagtgcctctgagaactctggggttccaccactaaagcctcccgcctcccataagcagtcatgtccacatgtgtatgaagcaatagcatcatttctccacagcctaagtttttaagtcttctaaaatgcaaccacggctgacattttcagatcaatgggatttttgtgtaactgaactcattcttcagtgtacttgaagccatgtccagtcctacccggttctctgggctgtgttcatctacatgacagctccgaagttcttaagtggtggctcatgcttgtaatcccagcactttgggacggcgaggcgggcggatcacctgaggtcaggagttcgagaccagcctgttcaatatggcgaaacccctgtctctactaaaaatacaaaaaaaaaaaaaaaaatcagccaggcgtggtggtgcgtgcctgtaaacccagctacttgggaggctgaggcaggagaatcacctgaacccaagaggtggaggttacagtgagccgagatcacaccactgcaccccaacctgggtgacaagaatgaaactttgtctcaaaagaaaaaaaaaagaattaagtaattgctttttgttcaaggtaggacagggctttagacaaaaacaaattgacctgtgaatgacaacttatactttattgtaaatattataataaagtaggataaaacatcaatgtgtttctaatctgatcttaaattaagccttgacctatttggcagtctggtgaagtgtatgcacccttctcagaatgctaaatgcataaattaagtacctagaattaaagaggaaataaatttcattgaaatatttttataaaatgttatgatatataaccttgtgtatctcagtattaacacaatttaaataagtataagtaaaatgttgtgataatttgcaacaattggaatataatacacagatcttgctagtgacttgtaaactacatacttaactgaagagaatgttaaattttgtgtagaggttaaaattaaaactgtaaccattctttctcatccaagttcaaggaggttcatggaatatcactttaacagtctagatctttgacatgataaaattcaaagaagtataatttttaaaatctgagcacattatagaatcttacatttatcctatatttaggaccacaaaactcaaaaatacttaaatatatgtccggttgaattttgggtattgtgtgtgattttgtttaagtggaagtcacaatatagagtagattttttacgaataatcttttgagtccaaaataccttccaactgatatatttatattcattacattctattttatttgtcatataataaatgagtcagtaataccaaaatgattgaatgacaagactgattggatatacattttattttttcaccttctttcagagtatattaatttttccctttctgactatcactagggttttcagattttatgtatgttcattcaatcgcggctgccattctccttttgagagaccaaattgtctcaactttggttagtaggagacatttttaggctatcatctgtgtcctcttgacatgacctattaatctttgaaagtgttctggcacatagagatcttccagactcaccttattcctttctgctccagagatggaaacagactattctccagtgagccctggttctttttgatgggaaagaaaaagtatgagtaacagcaatttggaccctgaacattgcctggactgtttcagtgaacaaaggaagaaaagataatttttttttgtctttttaaggcacgagttcacataaatatttctacttctacctaccaatttaaattattattattattattattcttgagacagggcctcactctgttgcccaggctggagcacagtggcatgatgatagctcactgtagtcccgatctcctgggctcaagcaatcctcccacctcagcctcctgagtagctgaaactacaggcacgtgccaccacacctggctaattttttatttcttgtaaagacaaggtctcactatgttgcccaggctggactcagactcctgagctcaagcaatccttctgcctcagcctcccaaagtcctgggattaacgacatgagccactgtgcctgtccccaatttaaattatttttttaaattatttttccataagttataagggtataggtggtatttggttacatgagtaagttctttagtggagatttgtaagatgagatcctggtgcacccatcacccgagcagtatacactgaaccatattggttgtcttttatccctcaccccctgccccaagtccccaaagtctattatatcattcttatgcctttgcgtcctcatagcttagctcccacatatcagagagaacatacgatgtttggttttccattcctgagttacttcacttagaaaaatcgtctctaatctcatccaagtcattggaaatgctgttaattcattcctttttgtggatgagtagtgttctatcatgtatacataccacagtttctatatctactcattgactgatgggcatttcagttggttccacgattttgctattgtgaattgtgctgctgtaaacatgcgtgtgcaagtatctttttcaaatagtgacttattttcctctgggtagatacccattagtgggacggctggatcaaatggtagttctacttttagttctttaaggaatctccacactgttttccatagtggctgtactagtttacattcccaccagcagtgtagaagtgttccctgattgctgcatccatgccaacttctactgttttttgattcttggattatggccattgttgcaagagtaaggtggtatcgcattgtggttttgatttgcatttccctgatcattagtgatgttgagcattttttcatatgtgtgttggtcatttgtacatcttcttttgagagttgtctattcatgtccttagcccactttttgatggaattgattgttttctccttgctgatttgtttgagttcattgtagattctggatattagtcctttgtcagatgtatagattgtgaatattttctcccactctgtgggttgtctgtttattctgctgactgttccttttgctgtgcaaaagctctttagtttaattaggtcccagccatgtatctttgtttttatgcaattgcttttacccaaaagcaatttttggtcatgaaatccttgcctaagccaatgtctagaagggtttttctaatgttatcttctagaatttttatagtttcaggtcttagatttaggtccttaatccatcttgagttgatttttgtataaggtgagagatgaggatccagtttcattttcctacatgtggctagccaattaccccagcacactttgttgaaaagggtgtttttcccccactttatgtttttgtttgctttgtcaaagatcagttggctgtaagtatttgggtttatttctgggttctctattctgtcccattgttctgagtgcctatttttatgccagtaccacactgttttggtgactatgcccttagagtatagtttgaaatcaggtagtgtgatgcttccagatttgttctttttgcttagtcttgctttggctatgcgggctattttttggttccgtatgaattttagaattgttttttctaactctgtgaagaatgatggtggtattttgatggagattgcattgaatttgtagattgcttttggcagtgtggccattctcacaatattgattctacccatccatgagcatgggatgtgttttcatttgtttgtcatctatgatttatttcagcagtgttttgtagttttccttgtagaagccttttgactccttttttaggtatattcctcagtattttttttttttttgcagctattgtaaaagggttgagttcttgatttgattatctgcttggtcactgttggtgtataaaagagctactgatttgaatatattaatcttgtatctgaaaactttgctgaattctcttatctgttctaggagctttctagaggcgtccttaggattttcaaggtaaacaatcatatcgtcagcagtcagggacagtttgacttcctcttcacttatttggatgccctttatttctttctcttgtctgattgctctggccaagacttccagtactatgatgaagaagggtggtgagagtgggcatccttgttttgttcccgttctcaggaagaatgctttcagcttttccccattcagtattaagttggctgtgggtttgtcataggtggcttttaattcattaaggtgtgtcccttgtatgccaattttgctgagctgtgctctttttagtaatcttgatacctaacagattatacatactaactcattttctttactgaaaaccttataatagtattaagaaaattttcaatattaatacaaataataaaactacaaaatgtagttcaaatttgtgtatgcagtttttaaattacatttcactaaaaatttacaatcaaattaatttcttcttctaaattaatttcttctgaagtcattcatatgcccttcctatgtataacttgttaaacacagatgtggtaaaaaatttggctccattgtgtcaggttagtttaaatttgagggtgttggcatattaacagctaatcagactaaaaagatgatgtgatactttcagctattaggaaagaaaagggtttaccttttttatgaagaaagaactctaatagctgtctccaaatttctgtacaatggttttgtatcaacaccatctgattcatatacctcgtttctggtcaattatctcttcaattatttaatttctagtactgttagaatccacatattttcaaatactcagtttttaaaactatattaactatgttaaattgtattctcatctaaggggttttgtttttgctgttgttttttttttttatcttgctcccttttctgagctctgtattattataccaaggtttgcattagataaatctgtaaccactcaactgggttcttcttgcctgctgcctagaaaaagccaatacactgagaacagcaggtgttacaacagagaaagtttacttattgcaaggcagtggagcagaaggatgggacatatttctcaaatcagtctctctgataatccagaagctaggatttttcaaggatagttaggcagcagggggttgggaagtggttagggaatggggaatgctgattggtgggtcaggaaagaaatgacatgggagtcaaagctgtcttcttggactgagacagtccctgggagaagttaagtctgtttcttggcatgggtcacaggatgggtggcagtagttggtccatgagaattcaaggcctgaaaaataccttaaacaccagtcttaggttttataatagtgatgttatatataggagcaattagggaggttacgaatcttgtgacttcagtcctaaaccataattccaaccttgtggttaatttgttagtcttacaaaagttgttttggtccccaggaaaggaggggattagttttggaaagggactgttatcatctttgttttaaaatcaaactatatactaatttcctcccatagttatcttggcctgtactcaggaatgagcaaggacagttaatttgtgaggttagaagcaagatggagtcagctatgtcagatttctctcactgtcatgatttttgcaaaggcagtcaaatctacattctcacagtattaccttgccccagtaccagccatttattttcctgcaaggaaattaaggagaattccatataattagaaacaaaactatataaaaatataaatacaggctcttgaagttttgcctgaaatgctgttttgactcatgggtcaaaatttggttttacttcacatattattggtagaatcattgttttaattacagatgaaactaatgtagaagtcctgtttctcagaagcctttggataaactcaaatttctatgatataaacattcaagctaccccaaatcaattaagaatgttataaaataaaaatataaccaatgcctaatccaattgaatcctattaaatttttaaattaatatctagaaaataatttagtttttatactttacagccattttcagaacaagtaaaaactgtatttatagaaacattatttcatataaagagtggtggaaaaaagaaagttttcctatttaaatgagtttaagaaatgctaggtgcaaaggaaggttagcacctaccgtaatgtgttttgaatataaaataaaaggatcagagtctcacagtcatcaactcttcatcctccttgtcaccacccaacttattttcttggagcattttaaggactaatattcctgaaaaatgctatctaaatccaaataggaagaatttcaatattcaggatattttctttgagcatccaaagggactgtaaaaattaaatatacagaatgaaaccaatcagtttagcaatgcattattattatgtctatttctctgctcattattgcccctttgttgaatatcaagatgcccagaagtaaaaataaattgtatcattgagagaaatagatgcactgaatgagtggtttttaattatcatggtcactttttggatttggggtgattttggcagtaccctcagtactgattatgttttaaattattgcttttccttgaggaatctgccctatgactcaagaaaaagaaatcttcctaggaagaaacactatgcagtaaatacaacctatacttgtgcacctcttcataaaccttcccatactcccaactatttgggagataatggcttcagaaacactggaaaggcaaagcaatctatctccggacagctaatatcttcattcagataagaaagaaaccattagatttgagggttttgctatccccaataatctgatgaattaaattatctgactgaatgtttctgataattattcaactcctctcctcatgtataagttcttggctgaagaaaagttctaaaaatgatttaagacctagctgtacccttcccagtcatctgctacaaacccagactttgagcacccctcctctctttcccatctctcccactcatttagcccttagcatatgcaacgttttatcatttgtttttgctttagagcacacacagacctaaaaagtcaggtggtagaatgaaaagaagatgagcttaggaaataaacagggcccagtttaaaatggcctttaagtaaatgacatacttaactcatttgagccttggtttgtttgtaaaatgtagataaattaaaacagccagggttcttgtggctgaaagtaataggatgctattatttaatggcttaaagatttaagcagtgtattccctcacacagcaaggcacccaggagcagagtggttgaggattggttaaatcaggaattcattaatatcatggaagacccaggtggtttctgtctttttggtctccttatggtttcaagatgactgtgtaccctaagcattacctccctgtgaaccaagatccacaaaggacatggcgaaagttcttgtgacccttctaagagtgaagaaaatgttcctagaggttccctgacagccccccacctccatcccctcaatctggtaggcattctttatgccatgttatatatagctcagagtcacaccacacatcaatgcccacagtaattgctaacatgggccacagaactaccatgactgactgagaagaatcaagatttaccccaaggctgcagagaagaccctgaagcatatcagaacctagataaaatattttactggcaaggaaaaagagaaagaagagacagaaagggcaaccagaagtgtaagaatgggaagaaatttatgtttgcctccctacctggatggtaagggtaaaggaatatgtctcatatcactttcatatccccagtaaccagtattttgcctcccacagaaaatgttttggggaatatgtacaaacacataatggtgaagctcctataatcagtaaagtatatacttgaagtcattttcttaagagtggaaatgactttaggctcttacatagacactttgtctcctaagccatctcatggcaactgctctgtgttcaagaaagcaccatggtttcactggggcagcaggcagataccatgtaattgagaaatcagatcaaacagatgcatctagagagggtcaagacaaataatacattctctgcattttggacagtttcctcaggtgtagccatgagattatatgccctgaatggctgtcatagcattgaaagcaaggaaatgtagtcctcatctccatctgttgaaggggacaataactattgaagaaggccactgaattaacaaatatatcacattctggaaccttcttaccctggaggttgaagggaagacaataatgataaatatgaaaacaggcaattaatcatcagccactgcaagatgaaaaattcttcagaagtttgtgttaatggaggaattgctatttttgatcttctggttttttctatccctggatgccttgggtaatctgagacaaagctcaagggaatgtaaccagccacccaaaatgaatgcactcaagtgagaagttgcagagctgtgacttggggcagtattatgaattactctgagaaggagcttcagctcccaagttcaatcatggacttggaatgtattccagaggatgttcagagccagggagagatgatgtcaaatactagtttcagaaataccaaaggttgaatgactcatgacctatcactaatctcaaccttcagcgatccgctagccccagaagctatatttattcaatatattcaaatggaaatataatgggtagatgagatgtaataatgagttaagaattttagggaacaaaaataaatcagctttgaggcttaaggcagaaaagagagtaacagagaatatgaatacatgtgtttgaaaaatatttccataaatgaagtaaaacatacagggaacctaatatgcattccaaggaataggataattatggataaatgtgggttttctcaaagtatgctttctttgggagggttccatttctaataaaaagtattcattttaagaatgaacaatgagtttaccttggagggattctgttggtcttaggtggacaataaactctttctcttttttattcttcagtttttttccccacattcctttgcatctcacaaacccaacctcatgccttaccatggttttcaaaacattaactgatcaacattcaaaaaatacatcaaattccttctcattgttctttgattaaaaatattcacaagaaaatctaaggaaatgtttctcaaaactttgaacctcttattacagaatgctctagtgtctgttaggtatttatctactttgatacactgttaaatctgattaaattcttcacactatccttactaaagttagtaacattcaactagtattaatgaaattgattcagaaattgtacaatatgtaattgtgttgatatagtcagtgatgtgcgtaaacaattctctaaacagtacacacaaaaatctgctctattctttaataccggtgcaattttctgcaggagcaagcattttaaattaaataacctgataatatttgaattattcacttcctttagctatagtagctcctctttaagtttagaaataacatataaatgtttgtcttttcccctttactcccactgtccccttgtccctaatgcagaaaagacctttgtaaatctttgccatgacaatgtactttgaaaaggcaattaggaatggcaatttgattatccagcatcaggaagtttctagatcattttgtcagcatttctgcttttccaaatgcatctttgtgttgaaaacatcccatttttccagtagagaaaagttattatgcagacccacttaatcagcctttcagtgcatttaccagggctctatagaactcaaaaatgtcatccttttgttatgctggtggttgagtattatgacatgcatataaaaataaaattaagctagtaggcttaatcccattttctttgtcctgtgtgtctccacggggcacatcttgtccatgtcaaagtcattttaacagtttgcatcaatatgccatcttttaactggctatttaaaaaaatgatggtaggccaaatgtggtggtttatacctgtaatctcagcacttcctgaggcagaggcaggaggatcggttgagcccaggagtttgagaccaacctgggcaacataaggagactctgtctctaaacaaaatacaaaaattagttgagcatgctcgtgcacatctgtggtcccagttacttaggaggcttaggaaggaggatgacttgagcctagggggttgaagcttcagtgagctatgatcacaccactgcactctagcctcggtgacagagtgagatcccatttcaaagaaaaacttttaaaaaaatgattggggcttatagaatataaatcaaagaaaatatttaatagggaaaaccaaagacttcaatttgtgtgttgctaatgggcctgttgcaagagctatttattattactctttcaaaaatagtttatcctgaaattagtgacttccactgacttaagtaaaataggagcttttggcttccatgccctgtgtattataatcaaggccctcagacctttcaggtgccttcattataacaattctcatcactttagtagggtatgttagttctattcacagaagtcccattctggtaaagtttatctttttcttccattgcttgtgtttttggtgttgtatctacaaaaccattgctgaatcaaggtcacaaaaatttactgctgtgttttcttctaaaggttttgtagttttagctcttatatttgtacacttgatccaatttgagtttagttctctatggtatgaggtaaggatccaagttcttctttttttatttttatgtggctatccagttgtcccaacactattgaaaagatggttctttctgcacttaattgtcttggcaattgttgaaagccagttgaccataaattgagggtttattttggaaatctcaattctatttccattaatctatatgtctgtctttatgccagtaccacatggtcttgattactgtagctttgttttaagttttgagaagtgtgattcctccatctttgttcttatttttcaagattgcttttggctgtttcaggttccttaacatttctatatgaactttggatcagtttgccaattttttccaaaaaatcctggtgagattttgataagaattgaatctttaggccaatggtggggagtagtgtcatcttagcaataccaagtcttctgctccatgaacatgagatgtatttccatttatttgggtcttctttagtttctttcaacaacattttgtaattattagagaataagttttgcgatcctttgtttaatttaaatttatttatttatttatttatttttgagacagagtctcactctgttgcccaggctggagtgcaatggcaccatctcggctcactgcaagctccgcctcccgggttcacaccattctcctgcctcagcctcctgagtagctgggactacaggcgcctgccaccacacccggctaattttttgtgtttttagcagagatggggtttcaccatgttagccaggatggtctcgatctcctgacctcgtgatccgctcgcctcagcctcccaaaatgctgggattataggcgtgagccactgtgcctggccttaaatttatttttttttaaagagcacttttaaaaacagaatgtttagcttttctcagcatttgtgcctttggcaaacatgtcagaggcagctgacttatataatagaacagtctcccaacaataaattctcatcaggaggcagtcagaattaaaagagtgagttttgatgctataatcctggatcttctacttcctagcattggaaacttgggcaaccgaactctgtgccattttattatgtgaaatgggtatttttttattaaatagttatgccacagagattttttgtgaagattaaatgtttagtatatatacagtccaaaaacctgtaattggcacatggtaaatagttaataaacatgcatcgttgttattgttacaatgccctatcttttcccaaagcactactacagattctatttgaaattgagccattaccttctggtatgttgaggcagaagaaaggcaaagaataactgctgcagctcttagactctttgttttcctgttattgaggagcctttctaagaaagcaccacggtcatccttgcttcatgggaatctggggtttgttttgttggtgttttatagctggccaactggctggaaactcctctgttgagatgtatcgccaagtgctcctgtctggttgtcgctgtgtggagctggactgctggaagggacggactgcagaagaggaacctgtcatcacccatggcttcaccatgacaactgaaatatctttcaaggtagagtatatgaatgttactaagagaggcagctggagacacctgattccttttggttaaagcctcctaaggtagaaagtcccagtggtcacaattaagtccaaaggctgttaatcatctttgcaatttcagaggctaaaatttggctgtttattcatgaataattggcatcaggtgaattaattcatgctaaccaaattctaaggaaactgtctcgtgaaaggaaatatcaaggtatttgtcttgtcctctttagcactcttactcctaatttcttgcattttatttttgtgaaatatccataaagaatacagacaacttatttctatgctttaactaatggctataaagtatgcatccatgtaactaccatctaaatcgagaaatagaaacttggggagtacctgaaacacttccatgtatccattcccatcagaatgtcccgtttaccctcagaggtgactaccatcctgactattacagtggtccctactttgcgcttctttagagcacaaagtacaaatttatatgcagccctaaatgatgtagcttcaccaatttttttcacttgtaaattgattcacactatagtatacattattttatgacttgcttttttcactccacattgtttagaaggttcattaatattgtttcagataactctagatttgttggctttctttatcatgatgatagtattaattattactgttaattattatgtaagattccattctgtgatgctatcttttggaatgttgacgtctatcagtcaaagacccctaggaacatacctatggtcaagttgggtttgtttgctcatacaacaaaggagaacacatgttgtagggagctggagtgtctcagtaaaagtttattagagaggacttacaggacttgggcttatagtaggtgatttgggggacggttcaaaggagaagggttttgcagtggattgggtgctgtcaggaggcacaaacaatcctatgagagggtatcttagtaaatcctatctaggaagcaggactaaagctgttactgataaagatgcatcagccattcttgttagtgagaaatgaggtgcatttggtctctctctttttccacccttagctctattttgcaccacaaggggccacacattcatgtgtatggacacccaagcccaaatatctaaagtctgtccacatgtcctgcaaagagccttccccagggggtaggggccattggagtaggggaaatctggggtcctaggtacttggagagtgactggagaaagaagttgtgggcttcagggaacatgttctctccgctgactccggctttctcacccctttaaatgggaatcagaagagaagggccagaggacaacctctcgcactaggtcccaaggcataagccctgttgcctgggatacctgggtctcagggaagtgtcactaactcttatctgaagcaaccaaggaaacagagtccaagtaagtaattaaggtgagtggagacaaggccattgaacatgggagatcagagtactgagaagcaagaatatgggatgaattcaatgttaatatcaccaaggttagtgacgaagctttggatgaagaaactgtgtgccacttgccaactcttttctgaataagggtggctcagtagatggcagaagtgaagaagaggtaaaaactcttttggctgcctcatgggaactaggatttttttttaaagaagattgaaaggtagtgttttagaagtagcattgagagcaaaaagatcccaaaccccagcttcttaatgtgaaacacttgagatgtgagaaaataaacagtgatcactgaagaaagcagctaacaagaagcaagattttcaagggacagccaagtttctgtttagacaaaaggatttttctgattgaagttgctgtattagacaataataaaaatgttttcagcagtaatatcattcacacctaaaaatatgtgtattatgttgtgcctaaggaatacgacttttcatttatgcaacttagcctacaatgcaataattagagaaaatagcacccttcacttaaattttacaacaaagtttaatacagggttgacattaattctgatcaaaatctttaaaagctgtgtctgttcctgaaattgagcatgattatgacccttgcattttcttaagtggaaaatcaatgtttaattcatttccatagtcccacttcttccctctcagaccttgctatggtcctttgtcaactacctaagatgcagtctaacagttgggctctttaagaaaaagtggagacaggttacccccatgtggaaccagtgcagcttgggctcatctgtctgttgatggatgatgatgctcctggaatggcagacagcacgccctgatggagctgagagctggtggcaccgcacactgcccatccgccaggaagacctgccccactccctccccaggccactgccctgtctaccctccagagacattgtgagaagcaattgttattttcttaataatttaaaatcctccaagttctctgagttccttgtgggagaataaacaccaagcacatcctaaggcatatttattttatgtggagcatttgcttcttggcctctgcctgccattgagtcaacttggagtgactctccttgtgcactcgatcatagaagtggttcttcaattacatctgtaatcccagagtcacgggctgattgaacatctctttctgggctctggaagcatggcttctcaaccacgtccatacacttgccagtgggtgagaggcttaaagactaaaatctaacccagaatgctgctttctctctctgcctgctggagttgggagtggggaggtgaccaggatggctaaagacaggagtgaattcatcatcccagttggtttttccagctattcctcctgctaatgcacatagcaggatagacagttctggctgagatgtggggaggtgaccaggttggctaaagacaggagtgaattcatcatcccagttggtttttccagctattcctcctgctaatgcacatagcaggatagacagttctggctgagatgtgggtaggtgacagtgggtgaggatggatgtggggagtggaaatgccaacctattttgcagactgatatgcagtagcaaggatgctttgcatcaggactgagactaggaaagacaagtaagtctcctagcaagtaaaatttaaggacgtctttgctctcagggctgtgtaagcacagagctggcactagagagtgagtgtctctttaaattttgcacatagtcgcctctcttgcctcatcctagtcccaacactgcttgcatgattatcagcatgcagtctgctttccctgaacccagcgtgtaaagtgactttgtaataagaaagagtaagaagagaaacagggcacaaggccctacataatctgcaatcccattaccttgtttcttactgctttccccctcatccactgggctccaacagtactgaccttgctgttcatgggctgtgccaggctggccccgcctcacagcctttgcacaggctcttccctctgcctggaatggtattctcataggtatctgcctggttcttcccttgcctccttgaagccttcctcaaatgtcaccttctcagtgaggcctcctgggacccatctatttaatactgtcaccagccaccactcccaatccccacactactgacgtaacccctgacacccccactttttagtaatgtattttcctaaggcacttatcatatcaccttccaacaatctgcctaatttgcttaattcctatgttccttgtttattgtcccttctactaacgcataagctccacaaagacagggctctttgttctgttccctgatctgtcccaagttctcttctttgagcagaacctgacatatagtagatgctcaataaatgtttttgaatgaattttcccttcccagagcaagtagatcaaatacagcataacctccattttcagtctttcttgcctctgctcatcagataagtgaatttgtctttctccatcctacacataatatgttggtagaggcagggaaaacattcccccaacatttgccagttttagctgccctgaacatttgggccagatattcacagtataattagactatattctatagctacactgcatagtgcagcagcaaaataaactgattgcagagttcatttttatgtcacccagtgtatctgctttcagtatgtgtgacctggaaagcttctgtgtgatagatcccaaaagcaagagatcctattggcatttgctccctgtttactgtatgggtcaaaataaaaagttacgttctgggaaaggagacattcagctcctttatgaagggctttttgttttgtagtctggctttattatttatcccatatatctgtttcaatgcctcatcaccttagccttcctggtggccatgacatagcaattcaccacttagttttttcattctctcttctcccacccaatatcctttctccttacgcttgacaccacctacccacctccttcccagggtggtttttctccctttaggcagcttccttttaaccagcaattatataagatggaaaactggataatgtaataaaatatatgaggaaaacatattaaattagagtaggttaaatccagcatttctgaaaataaagtgtcattcattccctgagaaaaacaataatttaggatgcagtttcactgctacctaaatgcacatataaaatggatatccaaatacaccctactgttgtctgtcgaggataaaggatttcaaggccagtttgtctcactggagtttagtaattgaaccatatggcttatagattattgaatctagtgttacaagtctctgaaaaacaattttggcttgataaagagcaatggagcattaccgtactttcacatccaatgtccaccaattacagcaagtatgaaagaatgtaacttaaaagctataactggttttctcatcctaactgatcacgcacaccatacaaaatatttcaaaggcacaaaagcatgaaagttctccagtggaacttctgaagttttcagttgctcccaactaaaattattagatgaaatttagtaattttttttgctttaataattggaaaattttcctaagctgctagctaaagttatggtagagatggggagaggtggacagagagaggagggagaaggatgggtgagaaagagagaaaggtgaacacagaaggtaaggatgctactctggagatgactgccaggggtccagtacaagctcttccatttagtcactgcaagaccttggagaagcttccttcccagtgcaagtctcctttgttatcagcaaactggagatgataatagtgcttacctcctagggtggttgtaagtaagcattcaataaccctacttaatacacaaatattgcttaaactatgcatggcatgcagtgcctactctataaatgttagctttggatgttatcattgaaattcataaaagccaaatgttagctttctttctgtaaatataatggttgtgtgttacataggcatggacttattaagccagagtgaaggtggggggctaaattaagtcatctgtaaggctaacatggtagaaggtgtgggcatcctctacgctcaacccatggcatccacttcacctccaggaaggtaccagaagcccaaattgtagtaaactaaacacagcccaggccttggttaggggcccagtaggagcagagaagggaacagcagatgagcttggatgctccactgcaaacatgagtcctaagccaagcacacaagatcagaagtacacaatgtcagaggcaggacaaatggaaaagcaggggaaacaacacaggaagatctaggaaccccagtggcccagctgtagttcagaccacactagcatccccactgtgggaagagagaatgaaacccagggagccaggaagatggggggcatggactccctacaagtctaagaggcccagagaaacactcacattttatcaaccaaaggaagatacgagagagatttgacctggagctaaatacccacttcctaaattagaggaggggaggaggggtcttacccaccttcagatttgactctccttggccgaaataccaatgaggtgagcctacaatccactttcattattaaaggcagctggagaagttctcaaacagacaatgaagacagccatcatcagaaaagttagcaaagatggccaggcgcagtggctcatgcctataatcccagcactttgggaggctgaagcaggcagataacttgaggtcagaagttcgaaaccagcctggtcaacatggcaaaaccccatctctactaaaaatacaaaaaattgtctgggtgtggtggtacatgcctgtagtcccagctgcctgggagctgaggcacaagaatcgcccaaaccaaggaggcagaggttacagtgagccaagatcatgctacagcactccagcctgggcaacagagcaagacttcgtttcaaaaaaaaaaaaagaaaagaaaagttagcaaagactaattacacttttatttacatgtgtatttgcaggacttttgtaatgtttattggaaatttcagccatgaagttgttaaaaagttaatctggctattaagtatgaatcaacattcaatcttctgtaatacaaaattacatttatctttggttacaatcaagttttaagctttgcttaagccaatgatcagactagtccaagggtcaacaaactatcttctgcagaccacatttatcctgtcatctgcttttgtgaattaagctttattgggacacagccacatccaattgtttacatattatctgtggctgctttggggctatgcattagtctggactgtctctatctctagagagacagagttattaaaaggaactggcttatgtggttatggaggctgagaaatcccaagatctgcagttggcaagctggagacccagctgacctaatggcacaatatcagtcccaatccaaaggcctaagaataaggagagctaatggtgtaagctgcagtccaagtccaagtctcaaggtaggagaagaccaatgtcccagctcaaaaacagtcaggcagaaacagcaaattctcctttactctttttttttttttcctattcaggcttccagtgcgttgaatgaggcccatccacattagggagggcaggctgcttaactcggtctaccaattcaaatgttaatctcatccagaaacccctcacagagacacccagaagaatgtttaacgaaatatctgggcaccccatgacccagtcaagttgacacataaaattaatcatcacgagctacaaaggcagagttgaacagttgccatagaaatagaaactatatggccagcaaagcctaaaatgctacctggtcctttatgaaaaaatgtatgctgacctctgagctagtcaatagaagaataaatgggaacacaactagataaattctgtttctcttctgtcatatattaggagttcattcattcatttgaaagtatttcctgagcatctagaatgtgccttagcagaacagtgaagaaaacaagttcttacctcaagaagtttacactgtctagtgaggaaagatagatcaaaataaacacaaagatacggtacatagaaacatgccctttaaagcaatctaaatcagtgggcaaggaaaagagagacctgaattatgctgtctggatggtagaggcaggcctttggtaaggtgatgtttaggcacaggtgctgtacttactcccaaatcaatgcagtaaatcatgctttaatgtgagtatttttgactgaaggaacaaagtgcaaagatggtgagatgaaagcatgcttgatgtattcaaggaaaagcaacaagatcaatggactgtatccaggtgacagagagggagaggaaaaagagatgtatttaaagaaatggcaggtgccagatcaagttaggctgtgtagattatgataatgaatttggatttcattccatgtgaaatgggaggtcattggaaagtttatagaaaggagcgaaactgtctactcatgtttaggagcaatgactctggctatggtgtggaatacagcggcaagtactagaagccaggaaagcaataaaaagactgtcagtcagcttctcctaggttttgctgcaataagaagaaaccctaggatcacagtgatttacaaccacaacggtttacttctcacacaggttagatgtcagctgttgctctgattgctattgtttggaattcatgttgaaagaacaacccacatctatgatatcactggactcatgggagaagagaaagagaaatggctggacaacaacatgatgggtctttaagactctactcagcagcagcacatgtcattttcatacacaggcccttggccaaaataaaaccacggccaagcctatggtcaacagggtgtgtagacagaattctcccaaaggaagggggaagcaaatacgtgggaatggtgataaaatctaccacagcagtcactgcagtggtttttgtatcaggatgatagcagtggaggtgctgacacttgactgtactcgggacctattttggacaagattgctgatgaattgaaaggtgtgagagaaggagaggaggcgagaatggctctactgtatttatcctttacctgatacactagtgccaaatttatgaaataaacaaaatccagccctttttttccacacttagcatccacatccttgatgacctctattctcagttcttttgagggctttgctcttagctggctaagattattagctgcatggaagttactgcaatggttgggtattaataagctctagagtcagacaaatcttcctggggtttaatcttggattctcttctctatgacttaaggtaagtcagttaatatctctgcaccttagttgaatcaagaatagataaccatcatgagctgagtcctttgccttctcttgctgcatcttcacaacagatctgtgaagtgaggtttattgcactttatagattagcaaaccaatacacagaggcattaagtgattttcccaaggtcacacagcttgcaaatctcagaggcaaggattcaaaagtcggtttgaatccaaagcctatactcaaataaatcaaatatagcatttaaaatctggatgttgcttgccttttatagtgcttgctttttttgacagactcaactatcgtaaaagttaaactgattatgtatgaaagataatctgtgagttcatttctaagaaacagtaaaagtgattcttctcgctccatgcaggcaaatccttcttagaggatatatgcaaatgtagtacagaattagaaagccttacttatactctggggccagggaaatagctttcaggagtggatataaagaacgctatatattgaatggggaaggtagagacgatagcagaaaaggctcaggcataaagaataggagtggaaatccctatttaaaaggagaatatgaaaaaaataaatgtaactaaaaacaagtgtatgggaatatgcaacctcactactactgaaagtgatataattaaacaataaatgagactgcactttactaccagttaaataagaaaaacatttttaagaataatgcccaaaactggtgaatatgcattgaaatctggtcctgcatgcattactctgggcaatctaaagtgaaaagtaatttgaaatacatgagggactgtaagagtattcatattcttaaatcaagaattccccttctgagaattcattcccagataatcaatcaagatattagggaaaaaatgaagctgttctctgtagaattatttgaatgacagctctgaaaatgtagctgtccaacagttggggaatggttaaatcaattttaatacctttactttctagaattttgtacatatattgaaacttgtgacatatacatttttaaaaatgcagattgaaaattgaagtactgatacatgttacaacatggatgaactttgaaaccatgctaagtgaaaggtggtcggcacaaacaaccatatattgtatggttacatttatatgaaataattagaataggcaaatctatgaatacataaagtgatgaatgattgcctgggactaggtgtgtggggtggggtgcaggaatgaggagtgactgctagtgggtacatggtttctttttgaggcgataaaaatgttctaacttatattgggatggtgctcgcatgactctctgaatatactaaaaaccattgaactgtacactttcaatgggcagattatatctcaaaaaagtcacatctcaataacaaagctttttaaaaatacaagttgagtatatactgtaattaaaactaagctacataaatacatgagagacagactagaagtgaatataatgaaatgctaacaatggtttggttcagaaagtggatttgtgggtgaaaatttttgccttctcttactgtcccaaatgtttataatatgattagatttctttgattattaaaaaatagatacaattagcaaacaggagaatcctctcctttgcatttctctctcccctccaccaaaatccaatcttcttataactttccagaatcaagagtcagaattagcaccgtccagcagccctcaaaatcccttctagccatttcaggccattcgatacaattctctgaatggaaaagacaactatattaatagatttaatacctttcaagaatatacagatgaaaaattctggcatactgaatatacatgtgttctcatttttaggaagtgatagaagcaattgcggagtgtgcatttaagacttcaccttttccaattctcctttcgtttgagaaccatgtggattcgtaagtattcaacacattcaggaatgagtctttttcccgaatagggcatactgagtaattgtttatcagatttaagattatttgacatgattaatggtgttcttcaatcatgttgtatattaactggcatgttttcatttgtaggtgatggaattcacttaaaataatcaacattaaaattatccgttggacttgtaggatctattttcataccatagtatggtttttaaattaaaaactcttctttttgcaatgcagtggaacacatttttctacacaatacatgtctctgttatagatttggggtgctgtgggccacttttataacccttcttcattagctccttctattgcacacaatttgagtccacttcatcactttgtggcaggtggggggagagctgtgaattccattttaccaatttgcacttacacagaactcagttcagcaaatctccatattcccccttttcactggctttcccctgtttgttaatatttgtatttgccaatttcaaaatagcctgcatgtattgctgagctacacaaagaaaaggttattttgacttcactgttttatattcattttatcacacattaccaaagagagacacatttatatctaatagatgtatattagtttatcatgtagttactttaaagagcttcagaatgaaagattcttatccatattgaatgaaagcctctctttcatttcaggaacctaagccagatttttcaactaaaagccagcagcacctgtcctaatttggattacgagtttctttttaccctccttcctattgggagtctttcccaggtcactgagcctctttgtccaagtaatttgtaacatgtgcttcaattctctaattcttaaagagttcactagatcttaaagatgcagattggtcatgggcaaatttcaacttgaagaatttctaagtagttaaatgtgacaattttataattatctgtattttttcagtttgcccgccagaaatccatattatatttaccggcttgtggttctgcttcattatgcaacaatcatccaatgaatgatgtaatcctttggcacatagtttctccaacgcttctgagggtcaaaggaagagaaaggaatttattctgttccatgctatttctgttcttactcaaaggggcatctctagaagcagtatttaatacctagtttgctttgcaactaggttctgctttgcaattgactctgttaaacaatttctcatctctgtcaattcatttataattggcctgtaacaatacgtatgagtccattcttgtactgctataaagaaatgcctgggtaagagactgggtaatttatgaagaaaagaggtttaattggctcacagttccacaggctgtacaggaagcatggtggcatctgctcctggggagtcctcagagagctttttactcacgggaagacagagtgggagcaggtgtcttacatggcaggaggagaactaagagagagtggggaggtgtcacacacttttaaacaaccagatctcatgagaactcactatcgcaacaacagtaccaaggggaatggtgttacaccataagaaatctcccccatgatccaatcacctcccaccaggccccacttccaacatcgggggttacaatttgacatgagatttgggcagggatgcagattcaaaccatatcacaatacttgagcacttttctttcaggtattatagtttcgacttgaggatgctttttttttttttttttttttttttttctgaagcggagtttcactcttgttgcccaggctggagtgccatggcacaatcctggttcactgcaacctccatctcccgagttcaagcaattctcctgcctcagccttccgagtagctgggattacaggcatgcaccaccatgctcagctaattttgtatttttagtagacacggggattctccatgttggtcaggctagtctcgaactcccgacctcaggtgatccgcccacctcggcctcccaaagtgctgggattggcatacttatgttcttaaagagaagtttctatttaaattagacaaaatgaaaggctatggttccattctatattgtcacacctgctacactgagcttccccttggcatagccagaaaaatatcaaccgccaccaccaccaccaacataatagctaacctttattaatagcgaacatttattaaacattttttgtgccaagcagtttttgaaatattttacatgcctcagctcatgtaagccttaccacaaacccaggtgcttctaagagtaaatattatgattatcgccattttacagatgatggaactgagtcctaaagaggatgaataacttgctcaaggccatgtaactaaaacatgacagagatgggattccaatccagttagtgtggcttcaaaatgcacacttttaaccaacacatctcctacgcctaaacagaagcatcaggagccttcaaaacatcaaattcagacaacgagagcatccaccaggcaatggccagcaaatgtttgcctctgtggcttgtaacccttaaacacaagatgtgttttgcagttcttcacactagtcatttagagatcaaaaactggacatgaaaactaatttctgcactgtgcctaaaggcaaagagactagtgccattgtactgcccttatgggcttaaaaatgataaatttagctattaaaagttcattaataatttctatgtgacaaaagaaaacaggaaaacagcctttccaggatgccatgattgtgtcccaagccactgagataatgtaatggcagtgaaatactaaaagataaaattctattgtggaggaagtgggtgggagttgcttgcttcatatttcccttgtccttcagatatcaaaattgttcagccaccattctttcctgggaggctagcacacacccaaagaaaaccgataagctttcccttcgctggtaaaaccccgtgcttgacttgtgagccacttcatctagttcctgagcccatggtaggcagtagcagcactctttcccactaaccctagaaataacctcagaatccttctcaacacagtgacctcagactagaccagcaagacatctgacacctatttgccatctctgatgaactattttatttccctgtgtgctgcatgtatggaatttcagattcagaactctggtcccagctcacttgggccacacgtccaaaacaaatttatactagaaaaaaggagaaaaggacagggcacggtggctcacgcctgtaatcccagcactttgggaggccgagactggtggatcatgaggtcaggagatcgagaccatcctggccaacattgtgaaatccagtctctactacaaatacaaaacaggtgttatggcgggtgcctacagtcccagttactcaggaggctgaggcaggagaatcgcttgaacctgggaggcagaggctgcagtgagctgagatcacgccactgcactccagcctgggtgacagagtgagactttgtctcaaaaaaactaaattaattaaaaaagaaagaaaaaatgagaaaagccactgaaacttctggttttctctcccaatatctgaagtcacctatccatagacaataaaagggaatctgctattagctgctttcaatgtatcctgttgctacatcagaatcccatgaagtgtcttcaaaatgcagattcctgagctacacccttaccctgactgagaatttctagaaataagacttgaaaatatatttttaaaagccctacttgactctgacatcctacttgtgaactaacacttttataaaaagaattctacaccaaattcaatggaagtaatctttacccatgttcagccacagaaagctgtgaaattttgaacaaggttcttaatttccatggattgcagattcctcctttatagggaaagaggttggtttagttcaaactggaggatttgctcccaagaaatcaagtgagttcctcggtcagaaaaactgacctctgccccagacgctcacaccttgggagtattttattatgctcagaaatgtctgctatgacctgaagctcaaaatgcatttgtgattttttttccctctcactttgtccccatggtagctgatattgatgctctaaacacttcaggattttgttttttgctaattgcaattttaatgccttttatttctgcagttctgacctgcaattaaagttggtttgttttcctctgactttttcaattcaatttgctctctgctctgatttagttccatcaggtgggtgtgcatgtttattgagaacatgaatagcctgattaccaaatagctcattttactttttgctaggacacctacctcttgttctgtccatctcagttgattctgaggcaggttttgtttttgtttttgtttgtttgtttggtttgagggtctcactctgtcacccaggcaggagtgcagtggtgcaatctcggcttactgcaacctccacctcccagattcaagcgattctcctgcctcctaagtagctggtattacaggcacgcaccaccacaactggcaaacttttgcatttttagtagagacaggatttcaccatgttggccaggccgatctcgaactcctgacctcaggtgatctgcctgcctcggcatcccaaagggctgggattacagacgtgagccaccatacccagccctcaggcaggttctaaacgtctacattagacatagattcttgttcttaaaagtgtggtcctcagaccagcagcatctgcatcactggagagcaagttagagctgcagctgagtcctgtaccccaccctggactctgtgttggactcttcattttaataagaccccaggtaacgtgaatgaaatagaagagctaagctgtaaccaccatggtttattaaccacctgcatcagaattatctgcagtctggcttaaaatgcatgttccggggctttggtcccagctacatgaatcaggggactgtggacttgatcctgtcacctgcagcattaacagctcaggtgattccttagtggaattgagtgataatcatggctccagtaaaatctttatctgggcctgatttggggacttcctgacagaggacacctgtttggggatatttgggacatctcccttaaattcctctaatggaaagaatatggttccctggaaaatcctgagagcagggcattcaggtaaaatgccctgctttcactccaggtgtttgatcaaagataattcggggctcccaatttccaacagtcaggaaaaatgtcatctactttggcacatgctgacttaccttaatcaatcgcagtggttttcaagcttgaacacacaccagaatcaagagggcttgttatgatgcagactcctggactccactgtcccggagtctctgattcagaatctgcatttctaacaagctcctggtgtgattctgctgatggttcaggggccacacttggagaagtaaagctccatgatactgagtagcatctttctgtgaaagggaaatggagggtttggccatttctttagtgcactctggaacatgtcgtcccagcacaactgtacttcttatcagcagcagccacagagcaggctgacctggtagaacccctgtgcaagttatcactggaggaagaagacttgaacccagggatgcccggggctggccctaccaaatcagccacttctctgcctgctcccaaaggtctcatagacacagtttctaatgacttgtccttcagcaacgacctccaatgcttttcaggatcaattctctgattagcagtttttcttctctccctaatactgctgaggaatgtggcagtgtattctgatggccgcataagccatttagtaagctcccatacagaccaagagaggcctggtgagaaggggcacggttgctgtggaggactttgcaaatcctttgaatctctccttagcctctccctgcagttccaagaaagcagtgactttggggtttcatattcaaatgccagagaactcactttccacccaaagcacacacttggttttttaaaaagaaaaaaatgaatacaaaatagtgacttttcctgtggaccatttcaatatgatttgaaccgtcaataccaaccccctaaccccagtaaaaaaaaaaaaagcccatgatccaggcttaaacattcatggaaaagggaatgaaaataagaataagaatcacattttatgatcaatttgaattttcgtcaagaaggattttcatcgctgttacttattcttagtacagtcacagtcctgctaaaatgtattatcattgcagcatgtagagataactattggaaatcaagttcgacagactgtagatcaaattcaaaatccataaaacccaaaggaactggataactttgtaatgatatttaacattccacgaaatgagaaaaaaaattattgctttttgaaaggtcaagggaagcagtagcattgaaacaatatgaatgttcccctatatcagctgtgtttacaagttactgggcgtaggatttgtctagtctagctggcggacgccgccttgtaacagtggaatcatcttacatttgccctgctcttttaatgtttcaaaggcgtttgcatccattacttcatttcatcttctcagcaccctctgtccctttccaagaacggttattattctcctcattttatagacccagagtggttcagaccctgtcgctcagctcagcaaaccctgcagtgccagcctttttccattataccaggtccctactggcaatatattcagaatgataccacctttgctattctgttatgtatatatgagttgcacacacctttccccaaggtgcctgctacttttatctttcctccaggaccccctccccaagtggacacactgtttgcctgtctgcccttttctacattttgagattctctccctctctttttctctctccgttgtctctctttccctattcagctccctccctgccatccttccttatctatcctctttcatctcctcataaacactcctttgcagcagtggtttacaaatttcacttgataatttacatggaaatatgaaagggttctttctccaagtgtcttgcaattgacttggaatcagcgagttaaacaaaagggactgagcctctaactctgggaatttcaaggctccagttacagcaaatgacatgctgtcccctccacctatgtctatgcaggtctgccttgggaaccacctcacacatcagtgccttcgctgtccatctgtgtatgttattcaaattcacataagttaagataaagatccaggatgataaaaaccaatcctgatgggtgggattagagaattacttctttctgtagttaataacacaaagcaatcctgttcaggttctttggataagcctccctactttccttcttctgttcttgttctcccttagcccaaagcagcaagccaagatggcggagtactgccgactgatctttggggatgcccttctcatggagcccctggaaaaatatccagtaagcagttctgatgtttgtccttgaaggaatgtatgcattattgatgaatgaggttgagggaaaacttacttccttttcatatttatgtttcttggtaagattaatgcagttggtgatgaaatctttgacaaggaggataccagcaatgggccccactaagggtagaggaatgcctctgcactcttcctcttcccacactcttctctctcgctggctgcctgatgaaactcaatcaagagtgcagatttcccaacaattacaatcagcccatagagacagtccaagaggacaggcctctgctcactcccagggaacctcgtcacacctctttgagatgaatggattggcaaaacaggacactgcaggtggcacaatgtcttcttggcctgtccctgctggctgttctctatttccttggatgcaccttttggtgtggcacaactcaggtcgcccattgcattgatgatatctctgctttgggaaggaaagcagcagaaatatcctaaagtagcattttccttcccgcacccttttgcccaatctccatgcatttgtaagtgagtttataccagtccctccgctcattgcaagccaagaatagaggactaacttaggcattctatagattttcttaaagtaacctatcttgtggcttgcacacatgctctctgatacaatatctaatgaccccctcatgggaaattgattttcccgttagatgtacaaacttgaaacagtcaaaataaggcttgcaaatgtggtagcttgaatcttagggctgggaggaaatctgaagccacctcatccacttctgttgatgccagggacgtgcagctaaactacctagtaccaggatggggattttgctgattttaaggggcatctgaaaaaatgatttcatgggctcacctggaagcttctgcccgtctttaccaactcctcctggcagatgcctggcttccctccttcaaaaattcaggccagggccttcttatctgtcctaaatcaagatgattgggtttctatgttccattggaaaattcataaatgttcagatttagtacatcaaatctaccagtacatttctatggtcttcttcatgtagaatatgttgaaaaaaaaagtatagtaatgaaaatatatctttgatataaaaaaaaattagctcccatgtaagatacactaagagtttaatgagcagtgttgaaggtagggaagaagtctagacatttggtatccacagctgatctgggggtctggggaggggatctgaaagagggagcagtatttttaaagaatatgcctttcatttctattagctggaatctggagttcctcttccaagccctatggatttaatgtataaaattttggtgaaaaataagaagaaatcacacaagtcatcagaaggaagcggcaaaaagaagctctcagaacaagcctccaacacctacagtgactcctccagcatgttcgagccctcatccccaggagccggtgaggggctggtgggctctccccgtcatgttttgtgttggtttaagaattgctgctctgggctgtgcgtggtggctcatgcctgtaatactactacttttggaggctgaggcaggtggattatgaggtcaggagttcgagaccatcctggccaacatggtgaaaccccgtgtctttggtggccaacatggtgaaatcctgtctcttgcaaaaatacaaaaattatctgggcatagtggcacgtacctgtagtcccagctactcgggaggctgaggcaggagaatcgcttgaacctaggaggcagatgttgcagtaagacaagatccagccactgcactccagcctggtgacagagtgagactccgtctcaaaaaaaaaagaatttgctgctctgaaattagcttagaaggactttgaacattcctatttctgcacagttttgaactactggttttctcttgctgctacaaacttagcggcttaaaccagcacaaatgtattatcctctagtcctgtaagtcaggaagccccctgggtttcactgggctacactccaggtgtcagccgggctgtgttccttcctggaggcgctaagggagaagctgtttccttgctttttccagcttctagaggccacccacattcgttggcttggggctccttccagcttcaaagccagcaaggctgcatttcactaacctttctcctgtggtcacatctccctctgaccacaggcaggaaatgtcctctgctggcaagaactcaagtcattacattggatccatccagataatccaggataattgctcccatgtcaaggtctttaactccatctcacctgcaatgtcccttttatcatgcaagctaacatattcatggagcagagacatctctgggaggtcattattctggctaccatgtaagccaaatagtcttcagagtgaccatatgactttaagcttcataatgggaaatattaactatagaactgagcactggatgcattgtcattgatgatatgctgaagagttctgggcatttcaattttttcatgttttaaagaactttttaaaatctgtgacatggcaaaattacttaaattatcttttgaagctcctagaggatgcctaatatcatttcttttccttttaaattaagggtgaaatagattgctgtggttgatgagaaaagaattcagtggcactcatttccttgggattatttgtcatttagtctgatttatcttccaagttcagtcagaagcttggcaatctgaaaatcgcattatagacatctcctgattgcagggtgattaagtggaagaaacttttaagcttgactgtaggaagtttttcagttataagttaaacataggaacaatcaattggaaaactacttagcagtgtctacaaaagctgaatatatgcactccctgtacctcgggagttccattcctaggtatatgcttgctaaagatgtgtatttaggtttaccaagagacacgtacaagaattgcttaaagcagaggtattcagaatagccaaatactggacaccaaatactcgtcaacagataaatgaattatggtatattcacacaaagaaagaatatgcagccatgagaataatctataactaaatgaaaactatggatgaatcactataaataaacataatattgagcaaaggaagtcaggtacacaaaaactacatactgtatgatttaacctatataacacacaaaaacaggcaaaactaatttatgctatttattagaagtcaggataatgggttcccttggaagaaaagcaaccagcagggagcccaagagccttctagagattggttatattttgtttcttgatctggatatcatttactcagacacgtttatttggtgaaaattctttgcactgtggacttacgacgtgtacttttctgtacgcctgttatacatcagttataagattttaaaataattaaaatataaactctaggacaatcagggttaaaaaaaagtagcctgagactctgatttatcttttcttctatttttctgtctcaattgcctgtttttttattgtttcgattaaaatctttatcaacagacgttatataattctttgaaagggttttgtcctgtagcttttgaatgtgtactttcatcattattgtgcatgtctttcaacattttttcaaaaataatttctgtactcagtaaaaatgttctctttgaagtttggaagtgagtatcattaacaggcctttcattcacacctatttcctaacacaactctatccgttgaatgatagcaagcaaaccttgtcttcctttgcatgtgggtgcttgtgttttttaccatctgcctttcccactaccagttctctgcctcttattaacaggatgcataacacaaatgacgatttttacaggcagtgaacattattgcttaatatagagaaagggcaacaatctgttagttattcagtagatttcctaagctagccctgttgtctattatgcaatcagtggaaacttttggacattttaatatgtaggtacctgaataaagagcaccgctaatttaccatttggttcgtagatgttcacagtactgggaactcaagtaacttgaaaaacgtgacaggtattgtatttcaaagctagtttacttatcatggcccctgttggccagatgcctcttgcaggattcagccctttgctagtagacttgtcctaaggaactagggtaacctaagatattttttatagttcaacaagattcccccaacatccctccaaagatttacaggagaaaaatcaggtttctgctttttacagtaaagaaagacaaattctttctttcccacagacactaaagaatgacctgattggctatttgaaatgactgcgaattgttgggtcccatgaagtattttatagaaagctctgccaaacaattttttaattatttaattaaaagaatcccctctctgattttttttttttaaaaaaaaaaggtaataagaacttgggacaaaaatttcattataaaaatgcttaagtggcaataccctaaaagaatgtgtctctaatattgtagtaagatacgttttctatccaaaatataatcgattcaccttattaactaacacaatatcagcattataaagtggttgtatgtggctttccttaataaacaatccaatacataaaaacccttgctggtcccagaaatcttttttcccctggagatttttaagcaatacttttttcactactgtcattcagtaattgaactgtgtcagccaaatgaaaacttttataagcttctcagaggacagtgcagtggtactgtctccatttatataaatcgagtagggcagctaactttcagaaggctggcagtgggcaggggtgcaagttacttcattgttgaaccattattgccatctattgggctcatcgtgctattgcattgtgtgagccctgaaagatagtagttaaatcaatttagaactttcgaaccatttagaacaacctcgctgactttttacttgaaaatcttttttatataacggatatttctgggtctgactgaagcccatagctatggaagaatgtaatgcttcatactgatatgaatatttaacctagcagaaatgtccattaattcttcaggggaaaaacaattcatttaaatgagtgtatattggctacatatgaagctgaattatttctgatggagttagatttccaatcatgctgatatttaaggacttacccatgttatcctgccctcttaaaaataatatcagcattttctacgatatgcacttcgttgtgatgacaatacatccatcaaataagcttgcagacaaatcataggataaagttggcccttcacgatttttatgtagtgactttgctgccaaagccccagagttcctgccccagctcctaacttctttgacttctgcaaggtcctctctggccttgggaaaaatgtcaacacaagatcactgagctatgtgctggccacgcattgcatggaagagtcgcggcttgggaaaggagggaaagatgaaggagggatagatagtatatctgttttcggggtcatagagaccctgagagagtgtttgtatatcaaaatagaatacatgtaccatagaaagcaaactgtattaaatgccagcaaactgttttcaatgccacgtgtttaaaaacatatagagaaaaaatattgacacgcattttttaatagaattttgaaattttaagtgctatttattaacaaatccagtttaggaaaaaatctatattcaaaatgtcagtataattttctataacgaataaaatttaaatccttgaaaaaaataattttaaacagcccaacttccaaggaaatctgtaattgattttaggtaaaatatgtgttacaaatgctgtaaagctaaatgttgaaatggtgacatgatgatctgttattaaaatttgacaggagaagctgatacggaaagtgacgacgacgatgatgatgatgactgtaaaaaatcttcaatggatgaggtgggtacttagggcttctggtccctaaggcattccaccaccctgtactctcctgggtctgtctcatggtcactttctgccatctagtggcaaaaagtagatttgtgccttccaattgccagcttcaatttttgaggcaattaaatggcttatgaaatgttccacaatccggagaagatatggcgtttagaaaaatgatcagaactgtgacattcattgcattgttttaattttggaacactagagctacctatttatataaacttaggcatcccgagtaacttgattagctcaaaaatattaattgcacagaacctagaagagaatcagaagcagatcaactggaattttagaattttgtcttaccaaaagtttatactgaaacaatctgggcaacagagagagacctcacgcctttaaaaaaacaagttaaaatgaaagataaaacacatccaggtgcagtggtgtacacctgtagttccagctactagggaggctgaggcaggaggatggcttgagtccaaaaatttgaagctgcagtgagctatgatcacaccactgtgctccagcttagaaaacagagcaagacactgtctctctttaaaaatacgtattttaaagtttatattgaatctgctttcaaatttgttagatatgttctgtctcaacgcttgtagctctacaatttagtaaaaatgaaacaaaaaataagctgctcttacttgatgtccttcctcttagaattattttttaatgtctaaagttttgcttaattatgttccctcactacatttcaatttttgatttccaggaggaaaacagcttaccatgtctggcaaagtatatgttcctgagaatgatttcaattgtgtataatttctgatcagtgattctaaataatttttaaactctcttactaattggatagtccatttgcaaatgaatgtttcccagttaacatttgacccaaatattactaccagaatttttaaaagaaactcatctccatgcattctctcttctaaaaatgtgagacaatattagatcactctacagaggcccattttgtgccaacactgcattattggttttctttttcattaaaaactctatcaaagtaatatgtcatagctaataatagcaaaagcaacatgagattgtagtaccacttgccaggcactgttctaagctccttcacataaattaacttattttttaatcaaaaacccctatatgctgtaggaactgattttatcctaattttacaaatgagtcaagtgaggcacagagcaattaagtaagttgcccaaggttgcccggtttctaactagtggacttgggattcgaaatcaggcaggctggctctagaacgcgagccattaatccctgcactatgctttcctgcttgtctaagacacatcaggagccaagaagggagggagggaagaatgttgatgaaggaaagcagttgtttacccacccctgcccatttccacaaagcaatctttttattattattatcaattttcccttcatttggtggtcacctacctaacaattttcttattgtacagtgaattcttaatttacgaatccgatgagaacacatggacacataaagggacatggggcctacctgcgggtggaggtgggaggagggagaggatcaggaaaaataactaatggatgccaggcttaatacccgggtgacaaaataatctgcacaacaaaccccagtgacataagtttatttatataaaaaaaaaaacctgcacgtgtagccctgaatttaaaataaatgttaaaaaaaattactaaccttagacaacacctatggacaccctgcaatggaagatgagctatagctcagtgcttctcaaactttgatgggcattccaatgaccttagtaaaatgcaggatctgagtctgaggcctgcagaggggctaagatcaggcatttctaaatggaaaggagggggcaggggatagggagtgattatgttggggccatgctgccagccaccattcaacctcccacctcccttcctccctcccttttataaaatgaggtgttgctgttgcctttctcctgtaatgaattttcattttgtaattttcagaaagggagggatgattttctgcatgcttgaatcatgttgtcattttcctgggaaaataactgataatataatgctgactctggaaatgttttcttttttattcctacttccaggggactgctggaagtgaggctatggccacagaagaaatgtctaatctggtgaactatattcagccagtcaagtttgagtcatttgaaatttcaaaaagtaagttttccctggagaaaaacccctcttgcagcatataatgattatattttaaatacggagtaatgggaccaaagaatgttacccttaatagagagatttatgcttttgaagtcttaaatatatgtacattttgactgccttgttactttacacatataataaatatgcatgtattgtaatatataaaaataaccatatgagaaagtattctatggtgttctccaaaaatatttaatagggctacaggccatacatggctatcggaaagacacatgaccagagtacaactaattgggaattgtactttgctttttgttcgcaacacacagtgagatccatctgttacataagtgataatgttgaaataaactatctacctgtttcccagaagggaagcaggcagagacttgatgaaccctgataattagaaatagaaccaatttatctatattccatttgtccatcacatgtatatatttagaagaaaatgcattaacttcacatcactttgtgttttccctttattcaactatacatccatacttgtgcaaagaaaaatatcatctttacccagacaaaagggttcttttatgaaaatgccccttgtatttgcatgaagcgtaagatgctatcagattaagggaatccttgaaacttactagccacttataagggtgtacccttaaaaacagaaatttgcctaaatgtactagcttctaatcaaggatggctttgcagctatatcaaaatccaagcctctaccaaacacgcttgtttatatttgtataatcttacaaaaagtcttcacttagtggtatatgcaacctagatctctacaacaaagaattcaacttccaagagtttatatataatgatttctcaacattgaattcgatgtcctaatttctgatgtttcttacaagttgttttctttgaaacatcctagcgtagttatttttatatcactgtaatttcattggctgcaatgagtttctctaactcattagttaaaagttccaagacaagtagccaagtgtgagaaagagccaatatatttagattcttcagaacctggaaacaacagcaccagctagactcacaaacaagcacttttctccttgtgtttaatatcattttataaccttgaaaaaagaatattcaacatattttaccaagtacctattaatgttgactgaattttaattaatagttatgcttaatttaataagtcatataaaggtagatttatgatggaccaaaataagagaagccaaggtttgccttagagtggattggagaaggtgagaagatggatgacgaagcctggaaatcattaagaagaacgaggttttaatttcgaaagagaggtcaaagagggaaaatatctcaaagataactcagtttaaaaaaattcagagctatataaccaccctgtgctatacttatctaaaatactgctcataattgttggtttttagtggggatgagggtagagaaagtgattctcggtctttctaaactaagataactttgttttctttctctcactctaattggaggcttgaatttcactttcaaaatgtttctcttgtgtttagcacatcctcctctctggcctctattttattttatactttattagtccattctcgtgctgctatgaagaaatatccgagactgggtaatttgtaaagaaaagaggtttagttgactcacagttctgcatggctggggagacctcaggaaacaacaatcatgaggcggaaggcacctcttcacagggcagcaggagagagaatgagtacaggcaagggaaatgccagatgcttataaaaccatcagctctcatgagactaatgcattatcatgagaacaacacaggggaaccacgcccataattcaattacccccacttggtaacccccccttgacactgtgggtattacaattcaaggagattttgtgtggggacacacccaagccatatcatgtatctaatatgaaaatgaagccatgagactggaaaatttccaaggacctttctgttttgaaagaccataattctgtcatattagttatttgaaccaaaaaagtatatacaaactgataaggtggcaatgtgggtatgaaagagatagtcagcacctagcacaaacattcccatggtctcttttgttaaaccccatattggccctaagaaaaaaatctgggtgaatttagaacaaaagattcccacggggtccctgctcttttgacaaatttttttattgccacactatactcatctagaattcattcatgtccctaaattacaaaagcataagtagctctgacccaagtagcaaacgttagaaaagacaactaacaagactcaacttttgttacaggtaaatagtgcactagaaaaaaaaattaaatattgaaattacattgaggattatttgccctcaacttcactgaatatttacccatttcttttataatgttataatttataacaatgaattgtatttctcaccttccccttttttgttttgttgttgcttaactcagaaagaaataaaagttttgaaatgtcttccttcgtggaaaccaaaggacttgaacaactcaccaagtctccagtggaatttgtagagtatccttgatttgacgaatgactgcagaatgaacacagctgaagtcttgtgctatttgttcatttggttttttaataaggagaaagatgcataaaatggcttaagtatatagcctggggcggataaatagtttcaggtatcatatacaatgctgggcggggtagtctggcctatagaacaaaaaactggtcttggaataaaggaagcgtagatttcaaggttgccttcacaccaccaagctctgtgtctttaggcaatttgcttaatcctgactttccttgtctataaagcagaaataattatactagctttatggtttgctctttggattaggtacaacatatgtaacatgagtgtgcatactttacacatatataagatatatgtaaagaaatatatacctgacttggcatctcacatacttatatgtactatatgtccaaatagtagggatgatgatgatgacattgtaaatataaatatacattactaagactggatttattgatattactgacaacaaaaatttttgctactatccatgaactaaaataaagtgaaacaggctattaaatttctttcataaaattaacagtaaatatcacaaagtgctcaatttcatgtaataagtcccagaataaagttaacctttaaaattcatcagtggaagaagaaacaaatgttgactccataaataaagtcctgctagaaaattatcatcgttagtattccttattgactgtgtgatagatcttgtcttatctcatttaatcctcacaatagtcctatgacatagaaattgttaaatctattttatagatgaggagactgagtcacagaaagacaaaataatttgtccaaggttattcagctagcaagtttgagagttgaggttcaatttcattttgcctagctcagaaccctaaccaaccttcacctaacttggtgataggaactagtcagtcatgttttaaagacatagcatggtccaacaactacaagattcttaggatagaaaactgataatgataggaaccaaaatattaagcaagatcagaaacttccatggtacattgaccttgctatcaattataaagagtaccacagtcttggcaaatagcattcccagagaaaattaataaaaattagcagacagcatttcaaaaatagctatacagtgcatattatctacttctgccaaacacaatatcattctttcaaatgatttaacacattccagcctccttgtgtgtccttagtcattaagtctgtccttaatactctccacaaaatcacattgactttggctcagccactttttgctaccccattgacttttacccacggggctctgcaaaggtgatgctatgcctatgtgataagagcatacttattctgtttgtttagaaagctttttgcatatttgatattactgacaacaaaaatttttgctattatgcatgaagtgaaataaaatgaaacagcctatttaatttctttcataaaattaacactaaatatcccaaagtagcccaacgagatcatcaatatttacttcattttccaaatggagaaagatggaaggtagcttcttagttactattattgactaaatatttttataattgtattcactacttaacatgatggtccagatataacaaaatgcagcttagcaggatatatccaaaaggaacacgtgtggattcatccaactatatgcctcagctcttctggaatgcaggttgtcagatggtggcacttaatttccagacaatgggtaagtacatgcttgttcccattctgctatgaactcacattgccaagtgtccaaaaaccattcttacataattgggggagagaaaattgccagacttcactgaaaaaataaataaaagcaaatttcaatgaagggaatatcaatgcataaaaaaagtgaattttgaaaatcgagacatgttcttcaattattctgtaaatggatctttatttctacaggctttgcattatttttcaaacaaaaatttttatgctttttaagataatacatatttattttgaaaataatggaaaattcagtaagtattttaaaaacaaactgccaggaatgctaccaactcagagattccacagtgttgacttttagctttgtaatctatgtcttttttgtctacatataaatgctttttttatgtaactactcatttaaaataaatacatatatattcatatatacatatataaacacacactcacctaagtgccatagagagacatgaatttcaatagctgcatactaagcatatttcacaattcgctaaaaacttatttctattccctaaatttcttttggaaaatattttaaaaacagaattactaacgttaaaagatgtgaacagtttaagtacctttatgaatattgccaaattgtctgtaaaaaatgttgtgctacattactccgctgtcagcaatgtttaatatgacgtggcctctcatttgcgatcttggttaagtattatcgttaaataataataataattaaaccagacaaaaatgtgttatttcactgttattttaaattcatttcttgaatcattattaaggttgaactttttaaaatatgtttcttggtttttgtatttctgcttttatgaattacatattcaggactatcgtcaattttcttgttgatttataacagcactttttatttaaagggtatattgtcttttgtgaaacagagacaattcagtggatcaggtcaggctgattaatgtttaattaaaagttcttggtttacttgtatgattacagcctcctcaccccaggatgaaagccttgtgctcccatttttctcatggtttcttttttatttaaccttttcaaccatcaaaatttaattttggtccatagtctcagtgagatcaatccttttttttcatcctaaacaatcatcccactgaactggaattacacgttaatagatacagcctttttcattgttgttgttaattcagacccattttttcactttgtatcttttccattaataaatttgtctgccttcctggatgcaataactcactgtttttactgtattttataatatggattaatacctggaagtggtgattctcctttactactattaattttcaattccttttttgccattgccagtggaattcttatttcaaataaacttaatttaactgtattatgttttccttgactactaaaaaaaaactatttttaaaatcatattaactttataaatttatctgacaaaaactgacacctttttaatttttagtttttctgtcacaggaaaaatgcttttctctttactttaaaattttttgtattaagtcctcagcaaaatcacttgtcttcattagaggtctagttttcttagactgaatctttctttttatttatattatatttttaacagattgtttctggatatttatatttgtatatttgtttattttataaatgattgtattttacaaatgatcatctttctaaactcttataatagcctattttttgcagtacattccgttggaatttttagacacacaaagacagtaatttaatcatatctcatttctccacctgccttatttattgctttggccttaccgttctcaggtattaaatgagggttccgagtgggcatctttcttttttattcagtaggaagttcaacattatgccttttattaagtatctatcaagctctaagccacgattaagagtaatttgctagatatttatggctttttaaaatcaattaatttatttttattgatacataatagctgtacaaacgtttgcagtacgtatgataatttaatacatttatataatcaaatcagagtaattgggatatccatcacctgaaatatttatctttacattagaaacaatcgaattgctgtcttctagctatttttaaatgtacaaactattaatgttaactatagtcacctccttgtctatcaaacaccaggtcttaacgtcttctatctaagtgaagagtgggcatctttctcttcatcctgatcctaatataagtttcactgttgtgatatcatcaagtcagatattggctgtgactttgagtcagatattctttaacatactaaaggacacgggtcctatttgactaatgttttagaagttggtattgaatgttattaaatgtctcttggacatccattgggatgatcatatgttcatttttcagacataaatgtgataagttatcttaatagatctcatttcctaatatataattatccttttgttcccaaaataggctctacttatttgttgtgtattatttttagaacatatgacttgctaatgtaatttttaggcttttgaagctaattttttcaagtgtcataaattcattattgttttgaaattttgtccaattttgacatcatagttatgtttataaaataatagtttaataagagaaaatttcactgatttttttctgctctaaaaatgatttgttaaatgaaactttagaataattctgccatcacctctttattatgcacatagagatgagtcatgacacagataatctggaactgttgacaacttcccagattctttacaactttaatatgtattctttcactctatcagttgcaatatgtgtgaacgttcatctgatgcactgagtctgaggaaaattttgaccagtaacctttgtccactggaaaagagtctatgtagaattagatgttaattgtaagtaatcacagaagtgcaaattataaaaaagaaattttttgtacaaattaaaaagcaggaaaaggaataatagaatcctcttttaatgaggcatggagaagtccattctcaaaaacatggcttagtagtataagctggtttaagctttctgaagggcattttagcaaggcatcaaagaaaaattttccaatgaggacatcatttgtcccaggaattcctctcataagaaaatcactgatcatggcttcaaagatttcaccacaatgatgtttatcaaaacattataagggtgaaaaattagaaaaaacataaatgtgcccaaaaggggaatggttaaatacattatattctaatatattgtattagatattatattctaatatattgtattagatattatattctaatatattgtattagatagtgtatcatattagaaattagatattagaattagaaattagaaattagatattagatattgtatcataatattctaatatatgctttatatattagaatgatatatttaatatatcattctaatatatctaatatatattagaatgatatatttaatacattagatattagatatattagaataatataaataatatatctaatatatgttagatattagatattttgtatatactatatttatatataattatatattatatattagatatattatattatattaatatttaacatatattatacaaatatattattctaatatatttaatcaaaggaatttgagacagctgttataattaaggcagatacatattaaatgaaatcaatatactgtatgtcaacaatatatttgaagtggaaaagcagactgcacacccaccagttggcagtgattatttctggacttggggattagaggtaatttttttcttatctgtgtttcctgcatttctacaatgactctcttccaagggaatacagtcacaaaagtggactgggatcaactttactttacaatcttactttcttaccccaagtatagataaactcacaataaggcttgtgtttttgatactcagacctggctatgcaaataaatatggggatgtatgaatacaacgggaagagtggctacagattgaagccagagttcatgaggaggcctgacaagcattttgatccatttactgaaggcatcgtagatgggatagtggcaaacactttgtctgttaaggtaggtataccccatcacaaaattgttcctaacaatagtgttgaatttatctacattgcataaagaagtggcttagtcattaaaaatttagtaactaggaaagattctactttcttcctacattttttttctctaaagatcaaatacacattaaaagttttcgtaaggggtccgtgtgttctcattgttcaattcccatctatgaatgcacacgggaaggggaacatcacactctggggactgttgtggggtggggggagcggggagggatagcattaggagatacacctaatgctaaatgacgagttaatgggtgcagcacaccagcatggcacatgtatacatatgtaactaacctgcacattgtgcgcatgtaccctaaaacttaaagtataataataataataataataataataataataataataataaaagttttggtagggtcgggcgcagtgactcacgcctgtaatcccagcactttgggaggccgaggcaggtggatcacgaggtcaggagatcgagaccatcctggctaacacggtgaaaccccgtctctactaaaaaatacaaaaaaaaacaattagccgggcgtggtggcgggcgcctgtagtgccagctactcaagaggctgagacaggagaatggcgtgaacctgggaggtggagcttgcagagagcccagatcgcgccactgcactccagcctgggcgacagagcgagagagcgagactctgtctcaaaaaaaaaaaaaaaaaaaaaaaaagttttcataggccacatgaataagataaagcgactgaactttattcttaatgataaaaatctgactctaaatcaataaaatgagttggagagactcatcataagcaaacctcttttttggtgtaactaacctactatgaaatttacatgataattagtggcccatattggagagattttccggtctttttttccccgtttggttcttagaaaattagagacagaacattccctcaataaattatcaaatgttaaacaaaagctttcaaattactttaaatggtttttgaaaatcttccagagtattcagagattttaaaacacatattaatgatcattaaataaaagagttgctttattaaatatatatgtatatatacatgtatgtcataaatatataaaaatcatagatatatacacatacatatgtatatctgaccctaaacaattctaaatttttttagtctttgaaattgattttatatcagatataattttttagctaccagaaaatatttttaatactatgaaaggaaaatcaattttttagaatacattttacatggattcttcatcgttaaagcttttcaaaaatattgtctgttttctgtttaactgaataactatagaactaagaaatttttttactggacataaatgtaattttttgattaaccttaaacaaaggcatttgaaaaactatgtaaaaagctttctataacagcttcactaatttctttctaccctaagcagttgagcacatttttaccttaaaactttcgtcactttatatcaagggtttaaagaataaaatttcagtgaagtgtctcataattatatcttttgaaattacttcaagccacatgtataaagagttcaagttggcagaattagagtttattttaggaaagtattttcagaaaaggctgtttaattcctgtcaggtgtgataaagataaactcataagctccatgtactgatagaatgctacttttagaatccttgtcaattgttgttatagttcggttgaattaataatatttttgctttgcttgcagattcgtcttgttttgaatgtatttgtttgcttatttctttttttgtcttgaaaatcctactgtgacagtaagcaattataaaacaatgacacagaggcaggaaagtacattgagttgtgaaggggaaatagttgatccccagacaagtgtaacctgctgctcctgtccagaatggagacgctgctccagagctgtcagtctcccctgaatggacagttctcactgcagtagagtcctacctttgacattatagctagagccaagatacagatcataactttccaattatgcctttgttttcatcttctggcatagattttataatgccagaatggacttgtgagctcacatgatgttctaccgtcctatgttactgacgagagcattgtggttttggtgtcatgaatttagtttaggactctgctttggtcaaacatcttaaacatacaacatcttctgtgcatctgaattccaagtaggacttgcataacttagaagtttcaaacatgttttgaaatgcttgcttatttcatagacatagttctcacatagaacctcaagttaaacaaagagattgttgctagcaggtcccatgcactcaagccaaatagaacatacaggggaaatgagttgtcccagggcaaattcagagagccttcctgatgactttctctctgaattactcagaatttctgacaacatcagcatatagctgactttgactttactcagcctttgatagctattctcatgccaccattttgtctgatttctggcccagccataattctgtcccctttcacaatcttgagctcagattgtgagcccagccataatgctgtccccttttcacaatctggagctcagaaagttcttgaccagcaggcaattttcttgtaaccacataacccagattcaccaggtttgctctgtcagcacttgcttcctgctttccccttcctggtatacagcagaagcacatcttgtttgcctccgctaacctttatgacagctggtggatagttcagattttgaaaatttgcatagaaacagaggcagacatggaagacatttataaatacgtaatattaaaaatctcttttaagtctataatatccattagttctgtagctagacaaagatggtgacaccttgtgagattaggggtaatgataaacttatcttgatggtttaaagtgaatacttgttcatttattcctcctacaatactgtgtcttattaattgactacttctaacctcaccattttcaatatccttctaccaacctgtgtttgtccattttcacactgctataaagaactacctgaaactgagcaatttataaagaaaagaggtttaattgactcacagttctgcatggctgaggaggcctcatgaaacttacaattatggtggaaagtgaaggggaagcaaagcacacctcacatgaagggagaagagagagagtgaggggggaactgccacacacttattaaaccatcagatcttgtgagaactcactatcatgagaacagcatgagagaaaccactcccataatccaatcaccctccccaaatatgtgaggattacaattcaacatgagatttgggtgaggacatagaaccaaaccatatcataacccattaagtgaaagggaaatcatatttctactcttgcttctattccattttgcttataattcaacatttgctgaagagcatttgtggctctttaaagtattctcttatgtctttgttatttgcatatcaaaattccttatggattgattgatttattgattttctagattatttcaggtcagtttctttctgataagaaagttgggacttacgtggaagtagatatgtttggtttgcctgtggatacaaggaggaaggcatttaagaccaaaacatcccaaggaaatgctgtgaatcctgtctgggaagaagaacctattgtgttcaaaaaggttggtcacatgttcttgatatgagttataactgcatttttcaggtgttttacactgagaaaataatgaaatggtgaattatttgttatttaatttgaaaatttacacacttataaagcaattaccttttgaaagccattctgaaaacccttcaagaattctgttaatcactggtttggattttcagaattgtattgtaaatcaattcattctagtatgcctcaaatggacggccataaaaacatatacatttaactcatatcatctgatagtacaaatgataaatgatacattttaattataactcaaagaagtagagtggaagtagggaataatatagtggctgagataaagaaaattcatatttcctttaaaaggaatattatttaaattccccaaaatctctagcctctgagagctggtcattcaatcttgtctgggttctatctaataaagttgaaacctttcacactcaactgggcccttctctttcttcaccaaaaagcaaatcttcacacatgcttatcatgtaaaggaagaaagtaggttcagtgggaagtagactttttagcctactctttgcttttttctggccaaaatatctacaaatccagtcttctgcaaagagaatagctatgcggaaactctctgtgctctgggatttttccatatgttaactgagtttaataataatgcttactatactgtttacttcttacagttattatgaatattccataagtaaatacattgaccacacttaagaaatatctagcacaatgaaaatattcaataaatgtgagtttgctgtttttgtaaacaatacatttttaaagagatagtcgacttcatgttcttgacataagatataactgcatattttagatgtttcacactgaggaaagaaatgagtagttgctctttgcttactgtgggaatttacaaatttataaagcaattgtattttgaaagctgtcctgaaagttattcttgtttttcagtggtggttgttttcactttttttgctttcactttgaagatgcaaaagtcatttgctttgaaaacataaacgacttccacaatggttgaactagtttacagtcccaccaacagtgtaaaagtgttcctatttctccacatcctctccagcacctgttgtttcctgactttttaatgattgccattctaactggtgtgagatggtatctcattgtggttttgatttgcatttctctgatggccagtgatggtgagcattttttcttagtgggtgcagcgtaccagcatggcacatgtatgcatatgtaactaacctgcacattgtgcacatgtacccaaaaacttaaaagtataataataataataaaaattaaaacacaaattaaaaaaaaagaaaacataaatgaaatattcacatggtgataaaaccactaaactctttttgttgaaagatagaacttttgtcatttccacattgagaatgttcatgtaaaaataaaacagcctatttttttaacaaatgcctcattaaggcaaggtgataaaacatagatgaagccctatctctggcaacccatgtcttctcctctgaaaatgaaatttatagggcaacatctcaactttttgtctaaagtagctaagtagaaacttctagttggatctgaaaagctggtcctggccaggcgcagtggctcatgcctctaatccgagcactttgggaggccaaggtggtggatcacctgaggtcgggagttcgagaccagcctgaccaatatggtgaaatgctgtctctactaaaaaagtacaaaaattagtcaggtgtgggggcatgcacctgtagtcccagctacttggaaggctgagacaggagaatggcttgaacccagaggcggaggttgcagtgagccaagatcacgccactgcacttcagcctgggtgacacagcaagactctatctcaaaaaaagaaagagaaaagaaaagctagtcctgattgaataatacctttctaattatttcttggaattgttcattcttataaccaggtgtgtccttaatgtcctttgtaggtggttcttcctactctggcctgtttgagaatagcagtttatgaagaaggaggtaaattcattggccaccgtatcttgccagtgcaagccattcggccaggtatgggtagtgtgctgagaaaccttttatcaaagttgcaaagaaaatcattactgcttaaaatattactagaaaatgacttaagaaactattttctgctttgtaattttgttatgtaacaagggcgatgagatttagttacatgtttttgtgacatgttgtagtattaatgttagtcaactctttcaacaataattatgtgtaacaaacaatctgaaaacttatatgcaaatatttatcttcgtgctcataggtctgtgggttggccgggtttggctaatctagcctgggctccgcagcatagctgtgcttcaggttctgggttgggtctatgtctgtcccacatgcgctcactctggggtccaggctgaagtggcagttgcttctacaatatggacttctcttggcagaacactggaatgtctaactctgcatgtgcattttaagcctctacctacaccaaattactaatatactgttgactaaagcagagcttaagcacaagtcaagaaatcacgtcaaggctgggcatggtggctcacgcctataatctcagcactttgggaggctgaggcaggaggatctcttgaggccagaagtttgaaaccagcctgagcaacagaatgagaccctgtctctacaaaaaataataataacaattttttaaaaaaagaagtcatgtcaagtataattctgttatgggggcaagtttggatcaataattcagtctatgacatgtgatttggaattatcttttgtgggaaaaatcatacggttggaaaggaaaaaatcacattgaatgttttcttgtctgatgagaaaaataatgccttatcattcataaatgttattaaaatgaaaaaagtgatttgtttttcatctaaagtaacctgaaatacatgctttcatcacatagatgcgcataattataactaacattggaaaggaaatatgtgctacacagcattattctcaccttccaggctatcactatatctgtctaaggaatgaaaggaaccagcctctgacgctgcctgctgtctttgtctacatagaagtgaaagactatgtgccagacacatatgcaggtaaacaacttaactcaaataccactttactcaaaggggtatttctgtctgagtcaccatatatttttgggttagtgaaaggaaaactgaaccaaacaaagcaggagattctggcttcagaatcacccctactttcgtatgtatgtttagaggtaaattgcttgagccattgtgaatacattttaatttaacgtattttaattaaaatcacaacacctcagttttttgaatatttattcccttttagtcttattctcatgggcccagcacttaccaactcatgttatccattacaacaaatgtctaggtctgtacactgaatttgtcttccaccaattttagaatgctgattcttttcatgggtgacatcctaaatttaaggaattaaccaagaatcataagtgtaaatgcttatagtgccaagtagcttgggtgtaagacactggggagtagtggagaccatggtaagcttggggctgtccatccaaagctggcagccataactcattccagctaggcactgcccttcaaataactatattggcaaatcattgggttatcccaacagtccggaaagcaggctttttatgtaaaatgtctccatttatgaaacgtcatttgggccaaataggacaattgggtgggccattgccggaatggatgggaccttcaaaaagaaactaaggaatcaagaatattcagggatcctgagttgaagcctgtccagtttgactctcagaactaaactcttaatttctctcttcctgaagtttcaacagagtcctaacccttgtccatgttcaaagtgttggatagaggagtagatagttatatgggtagacagaagaatggaagatggataatgactgggtggatggatggatggatggatgggtgggtagatgggtgatgaatgaatgcatggactgatggtcagatagatgagtaagtagatgaatgatggataatcaatacttccaggacctttgatctaaaatatctcttccctatttagatgtcatcgaagctttatcaaacccaatccgatatgtgaacctgatggaacagagagctaagcaattggctgctttgacactggaagatgaagaagaagtaaagaaagaggtgagagggtgttttaattttacatatagcattaagcatgatcaccacacctacttgttggctttgcctaagtaatatcacataccttgggagaaggaatagcacattggaacaacactttcatgcagtttagcatcatgtcacagaacatctagatgattgacttaaatttttcacatttcattttcttttggcattctgtggataccacgagcatcttatcttgtgataaaattaaactgcacacatcttgctatttcagatgaaactttctacatgattccatgctaattaaaggtgatgaacgcatttaaaaaggaagataatcatcaaatcatttagggtttccctttatctttaatgtagcatgcaggattttcaaagtgcttttctgatttttatagtacataaaatatttaacacaatacctggaaaatagtatgagtcataaagagtctactgttattattagatggtatatttatgtattataatgtgtgtcctgcaaataattgatatattattccaaattagatgtcacaatgcaaagcataattaaggaagggtctaaaaatagtagaaatgaagtttaaatttataaagcttctatgtagactggcagtctttttgcttttaaaaaaagtgaattataacttgattattaagggtgacactaatattaaaaatagtgataaaaatttgctattttcatattttattcagaggaaaaactcgagaaaaaagatagaaaatggagaactgtcagtattgggggaaaaaaccttgaaaattgttttaataagtataactaatagttatccattaaatagtccatttaaatagtctattaaagttgacattgttaagtaatgtttttcttatttcgaaagcatcctcgatttattatagaaaatttaaaacgtaaaaatgacaaaagaaaacaacaaagaaatcaactgtaattcaaacatcccatccgctcagagatagccacattaaatgtggggtgtatacatatctagtctttttatgcacaattgttactctttcataaaatgggataatattcacagtctgtgttttaagtgaaaataaaagtattaagtatctcattgcccatgtcattaaatattcttctatgacatgacttttaataactcatagccttctatcatatagctccaccataatttaattactaagtccccaattattggatatttgcaatgctgcactattttattttatttgtgggtacatagtaggtatatatgttacggggtgcatttgatattctgatacagacatactgatttttgtacactgatttttaatcctgcaactttactgaatgttaatcagttctaatagttagttggtggagtcattaggtttttccaaatacaagatcatgttatctgcaaacaggaataatttgactttttccagtttggatgccctttattttattttcttgtccagttgctctagcttggatttccagtagtatgttgaataacagtggtgaaagtgagcatccttgtcttattccagatctcagaggaaaggctttcagtttttcttcattcagtttgatactagctgttgaactgttatatatggctttcattgtgttgatgtatgttacttctatacccaggtggggtttttttgagggtttttatcagaagggatgttgaattttatcaaatgctttttcaacatcaattgaaatgatcatatgggtttttttttccttcattctgttgatatgatgtatcacattgattgatttgcatatgttgaaccatccttgcatctctgggataaatcccacttgggagaatcatagctcagtaccttgtttgtggtgggcaacttctgtgttgcaattcatgctccagagcaccctgtgggatcagtctgagactggagtttgcctgaggccacatttcgacttatcttcttccctgtcttaacctgcttgcctcacctccctgcagttttttcctgagaccattctctcagttactcatgtgctcaacatgtgctcaagaatcctcatgtccacttctgcttctagggaaaccagcaatgctaagtagcttgctgttttataaataaatacaagaatgagttccctatctgaattaattcttaatcaaaattaagaatttaaatatttgaaaatagttacatctctcattctgatatttcttcagttataatagtgctttttctcttttccatggcctttaaaagattaagaaagactgttctatgagtttctcattttactcatatgaacatcagtatgaaattaatttctctttggaaatccaccaaaggttctcaaattcttttctctttttcctgctttacttaatagcatatttaataaactataattaaaggtaaagataatttacatagatacaaataaatcactattaatatcattcttctctaaatagaaaacaggacctattaggtacaatgcatattacctgagtggcaaagttatctgaataccaaacccctatgacacacctatatgacaaaccctcatgtgtacccctgaacctaaaataaaagctaaaaaaaaaagaaaacagaaatgtcctttttcaactggatgaattttattctgtaagaaatagaggttaaacaaaagcattttcaagtgaaattacatgtattttcagtatttagaggaaatactttttagattatcaactttaacccattagttagccattgtctctaaggaataagcacttgcttcaagagaacatttcaacactaccatatttcagcctactttttctattgtctgactcacatgttcttgtgagtgagctgaaatttatctaaaattgtttcaaatagctgggtgtgctgacacatgcctgtaatcccagctactcgggagcctgaggcaggggaattgcttgagtccaggagacagaggctgcaattaactatgaatgcactactataccctagcctgggccacagagaccatgtctcttaaaaataaaataaataaaataaaataaaataaaataaaataaaataaaataaaaaaataaaattgtttgtaaatatttcctgattcagtgtatggccccgattcgatatagcaattgagctaaaggtctcataatggaacattttactaatggtgcttcagagatcatttctgtaatgactaggggaaaatgtcactctaaagaatgagagacataaggcctttgaggttgtagggctcttttcacaaattgatgtcctttggaaaccttatctttgcaccatcaaaaagttattttaggaggataaaatgtacaaaaatacagaagtagagttttaggtcaatcttatttttgtttttcttttcttaaaggtgatcagaaagcatttttagaaatgtataatattgtttaaatttggacagtatttggacatttttcagttttagaaaaaattttagaggcatggaatcacatggagtctatattggtctaatagagaaaatatgattttttttcctttgacatgtctaaactcttaactggcctcatttttacaactcaaggaaaaaaaatcatttgcccttaacatgtaatgctaggaaagaaaagtcatttcacactttgagcatcagtgtgtcttttttcttgtcttggaataatgtaagtttgtttgaatgatgccactgaaaataagtaactgtggttttctctaaagaaaattctatctaggacatggcaggcactgggacactgttttagcagcaaagacttttttagtatcatcattttaatgtgatgcttgtaaaggtcatttctatttgaacattaaaaatgtcattggactgcaaaatattaccagatgtttaatagtcctgtaaattatctttttagagtaatttataaaccaaatagataagaaagtggaatttcccccatgatttgaacaatagatatttatttcagataaggcaaaaatacattattcagattatattatacatatattatgtgtataatatatgtataatatttaggttatgtattatctgaataatggttggaagttaaggaataataaagattcgttattggatttattttgtctttgtaaattcagagtggtagattagtcaagttgtagagtaagtgcctaactgaatcctaacaaagtataacattcacagttaattcctttaaataaaaagtcacgtagaaaaatataaaaacatagtaaactaaagaaataaaattttaaaaccctctaattctgcaaatactggtaacatttttaatgtatatccttctagcatgtttcctatgtacatttttgtttgtttgttttttgagacagagtctcgctctgtcgtccaggctggagtgcagtggcatgatctcggctcactgcagcctcggcctcccgggttcaagcgattctcctgcctcagccacccaagtagccgggactacaggcacccaccaccatacctggctaatttttgtctttttagtagagacggggtttcaccatgttggctaggctcttctcaaactcctgacctcaggtgatccacctgccttggccttccaaagtgctgggattacaggtatgagccactgtgtctggtctctgtgcacattttttaaaataattttttaaatgttttacagaccaaataatgtaattacagagatgcctagtgaaatatcataacactttttttctatttttaaaatacctataaaaggaaaaagtaaatatccaatacatttattaggaaatattatgtgataatgtcataaatgcaatatttgaatatgacttttttaatgttagagaagtaaagaaaaaaataatgagcatttactgagtacttactgtatatctgacactatgttgagccctttattttatttttcttttctcaagacagggtctcaatatgttgcccaagctggtcttcaactcccagctcaagcaatcctcccacttctgcctcccaaagcactgagattacaggggtggttcaccatgcctggccatgaagcttttactgtattcactcacttaagtcttaaaacctccggatgtcctaattaccattatttccatttaacaaatgaagaaactaaggcactgaggagttaaattgcttgccctgtgccacacaattagtaaagaaaggagttaggatgaaaacccaggcaatctggttctgcaactcatgttccacatcagcacttctgcatgttaagtgtgaagaccagggcatcatgataaattgctgatcctggttcactggatctggggtagggcctgggactcagcatctctaataagcccccaagtgatgggatactgctggtccttggagcacagtttaacaagcatctccaccacacacacgcactacctctgtaacaaagctgtaattttctggtaacctttagcaaggatgggcccttcattcatctttctgacctccatagcaggttacctgaatgagtgagcacaggatataagacctttaccttaaacagtaacatcttttgattgaatttttagttgaatgtcaagaacttcccccctttaatcactggatgttgtcagaacttattcttcagaaagttaggtttatctttgtgggttctatttgattgatttgtgcattggctggccaaaatacatatccctcaacttggaagttacgaaagctgtattcatttgccaagcattcatttccatacttgggaaagttgtcctctaagacagagtacctgaaactacaaatcttacccagccctcaaggccaaaattgttcacaagaattcccaacatcgtctgtttcatcctgcaagtggaagtgtgtgagtggtcttcgtgtaatattgatgttgaaaaggaaaagttgtttggtaatactaaaagtttatttattccaaagggcctactttttgtattgtctgactcacatgttcttgtgagtgagctgaaattcatcaaaaattgtttgcaaatattagctgggtgtgctaacacatgcctgtagtcccagcttctcgggagcctgaggcaggagaatcgcctgagtctagaaggcagaggctgcaatgaactgtgaatgcactactgcaccctagcctgggcaacagagaccatgtctcttaaaaataaataaaataaaataaaataattggtaaatatttcctaattcagtgtatggccccaatttgattattttaataatgatatgaattccaccaataaaataatgtgacatcaaaaaaatccaaggtagtgcttttataaggttacaatgttttgcccaaggccttggataccatttaattattcaaaacagaaacttgatatttcattcacaatataagaacttgacactaaaatcaaagatgaggtttacagcttattttggattctctttaaataaaattcttcctccttcaaatcttcctcctcaaataataaatttgcaagatattaatttatagaaacaatagtttatcaaaatccctgaactttaaagcatccaatacagtaaaaagaaaaggttttcctttaaatagtgatgctatctctttcatttctatactgtacagatttggcattcacaatgcactttcattggatgccttggataaaactgggtcctaactaggaaaaccatagtaatccccatttttagagaagggaacaattgctcattatggtagagtgatttggtgcctaatatcaacggccaatgagttgaagaactagggtctttttaaatatgtatcaagaaaagaccattcattcacttgaattgaaactggtcaatgattggttcaattcagctgcttttacgaatatcctccataaaaatttctaaaatttcaatggattctaatgaggggctttgggttcatctgcctaaaatagggatgagtacaataacttcaatatccatgtcatgtccaattataaaatcatggctcccaattaatgatgaagtttttcactttgctttagagcagggcttctcaagttttaatgtgcatacaggtgcaggaaatggggaggtgtgggtcaaatgatacaaagcaggaaatgtgtaggatgaacaagtaaaaaaatctaatgtacagcgtgaggactataattaacaatcatgtatcatagtcagaattttttctaaatgagtagattatagctgttcttgccacagggggacaaagcgggtaactatgtgagatgatggatatgtctatttgttcccttatagtaaccattttactgtacataggtatcttataacatcatgttgtatgccttgaatttacacaataaaatttatttttttcaacgtgcatacagatcacttgagaatcttgttacaatgcagattcagattcagtaggtctggcacagatcacaaaacaccgcatattcaacaagcttccaggtgatgcttatggcccatggaccatatttggattagcagggctctcaaactttagcatgtaccagaatcacccagatggcttcctaaaacacagatcgatgggtgtcgtagccaaagtttctgattcagtaggtctggggcggactcaagaatttgcatctctaacaatctgcagtgaagctgatgctggtctggggaccacacattaaaaaccgctgctttgaagccctgcatctttctttcgcaagagtgtggctctccccagatgaaacccattaattccatccactctaaaatgacagcttaatcacagaaacctgggaagggctccaggagacacttttcctgggaattatccagaatttgtcccgcaagtgattgaccatagtccgtaccaaacgatttgacttaattaatctcaaagatatatttccacaaaattaacattaagagttgttggtctactttcctttaaaaagagaaatccatgatttctacctagcagccaagagttcattccttctgaattctttgtaaactgtatcaaaacacttctaataaattcaagttggtaggaacttttttatatacatatattaaagtttgtatatgtaacacatataaaagggtcagcagagctatgttcttttaccctttgatagcctgctgagtaacctgctgttattatgcattaaatacaaacttgttacagacagcagaaagcagcatcttcactcttttcattcattgatttattcattcattcaaatttgttttattttagcataacatttaggtagttctttactttcaggactttgccattaataatagagctatttattatgtactaacaggaaactaaatatgaattatgcattcattcaatattttttttttaaaaaaacccaactatgtgtcagtcactctgatggccattatatatgtaatgctgaggaaaatcagatgctctcatagcccttacaacttggaggaagagagtgacattataaaatttatacatctatgtgtaaaattgcagctgctactaatgttcaacaaaatgataccatgtgaatgctgttgactcatgtgagtgcttatatgatgacacacagccatgctgtgtcaagattcacttgaacccatgctccagttaccgctggaagaacttgctggacattaactgtgcaaaacaccaaaagtactttacttggtgttaatgaagaagctcaaaaaactgaagtcaacagatgaatttatccagctcattaaagctgtctcttgcttctaactcaccctggtagactcttcaaaattaggagttttgacatatttcattatgaaaaattctaagctaacattgaaagagctgtacaaggaacacctatatatcagccacccggattccataattaaaattttgatgctttcacttgatcacatataaatccctctatccatttatctatccatcttggttcaataggatgcattttaaagtaggttgcaaacatcagtatacttcactcctaaacgtttgggagtgcatacagcaggacaaagtttgttaaagtgattctgaatttcttagaaatatgaggcagatacattatctaatttcattcaactaatagaaatttaaggtacaaattgtgctcatgtttgaagaagctcctccttaagggaaaggctggctctaacaaagctactttctgacaatatttgtcctgagtagggtggatttctgcatgatgaaattatgagactcacccgtaatacgctggaaaaactgatggccttacctcttacccatgtggtgcccatccaaagcaagatgctgtcataaggtaaaaagaactgcactcttttttttttttttttttttgagacggagtcttgctcagttgcccaggctggagtgcagaggcgcgatctcggctcactgcaagctccgcctcccgggttcacgccattctcctgggtcagcctcctgagtagctgggactacaggcgcccaccaccaagcccggctaatttttttttttttttgtagttttagtagagacgggatttcaccatgttagccaggatggtctcgatctcctgacctcgggatccacccgcctcggcctcccaaagtgctgggattacaggcatgagccaccgcgcccggccggaactgcactcttcagatgactcagacaaggaaagcatgatccaacacctctaatagcccagtaatacatatgatatttgaaaggcccttcacttaccatgttaaccattcagttaaatcctccaaatcctaattctctgctgctcaaccatcagatccaaactttcaatgcccaggacggaaatcttttcaaccagcacatcaaatggcttttcctccttctatagaacttataaaaatgatcttttcagttaccattttactggtccatctgtattctattttcagtgcacttctgttcattttggaattaggaagcgtacaaattctttttatatttaattttaacattcaagttaggcatattttgaagaaaaagatattgcaatgattgcatttgtccactagagggcaggaacttacttctgtggttcattctgcactttttttttcactacccacctaagaaaaatctagtcaatgcgactgaagtactaccaccttctgaatcttctttccttgataattgcttaattggaatttaaatctttgaatcaaattaagaaactagacattcctagtttctgtttctatcacaatttccagtaccagatttttattcactcataaaaacaaataatgggggagaaataaaatattgacttctgctgattctcttgagtgggataaggaatttggtttttgcactttggcttacagatccatatagtggaattattcgatctttcaattataatatcagaaagttcaattttagtattgtactcctataggtgctttttttcatttttcagccattgttttgcttaacttatttaactttgtatgtacggatgcctttttagtgcaacagggtagttctttgagaattatgtttacatgtagacatctctatctcagcagcaagttaagttattattacggttccttaagctgctgttatcatagagtggactgctgtaatagaaaaatttagtctttagcatatagtccatattcaaatacttgttcacagtttcctgtgtgacctctggcaagttacatgacttttaataaagtttttagtaaagacttttaataacacctccgattattttgctttattatggtactgtgcgtgttgcctacactgactggctgtgaaaaagctgttgtatataacagtgtctaacccaggatgatctacagccacttctaattgcagtctccattcggtaaatggaatcaattaaaatgtgtacctatgggctgggcagggtggctcatgcctgtaatccagcactttgggagaccgaggcaggtggatcacttgaggtcaggagttcgagaccagcctggctaacatggtgaaaccccgtctctactaaaaatacaaaaattagctgggcatggtggtgcatgcctgtaattccagctactcgggaggctgaggcaggagaatcgcttgaacccaggaggtggaggttgcaatgagccaaaattgcactactgcactccagcctgggtgacagagtgagactccatctcaaaaaaaaaaaaaaaagtgtctacagcccttagcaaaaaagtttaaacattagtcacatgtatatgttatagaatcttacttaactcaggcatcccaaccagtactggtctgtagcttattaggacctggcccgcacagcaggaagtaagcagcaggtgggcaagcaagcaaagcttcatccccatcactcaaattactccctgagctctgcctcctgttagatcagtagtggcattagattcccataggactgtgaaccctattgtgaactgcacatgtgaaaaatctaggttgtgggctccttatgaaaatctaatgcatgatgacctgttactgtttcccatcacccccaaatgggaccatctagttgcaagaaaacaagctcagggctctcactgattctacattatggtgagttgtataattatttcattatatagtacaatgtaacaataataatagaaataaagtgcacaatacatgtaatgcacttgagtcatactgaaaccatcccctcaataacctcctctccccctggtccatgaaaaaattatcttccatgaaactggtccttggtgccagaaaggctggggaccactgacttaacttgtatataacatctgtctccagaaaatcatgaggtccctgacaagagtcagactatgcaaggatctccaaattccttagcccagtgtttaatgtcctcattactgaccctcttctctatgcctttgcttggccactggggcgagaaggtaagaagctcctggcccaccgagttcccagcacagtcctgtcacttcagcattactaaggatgcatagctcactcttgcaccatctcagaattccaggcaaactctgctcctcctggcagagggtacagattggcaacttctgggccaaatgcagtctgaagatgtgctctgtttgtcttttcagtgattggaaactgggagagttcactcaaaactttcatttttccatttttctcaaaacctgggtggaaataggctaaaaatgaacagcagccactgccccatttacaggctgtctctctcctgctctggacatgacctcactttgccctattgcattaaatctacttcactggtttctatcatttccactaactgcctattactctacagtgtgaatagtatccttaggggttgtgtcccaagagtgacacagtccactctacatggagacatcaccaggtgtgacccctggactaagcatttctctaaagcctacttcaaagtccagcaccaacccttggtgcccactttatccccgactgcaaccataaagtatttgcctgaatgtttacttaacatctatctgctttttaaaaatgtctttgattttatatagtacgtccctttttggaaggtggaggctttgtctcacatgcccttgataagcagagatttattttttcctttatttgactcaaattgacaatcgaacttggtttcccaagggcatacagctacatggagtatctgaaaacctaatgcaaatctaaaaataaacttgttggatccagtttgaatgcacctccagtctaacacctcaagacactaattttagttgccaaaaaaaaaaaaaaagccaccattattactttcacagaagctggttttccctaacttccattctttcctccatcaaaattttctttttctctatcctttttcagagggctaattttagtgagctgtcacattgggaagaatctggttcattccccacatggttttagaaaccaacttggatataatggggaaggtcagatccccacggaatagggacatcttcctacctgctttctaaagcagctgagtttggtaaccatgggcaccctcttcagctgggaggccagcaaagcgttacccctgctgtatttaagccaaagaaccacccactgtgggtgtataggtcccatgtagtcaaatctagtttttcaagggaagtaagaaacccattgtttcagtataagatcaccttaattaaaagatttgacaacactggttgagccaaagaaaatgcatccatgtactccattgggaccatgactttccagtttgcaatgtcttgctgaacaacacatacacaatcctttccctttgcatataattctagggagaatttttctgatggatgtaactaaatagtgtgaccatactggcacttacccatcagaagtagtcatttttcaaaagaaagattctgccatagtgagctatacaggctgccccggttacttgtttagtctcctgtctcccctaactgatgtccagccactgctactaagggctcttccagcattgagtagggtgtagtaaacaagcagggatgatttgttgaattaaaataagttctgccatcacttaatgcagttttggaagatggtttaaagatgatttgggaaacagattaaaagccactggtgacaatcagtgtcactattttcactcttatcttactttttataagaaagttattataggtcaatttttcatctgtaatcacatgccaaaatgtcacaatgttaggctccaaaagacttctggaaaaatatatttcctaatgtatttttaaaatgtgctacaaagtagaacattgggatagcctcattgtcagtaaaacctgccagggacttggaaggcaattctgataaagagttacagagaatttagcatattgaaaagcaacattaaaagagtatgtaggcaattattttataaggatcagcatttattcaacaaacatttttaaactgtttactgtgtataaggtatgtggaattagctgctggagggtgtcgaatgaagattttacgtttcaatgcatttattattattattcattggtagtattccacaagcttaaaggttttatttgttttatgtcaacataaataacaaacagatgctctctaaaagaaaatggtattatttaagaatagggcatactaaattatgtgcttagtcagggagggaaggaagacaaaggtttgtaaaggataaatgaggagggttacataattgttttcagatgattagccttggctacaaggatcaataacaagagtgacctcagtctgacgttggacagggagttgctaggcaggtgtcctcacagaagtattttttgtgtaaagttgctatggcctttgtacaaggtgatggcttttgcagagtcttttgtgagagtttttcttatcaggcatttatgagtgagaaccttctctttatgacattccctggctctttttgtcagggttttttgggtttttgtgggtgttgttgttgttttaatataagggactccatttagattctgacaactttcacattatttaacatccacatatttactctgtgccagaaacaattctaagtactttataagtattaacttatttaatcatctaaacaatctaacaagataatattatgatccccagtaaacacctgtcttcatctataaggataaagaaattgaagcacagagagttaagtgaactgcccaaaatcacactgctggtaaattgcagggccagaatctgaacccaggcaagctgtgctccaaaatgtgtgttcttatccatcacatcgattagctcattctgtaaaacaaccccaaacttggcagcttataacatcaactagttattatttttcatgcattatctggtcagctgggcaggtctgcagatccagaccagactcatagactcagctcatctcagccgggttcactcaagtgtatgtgctcagctggggactggctggtccaggacatccttgaccaggatgactcagctctcttccagaagagctggatgacagaccaggatgactcagacctctcatcctccattgctataataggaccctgagaaacagtggaaaaatttgcaagggtcttttgtatcaagtttgctattctctgattaaccaaagcaaatcacatggtctggtccagagtcagtgtggaagggcaccaccaacgggcatagacataggttggtgtaaaaattggagactttaatacaattaacctcccatagtcatggctcaacactatgctgttttaaccctgctttccagggagtatcaaatttgatatttccaactccaaaagaattgtgaagatgctataaaatgtagccttgttggtttaggaaggcaagaaaagaataaaaagaaatgtggaaaatgaaaggatatttataattttaggctgatcctggagaaacaccatcagaggctccaagtgaagcgagaacgactccagcagaaaatggggtgaatcacactacaaccctgacacccaagccaccctcccaggctctccacagccagccagctccaggtaagccatctggaaagagctggacaacatgagcaagatcctccagttcattagtgccactgacggaggcgctgtgatgtgggtagctaaagcatcaagtggggaaagatgtgtggacttaggaggagctccgtcaatgtgcaattaatgaatgaaagccagaagagagtcatatgtgctcatctggctctacagataacttatgaaaccacaacaaaaaaaatcacccagatttccggtgtcctttttcagtgatgagttatgacccatctgctggcacagtttgagaagaattctccaagcagcttataaacaaccatgccttagaagtgcattcttagtcttgcttcattaattctgtgccaagggctcctttccctctttctccaactttcttttcaacatctttgagtgtctgccctgtgctggacacattgctaagcttttcatatggatcatttcaattccccccataccaggcccaagagtagattctattattgtccccattgtgcagatgaataagctgccattttcaggtgataaagtacttattgaaggccacagtgccagggaagagtgaccttaggcctgatgcagttcccaatgatactaacattcttgcttttagctcctatattacagccaaagccacactcttgtctcatttctcaaaatgaataaatgaataaataaataaataaataaataaataaaataaaaatcctttgatttctacgcagctaactttgacatttaatcttatgcagctttgtgtaactattccttgtgtgtatgtcctgtttaccccagtagatgggaggcttcctaggtagacttcaatttgatgcctcctctgtacatcacacagtgctggggaatagcatgtacctgataatttcttgttgaattggttaataaagtaaacaaaagggagcagaatttccttccatgaaggtgtggaaaggagctcctttctttgtcatactagatcagggtgccagtagatccagatcttttaagggtatttctcatgggagagaaagagaattaaaaaaaaaaaaaccaattatatttaatttgtatcagacacgcttgaactgctttttaaaaggttgctggccaggcatggtggctcatgcccgtaatcccagtactttggaaggttgaggcaggtggatcacttgaggtcagcagttcaggaccaacctggccaacatggtgaaacccccatcgctactaaaaatacataagttagcctggcatggtagtgcatgcctgtagttccagcaactcaggaggctgaggcaggagaattgcttgaacccaggaggcggaggtgcagtaagctgagatcgcaccactgcactccagcctgagtgacagagcgaggctccatctcaaaaagaaaaaaaaaaagttgccaaagtcaataatagtaagaagatgacgttataaacaagaagtaaattttcaaataaagagttttatataccaaatacaaacatcttgaatgcttctgaaatataaatccatcatttaaatgtgtgagtaaatagtcatgtgttcctgaaagtaaaagagaatttagcattttcacatttaatttttttaacttgatattttggaataattgaacttacagaaaatattttttaaatggcacagaatacattgcaaaaataacctcttcttcccctaaagttaacatctcacgggatcatggggcaatcatcaaaaccaggaaagtaacattggcatgatactctgacctaaactgcacaatttatttggactaacctgctttctacagtaatgtccttttactgttcaagattccaacgcaggatcccaaattgtattttattgtcatgattctttagtctcctttaatctatggcagtcccacagtctttcctgtctttcataaccttggtactttggaagaactctggtcagttattttgttgaacatccctcagtctgggttggtccgatgtttccccatgattaggttgagggcatgcattttgacaagagcaccatgcaagtgatactcgcctttctcagtgcatcacatcacggatatatgatgttgctgggtctcatcactgatgatatgggatcacttggttaaggtggtttctccactgaaagttattattttcccctcttagatatattgggagagctactttgagactatgcaaatatcctgttcttccttaaacttttgcttactgatttttaacattcaccaatggatctttcctgtaacagttattactgcctagtggtcaacatttgacttttatttttattttactttattttattttgagacagagtttggctcttgttgcccaggctggagtgcaatggtgtgatctcagctcactgcaacctctgcctcctgggttcaagcgattctcctgcctcagcctcccaagtagctgggattacaggcgtgcaccatcacacccggctaattttatatttttagtagagacggggtttcgccatgttggtcaggctggtgtcgagctcctgacctcagctgatccatctaccttggcctcccagcgtttgacttttaaaaggtcacttgtcattcctgatttagccagaagatggcgatagcattgcctaaactgaatttgttccaagtggatgtcttttctcttttctctcgttataaatggggcatataatatcacattttttttttttttttttttttggagacagactttcactcaatctgtcacatagggtggagtgcagtggcatgatctcagtccactgcaaactccacctcctggcttcaagtgattcttctgcttcagccaaccaggtagctgggattacaagtacccgccaccatgctccgctaatttttgtatttttagtagagacagggtttcaccatattgccaggctggtcttgaactcctgacctcaagtgatccgcctgcctcggcctcccaaagtgccgggattacaggaatgagccactgcacctggcctaatgttacatttaattaggtttgtctcaaagctgcaaatgaagactttttaagaataatttttataaagaattttctcacacaatttgtcatttctctgaaaagagatttagattcaaggcccaaatatgtttgtttgtttacaggaagaataaaatttaaaaagttgaagaggctatttattttatcttttatattacaggttctgtaaaggcacctgccaaaacagaagatcttattcagagtgtcttaacaggtaaatgccaccctttccccccatggaattaagcagctcagtgttacacagtggaagtatttagaggagaggaaatttccattcatatctgaaaaacaacatcattaatatttcttcttctaaaaaatctagagacatacacttttagtttagtctacatgatatgatataatcacagagaagtaaccatactttgtagctagaaccctactggcataaaaataatgtagtttcacaagatagctatttcagcatcaaagaatagtttcatgctggaaatgtaacccagtgaacaagaatgcctgtcttcccaaattgccaataataaactatattttagatatgcagaatatgatccatttgtgagcataaaatgcacagtgtttaagaactgtgatacagtttggagttattttatatttggttagtcacataaactagtggaactaaaattggtacaagctttgtgcagtacaattagcagtatgtagtggaatcttaaaaatgtttataatacttggttcaatatacaacagaaatgtacacacacgttcaccaaaagcagcaccactggtaagggccaaatctagaaacaacccaatgtccatcagctgtaaggtaggtaaataaattgtgataaattcctagcatggaacaggaggcaactgcaggaataaataaactcaagtcacacacaacatggataaaactcaagcataatgttgaggaaaaaagtcagacacaaaagaacatattctgtaggattccatatacaccaacttcaaagacaaaactaatctgtgctgtagaaacctggatttggattatacttggtgggagacaggaaccaaaaaggaaggcttctgggatgctggccaaattctaactttgacctaagtgatggatattgaagcacattgactttgggaaaatttacaaggctatacttttatgatttatgcactttgatgcgtatatttgcatttcatcaagaaatgcataaaatatgcgtagaaaaattacttgaggaaagtattaaaagaaaacaaaacatggtttggttttgttttgtttttgagacaaagtctcactctgccacccaggctggaacacagtggtacaatctcggctgaccgcaacctccacctcccgggttcaagcaattctcctgcctcagcctcccaaatagctaggattacaagcacgtgccaccacacccggctaattttgtatttttagtagagacggtgattctccacgttggccaggctggtctcgaactcctgacctcaggtgatccacccgctatttttagtagagacggtgattcgccacgttggccaggctggtctcgaactcctgacctcaggtgatccacccgcctcggcctcccaaagttttgggattacaggcgtgagccactgtgcccctcccaacaaaacatgtttttaaaagatttagttctaggctgggtgtggtggctcacgcctgtaatcccagtacctggggaggccaaggggggggcggatcacctgaggtcgggagttcgagaccagcctgaccaacatggagaaaccccatctctactaaatattacaaaattaaccgctgtggtggcgcgcacctataatcccagctactcaggaagctgaggcaggaaattcgcttgaacccaggaggcggaggttgccgtgagccaaggttgcgccattgcactccagcctgggcaacaagcgcgaaactctgtctcaaaaaaagaaagatttagtttcatgggaaacaacaccatattaatgcatacaacaagagacagcagtgttcctagaatgttgtttaaaataacgtaaatgaatggacaaaaggcaatggtctgtaccaatacattagctgtgattatatcttggtggcttatttataaatgatatttgtgtctttatataagtgagcattacctttatacttaagagcatagtctaaggaacagcctctctcatctacagactttttaaaaataatagtttatgtggatttatttctaatcgtaggttagaacatctagagccttatttccaaactgcctatagctgatatgctgtaaaccacttttaaagaaatagaattgcatctgcctccaagaatgcagcaattccttgggattataaattcttaatgtaataatttattatgcaaccataatgagtcaatttgggcctgaaggaaaccattaaataaatgtacctggttttctccatggcctcattctcaaaagagatcgaatgtcaggagaatagacacagtataagaaaaggaaacatatttctattgcttaaagaccttaacatttaataacataacttattattctagtctcaatgtttattcactagacatcttattttctattcaggtctcttgttattcacagcatatattatttctgaatctcttgatagtttcaaatatttatggtaacattttttgttcccagaagcaggacattcaattcaaaccatggaaacatgtgaactatgacttgatctaggtccatataaatgataattcactggagttaagataccatcagttgtaaagcatcctacgttcatgtattgctaaaaaagaaaagcactgaccaaccatcataccccaccaaccataagatgcatcttgatttcggaaatgttaacatattttttaaatgcacattctagaattgattgaatatatcagtaaaatacagattagttttgttttgttttgagacggagtctcaccctgtcgcccaggctgcagagcaatgatgtgatcgcggctcattgaaacctccgtctcccgggttcaagtgattctcctgcctcagcctcccgagtggctgggattacaggtgcctgccaccacacctggctaatttttgcatttttatttatttatttatttatttagagacaagagtctaactctgccacccaggctggagtgcagtggcacaatcttggctcactgcaacctctgcttcccaggttcaagcaattctcctgcctcagcctctcgagcagctgggattataggcatgtgccaccatgcccagctaatttttgtgtttttagtagagacaggagttttgccatgttggccaggctggtctcgaactcctgacctcagatatccacccaccttggcctcccaaagtgctggacttacaggcatgcgccaccacacctggcctaatttttgtatttttagtagagatggggtttcaccatgttggccaggctagtctcgaattcctgacctcaggtgatcctgcctcggcctcccaaagtgctgggattacaggcatgagccaatgcacttggcccagaatgttttaaggtcagactctatcacattcaaagttttctcagcatgggataaaaaaatcagccaggcatggtgactcatgcctggaaatcccagcactttgggaagccgaggagggcagatcacttgaggctgggagtttgagaccaggctggccaacatggcgaaaccccgtctccataaaaaatagaaaataattatccgggcatgttggtgcatgcttgtaatcccagctacttgggaggctgagacatgagaatcacctgaacccgcgaggtggaggttgcagtgagctgagatcacgccactgcactccagcctgcgcaacagagcaagactctgtctcaaaaaagaaaatagtaatcataatcataataatatagtaaagtgggctgctagtaagcctctggtgactttgtgcaaattatattaaggtatcttccctcaagacactttactgctatatgcttttatgataaatgtaccagcttatgatgtttatactgtaaatgataccttttagaaatgatgttgtagaacctgcacagttattttctaagcctccacaggcacagtgccagaaactgagttaaatactttccatgagttcttttatttcatcatcttaacaaccctataaagttatagaagtattataatccttatagcaatgctgttggtgccctgcccagattccttgtacagctggtgcacccgtctcctggctggtggtgagggttggctgttaacagctcataacttctccttctctgcaaaattgccctcaaccaaaaggaagccccctctccagatggttatgcctccctgcactgaatgttccaaatatgcaagaagcttgccttcttgcctcaagatgagaccagctcagtggtacaactcacactccagcacttccccatgggatcaggcagagaccagactccatccttctgagaccacacccttgctcagctccttccccagccccgtctgctttcctggctcccctactctgagagtccctcagtaaatcacgtgcacctgaatccccatcttgcattctgcttctagggaacccaaactaaaaatatatgtattcgaatgaagcaattgggtctctgagaagtttagtaacatagtctcaaagttagcaagtgatagagccagactggaacccaggtagagctgacatcaagctttgctcttaaactctagctgggcaagatcaaccatttcttcctaagaaggtagccgctcttctttccatctggatgttcagccctcccattcccttagctttcatattcatttgttgcagaagtggaagcacagaccatcgaagaactaaagcaacagaaatcgtttgtgaaacttcaaaagaaacactacaaagaaatgaaagacctggttaagagacaccacaagaaaaccactgaccttatcaaagaacacactaccaagtataatgaaattcagaatgactacttgagaaggagagccgctttggaaaagtccgccaaaaaggacagtaagaaaaagtaagttcaatgaatatttttagttggtttcatagcatgaagagttgttaacatggatttttaatgttttatatcatatttttggacctgtaccatggcaagaaaaccacctaacctccgttctccatagcttttgtggcaccttagcccagatttgcttgtgaattgaatttttttatttaaccaaattctgagaataaatatgcaggaagtcctcctgtgagtctagcctgcgatcccaattccagttaactaacttcctatattacagctgccaatctcatgggtatgagactttgcctggagtacctagaacctagttggagaggcagctgatttttttttttgagacagagtcttgccctgtcacccagactggagtgcagtgacatcatctcggctcactgcaacttctgtctccagagtttaagtgattcttgtgcctcagcctcccaagaagctgggattacgccactacgcctggcgaatttttgtatttttagtagagatggggtttcaccaggttgcccagctggtcttgaactcctggcctcaagcgatctgcctgcctcggcctcccaaagtgctgggattacaggcatgagccaccatgcctgcccacaactggtcttatagaaaagagaagcttactatcctttgctaccctgtctgaaatccataatgccctacacaggtgactctaatttgggcctgggttcccacagccccatatacccaaaccttgatgatgagaagcatctctcacacattcacttaattaatattttttgagtgcctactgtgccctggggacacagcaataaacatgacctacccaatcatctcaaatagtaacatggtaatgtgggaaacataaataataaacaacaaacacacagcatcatctcaggctgtgatgaggactatcaaggaaagaaagaaacaggaccatggggtagagaatgactggagataggagatcccttctgacatgttgatctgcaataaggtggcacagaaagaataaagcctggtcagctatggaaagaactagggagacttactccaggctgaggaaacagcaagtgcaaaggccctcaggcaggaaaaaaatgtgcttgtgccaggaacagtaaagctggcaaagtgggtgaaacattgtaaaccatgagaggagtgaaacaggatgagatcagagaaacaggagggaatcccactgctaggttctttagagctagagcaagcaacagttcaaaatgtatcgaacgtgcaataagattctactgaagaaagaaattgatatggcgaaatttgagagtctcagagcaatgactctagctgctgtgtggaagagggaccctcaagctgtgcatctcaaatggacatgagtcactggggatcttgttaggtgcaggttctgctccatgtctgaattggggcctgagcagcaccaggtgatgctgattctgcagttccatggacaacactctgagtagtgaagatcaaggactcagagtgaaagcaggagaccagttaggaaactttttcatgagtccagctgagtaatgatggtggtttggtctaggatgacgctggtagacatggagagaaggggatgaattcttgatttgttttaaaaagatcgtaaaatatggggtcagaggcctggaagagagaagcctgcttgtatgtctctgcaattcccaggtgtcctttagagaatgaaactcatgctgttacccacaccaaatgtgttcatgaaactccattatctagcctagatcagtgcatctcaaatttcagtgtgcatgtgaatcacttgcagcatttgctaaacacagaccctcgggacctgaccctagagtttctgcctcaggggcctccttcggtagggactgagcttctgagcttctaacgagctcctaaggtttgctgatgctgctggtccacagactttccactgatgggccctggtctataatcattcaggagcatcctagaaattgaagggtggctgaaaggctttctttggtctaatccctgcctcccttcccagctgccatctcccagcacttcatatgaaaacctgtactttctgccgagttcccaccatgatgagatagggcagttaggattctctgggctcagggcccttcttcaattgcaagactcttgtgtgaacaatgcagacgctgcctctaaactccaacaaagacctgcttccaaatgtgaggttgccgtgtggatttcagagtgtcacccgctctcagaaccccacatgtggactgcgcatcatagcttatcatgggactttgtggacacagggtctggcggaccacagggggcttcctctcttgaaccctgtcgagggctgttcccagttctggaatagcatttcattgagtgtcaacaaagtactgggcatatgtgtcatatcagtttcctaggattgctgtaaaaagtacagcaaactggatggcttaaaacaataaaaatgtattttctcacagttttggaggctaggaattcaaaatcaaggtgttggctgggcgcaatggctcactcctgtaatcccagcactttgggaggctaaggtgggaggatcacttgagaccagcctgggcaacatggtgaaaccccatctctactaaaaatatgaaaattagccaggcatggtggcacacacctgtaatcccagctacttgggaggctgaggtaggaggattgcttgaaccaggagatggaggttgcagtgagccgagatggtgccactgcactccagcctgggcaacagagaaggactctgtctcaagacaaaacaaaacaaaacaaaaaaacaaaatcaaggtgttagtggactatgcgctctctgaaaagtctaggggaagaaacttttttttttgtttcttctaacttctggtggttgctggcaatctttggcattccttggctgacagacatatcactccagtctctacctccattatcacatgaattctccctgcgtaggtgtgtcttggtccaaatttccctcttctaatgacagacaccaggcattagattcaggtccaccctaatccaccatgacctcattctattacatttgcaacaacctctttccaaattagatcacaggctgaggttctgggcagaacctgaagtttaccgggatgttatttaacccagtacatgtgctaatcacttctatgtactattccatatatttctcacagcagcactgtgaagtaagtacaggcatcacccacattggataagagaggacctaaaactcattgaggccaagtaacctggccaggggcacatgcaacacacaaggccatagtgacagtgaggtcatggcgtggtgccccctgagatactacttgtgtcagatgacatagcagatctggaatctgcatctctgtagacctgtgactgcttctggtccgtatacttataatcttctatctctatacaacaaaacaaacagatgcatgaaataaatatgcccaaataaattccctcgttaactatccctaatgttaggagatttctcttctaaatttagattcctgaaatttctttgaatatcttttgcaggtatatagtatgaacttcttgacaataaataatgttttgcaacatgaagttctctaatcaacagcattaatttttacataaaaatcttttcttcaaagttgaataattagggaaatggaaataaatgcagtggatttaaattttgttgctatcttttgaggtcacagacagttcttgtcttcctcagggcttatttagctgtcaagaatatttttaatttcagatatttagtgagcattaacagagcgttgtgtaagacattgctcttaagtatctttaaacatcaactcataacatttttaaaataaaaattaacattttatttttaaaataaaatgttatttgtggttttaaaaaaaagtgtatcgtttagaagacataactttcaaaagcaaaagtatcccttagttctatttctatatatatatatagcattttaatgaattgtagcatcaaaagaagtgaaaaaaagccttttaagtttaaattattgctccacttaattttctatactatagtatataaattactcttatcagatagcctatttttcatatgttggctaaccaatggacaacgtattgccaaagataatccaacgaccttcacagctctaggaaatcttatgtagaattggttgtacatttactgaaaacttttttggaatcattgtcatcagctgtctcagtaaagattatctcaaaagcttgactgataataattgccactgagaaataaaatttcattctttaactgaaaactttattaattaccctgaaactatgtaagtatgtaagtgacctgtcaatgagcaaagtataagacatattacatccttcctttactgaataatcttcttttgatgccaagttatagagataagatgcattttttagatttatattgtgacatatgatttaacacatgcttaaattgaaagcactatcaaaacctaatacttgggctttaaaaagtaataaaatcatctcttttttttttgttttttgtttttgagatggagtctcactctgtcatccaggctggagtgcagtggtgcgatctcggctcactgcaagctccgcctcccgggttcatgccattctcctgcctcagcctcctgagtagctgggactataggcgcccgccaccacgcccagctaattttttgtatttttagtagagacggggtttcactgtgttagccaggatggcctcgatctcctgacctcgtgatccgcccacctcggcctcccaaagtgctgggattacaggcgtgagccaccacgcccagccaaaatcatcatttcttaagcctggaggatccttaaaggccatctaggtgatatttgtcactttttcaaggaggaagctgaaagctaaaggtattaccatttacctgtagttacacagccagttcaagcaaagcttggcctaaaacttctcctgaatttctgctttagtcttatgtactatgaaccccaaaaatctgagacagttaatttagcaagtttatttagtaagttcatttttccaaggttcaggacatgcgcctgtgacagcctcaggaggtccagatgacatgtgcccaaggtgttcagagcagtttgtttttatacattctagggagacatgagacatcactcaacctatgcaagatgaacactggttctatctggaaaggcgggacaactcgaagcaaaggcaggaagatgggaagccgggagggggtttccaggtcataggtagataagagacaaatggttgcattcttctgagtttctgattagcctcttggaaggagacaatcagatatgcatttatctcagtgagcagaggcatgactttgaatagaatgggaggcaggttggccctaaaccattcccatcttgacttttccctttagcttagtgatttggggccccaagatttattttcctttcactgtacatatttgtttattcatttttgtatttacttgtaagtcatatcctgcaaacttccagtagaatattgaaggtaacatcatagaagatttgtatgtaaaaatcccatgaaaatagaaagagaaacaacacacatgcgtagactaagctttggacaaattatctagacctgctgcccaatacaggagccactagctacctaccagtggctcttgagtccttgaaatattgctcgtgagatgtgttataactacaaaatacacaccagatatctaagacttcacttttttaaaaaagaatgtaaaatagctacaacatatctgttgattttaattacatgttgaaatgatattttggatatattaagttaaataaaatatattattaaaattaatttcactcacttatttttactttttaaagtgactactaatagtttgaaattacatatgtgaagggaatcacatatgtggttctcattctgtttctaccagacagcgccagccatttaatgtcatctctgtccttgaacactgaattcagctcttagcttctgagaaaaggagtatgggtttgataattctcctcatctgattaaaggaaacttgctgactcttccaagagagacaagcgttttcctagtattaaattgccagagatttaatttcatggatcttatacaagcagcagaggggataatgccttcaactttgtttttatagaagatgcagagacgttgttcacttgtttttttcttgtgttgtcctttaaaacaaaacaaaaccaaaaaatcccttagtacatagtatctaaagatacgtcatgaggagcttttcttcaagtggcaaagccagtgggtctgattatgtctacctgtcttccatctctcttgatatgcaataaaatcctgaaaacacctcagataaatgaatggatgggcattatgtacattgaatttgtttccttccttccttcgttccttccttccttccttcctttcgacagggtcttgctcttttgctcaggctggagtgcagtggcatgatcacaactcactgcagtctcgacctcctgggctcaatcaatcctcctgccacagactcccgggtagctggaactagtcgcatgccactaggcccggttaattttttttttttttttttttttagaggtggggtctcactacccaggctgactttgaacttctgggttcaagtgatctgcccacctcggcccccaaaagtgctggaattacaggcgtgagccaccagcacaccaggcctgttcctaatactctgtctttccctgtttcctacagatgataatatagagtacaaaattggaatgaatcacaccaatttctttaatattcatcatctcaagtgagctttctacataatgtgaagaacaggttactcaaaaatagttttggtccagacatggcatgcagtcatgctgtgttgctcttaagagcacaggtgttgcccttctgcccctgtaatttttgaccttgggcaagttgcactactgcacctccatgctgtgtccttggccaattatctcacagagccgtggtttcctcaaatgtaagctggtgatgggtataccgacttactcggatacgagtgtgcccggcatatggggggatggttggcaatgagagctacctctgctagagtggttggaactgattgaagaaatgcctttatgccctggttacaatgatttcctgctatataagatcattcaggccgggcgcggtggctcatgcctgtaatcccagcactttgggaggccgaggtgggcggatcacctgaggttgggagtttgagaccagcctgaccaacatggagaaaccctgtctctactaaaaataaaaaaattagccgggcatggtggtgcatgcctgtaatcccagctacggaggctgaggtaggagaatcacttgaacctggaaggcggaagttgtggtgagctaagatcgtgccattgcactctagcctgggctacaagagcaaaactccatctcaaaaaaagaaagaaaagaaaagaaaaaagataattcaatgttaactatgtcatgccaagaggaaagtttccctcaacactgcagtgaggagccttatagaatgtccgtcctcatttggcattgcacataaaaatgcaaaaagaaacttgagaaaattccgcatcccttatttgacaaaatctgattctaacaccagcttcaaccaactcccttccccatgtgatgccactgatgctggcccaattcaaagaaaaagcaaccagaattactgacagctgattctaagaaactttacctggcctatcggaccacaagtgaaaaatatggaggcagagtctgatgtgttgaatgtcttaggtagtctttcgggaagggattccatataaatgaaaagagcatacctactctttgtaccctgttcccaatactctgtctttctttccactgtttcctacaggtgataatacagagtacaaaattggaaggactcacaccataagttaatgataattactttaatttattttgacattcaccctaaccttctaaatatttgtataattctctaagaacaatgcagagaaagtcatactgctaagaggaagcattcgaaatattttagaatgaactaacgcatctctttccccttgtaagctttgtgtggaaagtgccatttgggtaaagatatcagtgaagttggtgaagcctccaaagggccttattttcattgtgtgtctttgctgttaaaaatcttgttaagaggccgggcacggtggctcacgtctgtaatcccagcactctgggaggctgagatgggcagatcacttgaggtcaagagtttgagaccatgctagccaacatggtgaaacctcatctctaataaaaatacaaaaattagccaggtatggtggcacatgcttgtagttccagctactcaggaggctgaggcaggagaatcactcaaacgtgggaggtggaggttgcagtgagctgagatcatgccactgcactccagcttgggcaacagagcaagactctgtctcaacaacaacaataaaattgttaagaaacagaactcagatgtcagccaggagggttatctgcacacggcatctacacgtgctctctgtttataatcatcacccctgatgctaaacaaggcacatctttagcttcctctaacaaagtctgctcaatgcagtgtcctctgaagttttcatacgggaaaggtaactgggaatgccattacacttgtcacattttaaaataacaaaaaagattaaaacctgaaaattttttattagacactgtttttcccaaacggagattattattctcaccactgccatgcctagggcccccagcctctttgcttttctttctgcccctgcctctttctagagcaccatgaattccattcagtctctgggattggagacactctattgctaagcttgtccttggggtctcaccctctaccccaagtggcttatgaaaatatgtatttccaaacagagaactttctctaggaggaattctggtgaataaccttccctccaccttgttatggcctgtctgttttgtgagtcaaactctgtgtctttgcagatcggaacccagcagccctgatcatggttcatcaacgattgagcaagacctcgctgctctggatgctgaaatgacccaaaagttaatagacttgaaggacaaacaacagcagcagctgcttaatcttcggcaagaacagtattatagtgaaaaataccagaagcgagaacatattaaactggtgagcctgagaaacatgatttatgtttgtgcaactggaactcccttataggaaactttggatacttttggataactaaaaggagacaagggtgggtgtgactggcaccaacttgagagattgtttaggtgacacagtgtccatcacactattgtttttataagccccactgtcttaacatctttaccaagcttctctgtcttctgccaataaggctgtattttatcatttttattttcactaacttatgttgagtttataattgcttttgggaatctttgaaatctcataagcaaatagaaaacacttatctttgtttaagaaattaagaacatgttgcaaacaaattttccctttttttttttttttttttttttggtagcactgggctttgtaagaatttttttaaaattatacagtacactgtcctatatttagaaaagtcagtacctaaatggccaacacggaatgttggctacccaattcataaggctccctatgaaaggaaatgccatcctcaccattaataatcagttttattttccaaaatgttttctcacgaattgagacattctctccatttttgttgattccttgatacatagtagggacacaataaatatttgtgacagatagattagataaatttagcaacaaaatatccttgaaaacaagcttatgccaaaaccaaagaaataagtaagcttgatagaaattaaggtagtgtatccagaagaaatgggttttaagagatatttgtataagctgtctatttctttgctgagggtctgtgcatataagagaattctgagcagcttcagcttgtaaggttggaagcctatagatgatttagccatcactgtataataggtgattcagtgtaattctgttgttctaggataacagtccccagtgactgtatgcaatgagtagatcaaaatcacatgaattgcttattgaaaatcaaattctaacgaggcccgttattctcaacttgagcatgaatcagaatcacctggagagcttgttagaagagatttttagggtctaccttaaattttcaacagatctctcgtagggctggtgttttcatatttctgatcccaggaccagacttcaagaactgctgcccaatacctaaatgtgaggctcaggatttactttttaacaagccccacatgatttcgaggggttgcctcatttgtgaactgctgaaataagacgaaagcagtgaaagaatggctgggcaggggttggatcaggcatagggagggattgccttgacagacctgagcaagtcaaagtaaattttaacgggcaataatggctttgagatccggctataaccactgccttctgactttctccagcaactcatccccagtagtccagaacataataaaaattaaaatagtggccgcatattaagcattcaccatggggctatattctgtgctgagtcatttacaggaaacagcctatttaattctcacaataaccattagagtttggtactattgtcagccccattttgcagataaaaaatgtatatagcaaaatttagtgactttcccaaggatccacaactggaaggtggtacatttgggatttgaaccttggtcctcgggttctagagcccctggtttataaccattgtgtagatgcctcggctaattcaggtttcaagccaatgtcatcataatgaagggagttgctctggtgtcctgctcacacagagagcacacagcaaacttcttcattatgatacctggaatgccatgcctgtctctctttaaacagctttatttcccaatcatacaattcactcattttaaagtgtgcagttcaatggtttttgtatattcatagatacgtacaaccaccactagaatcaattttagagcattttcatcgccttaaaaagaaatcctaataaattaggcattcagccattcattcattccttgaaacaaatgcttattagacacctgcttgttaaatatttttaaacagtagtaaataaaaataacaatcctaggctttatggagcttatattgtagaaggatgagtcagaccataaacaaaataagttggtaaaacatgtagtatgttaggtagtaataagggcttaggagaaaaacaataacagaaatgggagaataaggaggggcggtttggggaaggatgatgaggatgcttggcgattttaaatagagtaggcacggaaaggtttacgcagaaggcaacatctgagttaagaggtgaagaactgacaacagccaacacagggaggaggattcctccaggcagaaggattggcatgcaaagactctgggctggaaatgggcctgagtgttgggggaacagcacagtggctctgcctgaagaggattatagggcatcaggtcagagagatgggacttttgaggtgggagacagatcttctggggtctttaggcctctgtgttttcactaggagtgaggtgggaactgttggaagcttttgagcagaggattgatgtgatctgaagaaacttccacagggaccactccggggctgtgcttcccagtacgttacgggaagtggtctcctaggaagaagccgtcccaaagttcaggccaacagcagcccaaggggttaaggaatcctggggtctccagcagatgactcaagtttactaacagggtgaatgttgcttagaagtctggacatcccagctgggtgcggtggctcacacctgtgatcccagtactttgggatgccgaggcaggtggatcacctgagttcaggagttcaagaccagcctgggaaacatagtgaaaccctgtctctactaaaaatacaaaaattagccaggcatggtggtgggtgcctgtaatcccagctactctggaggctgaggtgtgagaatcgcttgaacccaggaggtggaggttgcagtgagccgagatcatgccattacacttcagcctgggtgacagagcaagactccatctcaaaaaaaaaaaaaaagaagtctggacaccccaatattagtccatttccatgcttctaataaagacatacctaagactgggcaatatgaaggaggtttaactggacttaaacttcaccgtgactggggaagcctcacagtcatggcagaagacaagtcatgtcttacatggatggcagcaggcacagaaagagtgcttgtgcagggacatttctctttttaaaactgtcagatctcctgagactcactatcatgagaacagcatgggaaagacttgcccccatgattcattacctcccaccaggtcccgcccacaacatgtgggaattcaagatgagatttgggtggcacacagccaaaccatatcaccgactataatcatctggagtttccccagggccccaacccttgggcaagaccattccccaaggaaagacacatggcaattcagaagagaggtggcagagtgagagggaagcctaatactcacgggagattcctgaaagaggaattcagagtacagatgaaaacagaagccaaaacatcccaagaagacctcttggggagatttgagctgcaggaataggggccgaagtcacaagaaagtcatgcaaaacctaaacatcccaggaacaatgcctcagcatgaggcaccatatggaatcccactgatgagggtgtggaaagcagctcaggagcttttctcctggaggagaaggttggttgggaattggggaaaaccagctgagcttgtaggtgggaaaattgcacttgaggagctagggaggtggtagaaatcctactagaggtggcaactctaccatatgtccttccacttccttctcactaagaaggaatgtgagtacacattgtaaaagttttgaagactgttcagagggacataaatacatgcccaagtcagcctggccctttcaggccaaatgtaagccactcactcaaagtgctcacccctgcaccactgtgattgtggatgtgggtttcagataaagccccagtgcctgttacacacacctatcccagccttgttaggaaggctaaagcctgaatatcttggaattagaaccacacaatgtttattttatggccatttgggagcatttacaatttttactacctgcctttagctgcgacgtgtgtgccaaagcttcctactggctccatttgtaagaatcagagattgttctgtcaggaaatcttttgactgaaaggcacccagaagtgttagttctatctttgctggtggttctaagtaatgaacaggcctcccaggctaaattagacaaaccgaagtgtaattaaaaagtaagccccaggttaaaagaagtatttgggtgatgaggaaaattaagccgacagtatttcatctcccaaaattgctttggggattaaataccaacgtgctttggttaaggattatgcatttcaaatgccacatccacagttcgagagttaagaaagaaagcatggcatccgtaaacttcctgtcagatgtttactgaaaacttagtatttgcacaacattctgatagacactggagacgaaaatgaataaaacacgatcaccacacacactcaggggatgtgtataataaacagtactaagaaatgaaataataaaagcaggaaaaaatggatatgaaagcacagatataactatttgcctaactctatcaatcgataagcacctagaggatatttttgatgtaattgttcatatcatgatacgagatgtaaaatgcacaccaagctctgtagactccacttttgtgcaaaaaaaaaaaaaaaaaaaaaaaaaaaaggatctgtgtccctagagctctacatctaaataactctacagtctggctactcaaagtgtgaagtgtgggccgtgaatcacctaggagtgtgttagacatgcagagtctcaggccccacttcagacctgctaagtcaaaatttgcattttaataggattcccaggtgtcttgtcatatggtcaagttgaagaaacagttttagagtgtgtatcattgccccaaatgcattttagagtaagcctacaatttccgttatttgaaatgggaaatacagtgagctctttacagcttgtcatcaagttgagtgtattatctgttggtgacgaagtcatagttcctgtggaaatcacccctgtggttccctccctacatccacagtagaaggtactggttgctttagtcggaagtgagtgaaaataaagatggaagttcctccaccccattcacgtgcttgtgctccatgatatctctcaatgaacagcttgggggtctgtaaaccccaggtaaggacttttgctccagagaagaactacagggtcagggaatctgttctaattcatttatctgtttttcatcaactgctactggttaaacctgtgtttcgtctataccattagggtgaggttttaattttaaaagtgactttggtgaggcgtggaaattcttagggatttacctgagggtccccaatcactctgggtactcagctctaccatcacattctactaaacacccacagcccagtgagcagggatttcgttgtaatgttaaggagtttttgcttctcagccacagatgtgctcgacccaccattttgtcttctttcttcttcctcctttttagcggctttacaaagagatttcctcatttctttcacagttaccgtatgtgttatcctctgcagagccttgctttgcttcactttgctttgcttcctgtcttttctcccctttcccatatctcccacatgttctaatcacatccattcacctctttctttacatcaaactgaatggctcgcgttcttcttacaatcctcatgtctgtcccaccagcaatcatttcaggaccccaaaccaacgttagtaccatcaaactgagttcagccccagaaagctaaaaagttgtgtttcagaccgcaagctctgggcagatacagatcagctatgaatggacgagcccaccaggacaagcaatcaggtgctgagtggggggtctagggtcatatgtcctcatttcaggccactgctcctccaccaagtcactgcatgaccacctgaatgtcaattttctcacctgttcaatggagataaaaatatctcttacctcatgaaactgtaaggaggaacaacaagataatgcacctaaaatattgtttttaatgaaagcctttttctgtacaatacctgaattgactaggaaatctatatgcacttcaaatataaacaagtattacagttttttatatcttgctacagcttgagggaactcattgtctctccttgaatgatttctaccagcactatgtgctctcccagctatctgggagccacacttgaatgttctcctttctgtggttgcctaggtgatgtatatgtgccaggagtaattgcagtctcaggaagtatccctactgtcagttgtggtagtgccatctgtcttcctccaatatttggactttacatagggtcattttttttttgaaaaataatttagctttcccaaaaaatgttgcatttttctactaaacaagaaatgacaaataagcaaaagatgttagtagtgaaataagaaataaaataattgttgacatttttgtcaattttcctgattattaccccagtgggattcacacacacaaacacacacacacacacacaaacacacacacacacacacacacacacacacaaagatccaaatccatatagttttcaatttgcttcttttacttagcattatgccatggtgatttttcatgtcatgctttttaacgctttttcatggcttcgtattactttattgcatgaatgtagcttaatttatttatctagttccctactcgaggtggtgtattagtccgttttcacatggctgataaagacatagccaagactgggcaatttatacccaaactgtgaggtttaattgaactcatagtttcacatggctggggaggcctcataatcatggcagaaagcaaggaggagcaagtcacgtctgacgtggatggcggcaggcaaagagaacttgtgcagggaaactccccaatataatactattagatcttgtgagacttattcgctatcacaagaacagcacaggaaagacccacccccataattcaatcatctcccaccaggtccctcccacaacacatgggaattatgggagctacacgatgagatttgggtggggacacagagccaaaccatgtcaggtggcaactccacattgaatagaagccttggtcagactttcacattcattttttctttgctcagcaaggaaaaaaaatttcaaagattattataacattgagactcaaataagcagctattttaatataagttctatttagctatggaaattttaaaaataagaattttataggtgtgaaagaatatctcatagaatgatcaagatgcttgacttttttgtccaagactttctccttctgaaaagagaagggagctagtagagattatagctctgggtagacagggccctctctgtctgctcacagaggaaggttggaccatcaatactagcatagtactggcacatagtaggtaaatattctttgaatgaatggtcaggtcacactcccatataaacatcttccttgtttttgcttttgtttttgtttttttagagaccaagtctagctttgttgcccaggctggagggcagtggtacaaacttggtgcactgcagcctccatctcctgggctttagtggtcctcctacctcagcctcccaagtagctgggactacaggcacgcaccaccatgcccagctaattttctctattttttaagagacaggtctcactatgttgcccaggttggtctcaaactcctggctttgagtgatcctcctgcctctaccttgttttcaaattgttggtgatgtgcttgctgtgtagatcattacttagttcagatgttttgtaaattaatttcttgtagaagaaaaacaatgtatagtgaaaatccagagtaaatgctttgactaaaaggaaagaaagaggcatcttctttagacattagtggaagggaaaggaagatgtgttgagcccgaaatatgaatattctagacttggctttttgcctatgttccaagattatccttcttagaagagactccaaacatacaaatttctgtccacatattttttatcccttttgagttagagtcaaggaattattctcctccatggaaaccattttcttgccctcagatgactaaaccaagtgaaatttagcagagttgagaacaagcgtgaagttttattccccagggcctttctgttaactccttaaaaggtttggaacattgagctgggagagttatcatgaatggcaaacaaaccagcaaaaagtaattgagatgtgtctgttcctttgggacagaaaagaaaatcataccaaaagtgaaaattaaatgttgtttactaccattcagtttaccacataccttcttaatttatttcctaggaagtccaagtgaatttttgcttcttctctacctttaatagtcagtttactttcagagttttgtgactaataaatgatcgaatggctctttgaacagagccagcctgctgataaatacaccaaaagttagtataccttgcctttatgttagtcacaaagcacttcaattattatatgaaaaatcactcttctgggtactattttcacatcttatgcagtaagaactttgagcccaaaacacagaagtttatcttgtttagagattaagcagagttgttttatttctgtttttgtttgtttttattttatccttattcttttgattgcaagccacagaattccatgctggactaacttaggccagaagggtatatactagaaaagtacaaagggtatatcacataagaaagggggctgtccaaactctgcccctgcttttctctgcatattagtgttattcttttccaaagtagcaagacaggcttccccttgatagaaaatacaggcactgatcccttctgagttttatttctccattgacatgtaggaaaaatcttggggaaaaccttgtttgggtcccatgatgaccaagtctgcaaccagaagtcagagtatgactgacccaacttggattaatgcctcccctggaccaattatcttggccaagagatggggggtaaaatatacagcagctcccaagggaagcatgtgggtgaggccattctcagaaagcagaggaagttcttcctggagaagtagttagtattgggtagagaaaactacaggtgtacctcacatcctctctttgtagcataaaaaagagataaattattgatgcccatataaaatcccattgccaatttaatgtgagttgggcggtagtggcatactatttaatattaacaaaatcataatattaattattctgtctcctggaggttcagtagacaaaatttaaataaaaatagtaaatgccgtgtgggcagaacttcagtaggagtgagggtcttctgaaaactagctgaggtcgggctcggtggctcacacctgtaatcccagcactttgggagactgagaagggcagatcacgtgaggtcaggagttcaagagcagcctgggcaacatggtgaaaccctgtctctactaaaattacagaaattagctgggtatggtggcacacgcctggaatcccagctattcgggaggctgaggcactacaatcccttgaatccaggaagtggaggttgcagtgagccgagattgcaccactgcactgcagcctgggcaatagagcgacactgtatctcaaaaaaaaaaaaaaggctgagatgagcagaggtggggctgtgtagtaaggcactgtgggggagatgaaggcaaactgagtacagtaggacatttacatattttacatattaaacagatatcctctgaaaacatatactccttgggattctagggaaacaccattttcatttaattgcatgcaaaagcctcagtttaaaaaatacacctggatttcacattaagatgctttttccggaaggaacaaaatttagcttgttaaacaccaaacctatataattttaaaagtatttccaataaggcagcctgtggcttgaatgtgagctttcagagctatcgctgaggtcgggtccagtgtagttttgaaacttaaaagatttcattcacaatcatttttttcagtgcctattttgtctagagcctgggattctaaacatttattaagaatggaaggttgaaatggtgacatccctttgtgggagcaataataagatatttacatacaaaaggtatgtctgtaaatgataccctgtaggaaaaaccaattagggggccaacacccagagttatctgggcagtcaaaggggagaattacctaaggctggcttagaaagggaaggggcagagagaaattgaaatggtttcttccagattgtctccatcttccacaaccaccaagacaatgcttttcaaactctaatgtgcactcaaatctcctgggaattttgttgaacatgtagattctgacttagttgatctggagtagggcccgagaacttacatttctaatgtgctccctggtgatgctcttgccactggtatgtggactacactttgagtagcaagatctagaaagccaggtcatcagctcagagtttctagaacagtgcctgctatttagtaggtgcttaataaatatccattgcatcgtggctgaatcagatagtttagataagtgtgtgttctgggaccacaggaggtggaaacttgttctgcaaggggtaaagggcaaatgcagggggtgtgatgggagccaagagggaggcaaaaggacgtggcagacagggaacttctggggagtctggagggagtgtggcactgacagtggtgtggagcctgacaccaaaccaacataaaagtcagaactgagtgggcagaaggtctgtgagttctccagcttagtctcaatattgactggaggccgatgctgctgaggataaaggcagtaggcggaagggaaacagcacatgtgagcagatgctggcataatcaagaaaatattctgaagtcaggtgaatgatagagatgaggacatggaaacaggaatataattgttactgaattcaaaagagttgctgggagacttagcagtggcttgtagaatgagggagggtccaccaagacaacctcccacttcaagtctggcacaaagcatccaaatcacctcaggagattttgagaatattgattcccaggccctacccctagacatttggagtccataggtcctggaatctgtatttttaagaagttcccccacatgattctgatgttgcagccaaggaaggtgatccctggataactctctgtaactccttcaagtggttggaagaggagaaaagccctctagggaagggaaggtgctagtgagaggacactttcagctaaatagagacgttgcaggagaccccaaggaaatggccagagtctttgcacactggaattttacatctagacagcttgataaatggcatgactacaaagtaatgcctcatgatttctttaattgtgataatcatgattaggcaatcccttttgaatgatcaaataggctttctgctggcccaagtcctagttaatatttgttcagatttaatccacttcacagatgaatgcatcaaatttcatgataattttaaacgaatgtggattccgtatcgtaattctcttgcaagccatggaaccttatttgtctgggtttgtacccatctcagccacttaccagctttggggccctgagcccaggacttgagccagatgtgtcagcgtgttcttatgtaaaacaaaaataataacaccaaccgcatagggcaattctcagaattaaataaatacatgtgaatcttttttgttttttttttttttgagacagagttttgctcttgttgcctagagtgtgcccagagttgctggagtgcagtggtgcaatctcggctcactgcaacctccacctcccggattcaagtgattctcctgcctcagcctcccaagtagctgggattacaggcacccaccaccaggcctggctaactttctgtatttttagtagagacagggttttaccgtgttggccaggctagtctcaaactcctgacctcaagcgatccacctgcctcggcctcccaaagtgctggaattaaagtgtgagccactgtgcccagccacatgtgaatcttttaaaactaggcctgacatatagaaattatcagttaaagtgttgtaggaccctatccttagttcagctaaagacgggttccttgtcacatggccacaaaaagttaggcttgaaggcaatttgaagagtgaggaggacagggttttattgtgttgaaaggaaaagagggaaacaggttatctccacaaggctggagtccctgctagtgtgcttcccaccttgcagattgaattccaagttccacccaggaagaggagtggccaggctcctccctgctgcaaatggggtggatttctgtggctccacctcagtgtgcattcctcccagtgagcaggcccgttgcagtttttccggggactcccttatacttggctgtctcaaaagtttgtggtattatgatttgtcttgtcactattacagctgccacttatagaagactagtcaactcagcttgccttatatgtttttgggaaagagaatctccatctatgggaaaagcagtgggggctttcagaggatgtccacactgtctattgggtgctccagtaagaagggttgagtccagttgctacagccacctgaaaaccttgcagaaggttctccaggttcctcatgaggaaaaaaggaaaagattaccaggcacaattacctttatgtaattggcaaacacttactgggcatcaagtgaatattaggaattgtgcagaataccaaggatacaaaaacacaattgatgcccccttggggcttgatttgataatagatgtatgacaataaatacttgcgttcacagtgatgtagtgacagttcattgaaagcacaaagagaatttctgatgttctttatatctactggaaattacccacgcaagaacataaatgtcaacttctaagatgggaaactcatgttatcctcaaagcaattcaacaatgaatgatagttgtgagccaagaattataacttgctgttgattataacttacatttgtgtcatacttatttttattttgagcttcacagcacctccaaagacataaagacagtgatcaactgagaaaatgtaggttctgaaaatgtagggtcttgccccaaatttcacttttaataagtcttagggtagagattggaaccaggttctacactgtaagttgtctttgcactgagctgggctataataactgccacaacaatctaatgaattctgtttaattaaaaagagataataagaagaatttcatattaaaacccataagcctagataatatgatggttctaaattgtcctcattgccaatgttagatgtctgacaactttaactattgtgaaacatccatcacagatattctaactatagattctgttgtttgagggaggtgggaaggaagctctgtttgcaatcatttgaaatagcaaactgacattttctttttccagcttattcaaaagttgacggatgtcgcagaagagtgtcagaacaatcagttaaagaagctcaaagaaatctgtgagaagtaagccctcattcccattacaattgacatgtgcatctgaatttattcaacacaaattcccatctgatttgcctcttttttctcttttacttccattgtgacttcagagaaaagaaagaattaaagaagaaaatggataaaaagaggcaggagaagataacagaagctaaatccaaagacaaaagtcagatggaagagtaagtcaaaagtgtcccctctcccaaacagttcatctgggaattattttattttgtacgtcagagtcacaggttcataaccagtcaaagactccttcgtgaagtttctcctctagtcagcctttcaaaagattcttttggtaaggtttttaacagggaaggctcaagcaaagactggttcaataaaggagtgaggcacacccagggccttttagataaagagtaagcaaagagcttccctcagggaaaggctaaatcctcacttcctacccataatcttcctggcatttagtgaaaacagagcctgtgccttgggaggaacctgacctttgtccaaaggctggcagattataccttccttgtagcagtaataagaatgttgctatggctcacacttgtaatctcagcactttgaaaggcctaggtgggaggattgcttgaggccaggagttcaataggggcctgggcaacacagggagactctgtctctacaaaaaaattttaagattagctgggtgtggtggtgcacacctatatttccagctactcagaaggctgaggctggaggatggcttcagcatgggaggtcaaggcttcagtgagccatgatggtgccactgcactctaccatgggcaacagagcgaaaccttgtctccaataaataaatagataaaaataaggaaaaaagaaaaagaatgttgagagttctgtaaccttttatctagaagtctgagattaccatttgtcaattctggatgaattggtataatgatgtattcatcatttgcttttagggagaagacagagatgatccggtcatatatccaggaagtggtgcagtatatcaagagggtatgtgggctcatcacgctctctcctttgcaaaacatgtgtgaacatttggtgagctcgctgtgagcttctggaaggaaatgtcatgccttgccataactttttatcactagcacctagcagagctgtttcacagggtgggcactccttaatcaacatttctgcaagttgaattgcaaaccactttgtaaaaggattcatctaaaaatagagtcaagtcatttccaaagtcaagagcccagaaacatattgtaaatgatagtgttcccaaaagaacctttaattgtcatcaatgatagagatgatggcaacctcgaagggctgtcctttttttttccaatttaatgtcatagaaatgtttacatatttataaaaaggtaagaacagtgcagtccattgatcaccacctcccacccttatgtttctgtcacctagcttcaacacttactacagtttcctatacttgtaagtgtagttcttgatcaggagatcaaataatcaaatgtaagccatagatctgaaaagctttcggtattttctgaaaacgtgcacttttaaatgtttagatgaaagtaatgtttcttgtaactttcttatagctagaagaagcgcaaagtaaacggcaagaaaaactcgtagagaaacacaaggaaatacgtcagcagatcctggatgaaaagcccaaggtaaacggaactgaattaaaatgaacaattattttatttgatttccatttagtaagagtaaaaccttcctggtttacataagtaccttgtacacagtctcagatcagttcttgcatatgaaactcatgtatctttctcaatgaaggaaaaaatatagcaatattcagtaagcatttatcatcacctggtgagcttttaaaaactgcaaatatgcagaacccagccccagagatttggctttaactaatctggggtatggctcagacaaaggtatttttatagtccgtttcccctggagaatcagagactaaccaaaccttcagtttgggtactactaagtaaacgtcagttctaaatagctgatgtaatgttgtaatgccaccctctgtccagcagaggatgccctgcaccaaaatcactttggtttttatctagcaaaatagtctcataaatcagagaaaagcaaatcttttgtttcccatagtaacagttgattggggctctgctttaaaattatcttatgttcattgtttggttaaaattaattgtcttatgaatattaactttgaatgaactgagtatctgtagatcaaatactttgaggttaccaaatggcatctcagttttagaacattccttccattttgattcatcactgaatagttttctgtttgtggaaattgtgtttttcaattttcctgcgcttctattttcaatttaaaatatctactctaaaaagtactgccattccacacaagcatttctcgagtcctaaaagttaaaaaacgttagttttatttaattgtatgtttcattcaccagtttacttcttatagatttcttatggataattctaaatatattttcatggttctttgtgctcttatgctttcatatttattatataagacatttatttaatatttttaatttctaagtttttagggttggcaatatagattctcaagcaagaattaataattacttagatatggtgctaattcttacgtttctcctataaacatataatgtagatcttctcagccaccctctcaggttgattatgcactaataaagtggaataaattttaacataatttcagaaattgctatactttccaatcagaattgatctttttaaaatgctcaaattatttagagcaaaagatccagtttgactgaaatttaagaaacactttaataataatcagtctcaggtgatatattcagatacatacatttctaatctatgctgtctggttttaaatttgtcattactttgtacactgacataatagaatttgcttatggttgatggctcagctagtttttgtatttcaaaaaaatttaggtaatatggttcttttcagagtttcattttgcttttttttttcatgcgtgttttggttcaacaatgttaactattttacttacagataaaatgtgaatgtaaaatcattaatgtgtttaaattatataactctcagtatcagtaacccatacaaagattttcttgttactgctctaggtcatcatgattaaaatcaacctcagtaaatgtggaagcacccttaaacttcttccctggatataactggacatgaaaagaactaataacttttggctgatttattaacagtcagggtgcattcagctgcaattttacaataagcccaattaaaactggcttcaacagttatagtatttagtaagccacgttactggaaattcagaggtactacagttgtaacagtgattaatttagtggcttaacaatttcatctccaggtatttttagaatttccactgttgttgccttctagatccagaccgtgaactcagtcatgagatggctgccctagctccacacatcataaccttacatgaaaccactcaaaggacgtgcagcaaatgtcttcattttgtaaccctttctaggattgagaaaaaccttcctacatcccctctagctggtgtttcctcattgggtacaatggcctcatattcccattcttaaaccaatcatgggcagtagggtatcactttcatgattggcttagagtaattaagattcactcacaaggctagagagagttcagttttcctcagttccatggtcatcaggtacctgaacaaaactgatattttatcatcaaagaaatagaggggaaatagcaactgggtagacaggttacatacagtgtacgttacagccatgtttataacaattttttgtttcttcctttctggccccttggaaagagatctgaagtgtttctatgaatttttagtagttctattgtctgcgttttttattgtaaataggtaccatgatgaattcctctgtgcttttcttccatgaggttgctccatgaccatctttttgtgtctggatttgaaggttgcccatgaagattgttggttccatgtcaaactaaagcatttcttgagggtttttcttcatggcttaaaaacgttgtgccttaaagctgtgattttattaataaaataataaatcatgactgttaacattgtaggacatggtggttaataaagggaaatgacaatgacaacaggagcagcaatagacagtagagtaaaagaacaaaatcaagtgtgagacatgtgaagaaagaccaaagcacaggacagcaaagtaggtattaataaatgggtggtgaggagaggccaggccagcatagcagtcgctgatgctcctgtaactgtggggcatggatggaaaatacagtaacactggctttgaaataatccctctccacatctagtactgaaacaggctttgaatcttgacatagacatgagggaaattagcaaaagcagaaacaaaacaaggaacaacccaaggaaatgaaactgatcaatagtatctctaaaacaagtccacggagtcagttccattcagtcagataagaaaacagagtgatttcgtgacatctagaactttatgaatggttccattactgggttttggatgaggaacgtgagctgacattgcagcaggtaatattaaagacaattgtaaccttcttatgaagaagaaaccatgccaaactttgccacaggttactgaggagaatagagttcctccctcaactaatttacagatggtatcggggaatctgccccgatattcacgtaggttcttttctatttttcctaagcatcggctggcttgagaaataaagggacagagtaaaaaagagagaaattttaaggctgggtgtccgggggagacatcacacgttggtaggatccgtgatgcccccacaagccgcaaaaaccagcaagtttttattagagattttcaaaagcggagggagtgtgcaaataggtgtgggtgacagacgagtacttaacagggtaatagaatatcacaaggcaagtggaggcagggcgagatcacaggaccacaggaccacaggaccgaggcaaaattaaaattgctaatgaagttttgggcaccattgtcattgataacatcttatcagtagacagcgttttgagatcaactggtctgaccaaaatttattaggtgggaatttcctcttcctaataagcctgggagcactatgggagactggagtctattgcatctctgcagcctcaacagtaagagacagctatgcccggggggccagtttagagacccacccgcaggcgcacattatctttctcagggatgttccatgctgagaaaaagaattcagcgatatttctcccatttgcttttgaaagaagagaaatatggctctgttctgcccggctcaccagcggtcagagtttaaggttatctctcttgtttcctaaacattgctgttgtcttggtcttttttcaaggtgccccagatttcatattgtttaaacacatgtgctctacaatttgtgcagttaatgcaattatcacatggtcctgaggtgacatacatcctcctcggctgacaggattaagagaataaaataaagacaggcataggaaatcacaagggtattgattggggaagtgataagtgttcatgaaatctttacaatttatgtttagagattgcagtaaagacaggcgtaagaaattataaaagtattaatttggggaactaataaatgtccataaaatcttcacaatccacgttcttctgccatggcttcagccggtccctccatatggggtccctgacttcctgcaacaagatgggatgaagttttttaactagaaagtgatcatagctaagtttttgcagacaccaaaagtatgtataggctacatgacatcatatttcttcctgttcttccatttctttcaccatgttgttgtatataataatttactttctcttcatccacttattctaactaatgtaatagtgtgtttcatgttcctaatcttgtcttaacagggaggaagctctttttttacattactgtttgctctgggatattactattttgagctattctgaaccttgatcaacttagaaaatcatatcaatataattttctaagccattggtaaataaacaactcctttgaaagtaacaaacagatattttgtaaatctttcagcaaaagaaatttgaaaagccaatggctcaaagttaacagtttttcagtggcaaagaagtatttattctggctcaatttagagcaaactacacatgaaacctcattcaaagtgtgactttgctagcagtttactcaacaatgggcatgtcatctagagttcccaacatttttaccatcctgcaatagcagtcataggagaatatgcctcaatcaaaatcaggctaaaaatttgtttcaattctgcatgtgagctgggaccttaagtctttctggtcgctatttggtaggggaccaaatgtggccagtcacactggaaaagtttattttagattgtcccactttgtgacatgcactaggatcttttcatgtggagagttcattttttccctatgaaaaaagagattcaattagtttattcattttgtaggtaattttgagggcattggggaaaacagaagtaggtggtccctcgaagcaacttgtacaataaaatattttggcctcaatttgacacaaaatgatgttgtacattgctgcacataagtcccatggaaacttattatgttataaacaacaagagacactcttagaagggaatacttggctcctttccagtagagttctgaattctggagaaacattcgactgcatgttttctagcaatgagatattcgattcagtccttgagtgtatgtgggtttcagttttgtttgagttgtggctttttatgaaatccatagtggtagaattttcaagatggacgcagtaaacactggccagtcttctgactcagtgaaataattggtttcctggggatttccatacctgggtttgccaaagccagtaggaaacatggggaaaccccatctctaccaaaatacaaaaattagccaggtgtggtggtgggcgctggtagtcccggctacttgggaggctgaggcaggagaatcactggaacccgggaggcggaggttgcagtgagccgagatcgcgccactgcattcaagcctgggcgactgagtgagaccaccctgtctcaaaaaaaaaaaaaaaaagaaaagaaaacacggttagtcacaagttgccttgagtctgttgtgaatatgccaatgtttattgatcactttgctgctcctgactctctttataagaagaatcatcttttgaggggaatatttaatgaactatctccataacctcataaaacagtcaataaatgtgtaatttactttttctctgatgcttaatttgtctttgatgcttcttagaacacaggttttctgcttaatttagctcatcatcaagagagaattccgggaagctttagggcattttaattcattcccaaagaacatttcatcatgtagctactggctcttttttttccctccaccaagggaatatagactgattttccttatttcccctctgacatctttgtaacagggtgattgactcatccctctgcttgaagttagtcttgttagacctaccgctgggctctgagacagaaccttaaatgcggctgatatctcctgtgtttgggagagaaaaggcaaacttcgggatttaaaataaaatattttttaaagtaatgcatttgtgcctcctctaatcttttgcggcttgatggggaaatggattcttccttgccagcacttattggatcttctcccagaagccaaacttgcagagtggaaactggctgcttatagacagtgtttctgctcattgtcaagtctcaattaaccacacagtggtttgtttttgtttgttctgtagaagaaaattctttttcatttttgtcaatataaagaattgcctttttaggaaacaaatatagttatgccttattttcttgagtataaaacttagacatgtttactctccttctgggcaataccagggcattggaacaattttaattccactggtccctcatcagtttatttttgaaatttaatctaatagacttttaaacacataagacattattctatgttttgatcatggttcatttagatatgtctacatattcacatattctttgtgaaacgttttttcttgtatcttctgcccatttgggatcatcatcttgtacttcctctagaagttcctttcatgcggtctactggtgggaaactctttggagtttttatttttgtttttgtgcagaaatgtctttgtttgtttaatgtagtaatagatgagaatctacatttcctccattctggaatgatattttcactggatataaaattttgtgttggtggttattttcctttagcacactgaagataaacttccaccaccctctagcatctattgctgttcttgagaggttaactgttagtcttaatacagttcttttgatgataatttatattccccctccccccaccgacagcatttagtatttttttcttacattttgtgcagtttttctatagtgtgtctaaatatgtgtttgagatggctagatggatcactttcctcagttctgcaaaaactctaaactatcatgaaagcaaatatggcttctgtcattttttttctttccttctaagattccatatatatttgcatataaaataaaatgaacctttttactccatctcctctgtcaatgaattgtttttagtattttccatccttcgtctttctttactgctctgtgggcaattttttttcctacactttttgcaatgcaccaattttttgtttaaacttctattctatgcatccactgagtgtttaatttcaggttttgtattttatttccagatgttctatttggtttattttcaaatatataatctgtatgtcttagcttgttgcagggaagctttcctgtgagatttctcactctgggaaagcctcagctcttgactgtaggctcctcacctttcaaggctatcaaagggtgaacacacaatttccatcatgagcaaaagcctatcagggcaaaagcagcttccttgcttattacctttctaggttcaatgtccccttcagtttgaccctgatcattaagttgttgtagttctctgggtctttaaagatagttttaatggccaggcatggtggcttatgtctgtaatcccaacactttgggaggccaagacagcaggatcacttgaggtcaggagtttgagaccagcctcgccaacatggtgaaacactgactctattaaaaacaatacaaacattagtcaggcatgctggtgtgcacctgtaatcccagctaccctggaggctaaggtgggagaattgcttggacctgggaggtggaggctgcagtgagccgagatcatgccactgcactccagactgtgtgacagcgcaagactctatatcgaaaaaaaaaaaaagctttagtatcaaacccagcttcttaatttttttcagtggaaaggatggtccaaataacctaatcagccattaccagaaatagaaagtccccacattgcatttctgaaatatttgaattagttaacatctgtatcagtcagggttcaactagaaaaacagagccagtaaaagattgtgtgtgtgtgtgacagtaattggcttatgcaattttggtggatggctatctgccccgttctcaatgctgtctctctaatgatggaccctagcaggcaggcaggaaaggaaaattacaagtaggcttggtgactagagtaaccagcagaagctgagcctctttgtcacagagttgaacatacacacatacacacacacacacacacacacccctggcccaggagtcagacaattaaaggaagacccaatgggcaggggaagtgattgcaggctcagctgctgcttcccatcaaccagacacataaatcaacagatcagcaacaatgcctgagtattacacaatgactgctgactcccccatcagccctccaattctcagaagaatctccatggaacccacaatagctggaaacatacagaaagggaactctgggaaatatagtttggctgagacagttggcacaataagaagcatcacactgttaagtaaaaatcagaaaatgttttatttcaaaaatactctgtgtctcttgaaaaattagattctaagattataatagaaacatgcaaagaatttctaaagctaagaagaagctgtcccttagggctgcatggtactccctaggctgtttcaaagattgctattgtctattggccccataaggtaactgagtttgagatttaaacaaaaattaaaacttagattcgcatggatgccgttgattcctcccccttttctttaccatatcaactttctttccccctcctttgtccatatttttctttcttgaggatgagaaaatgtggacatatggtgataaatgtactggatagagggcagaggctcagaagagaatcttccccacctgctagagtagggggctacatgttggtggggttcagcgtcttcccagcaaacaatgattttaacaccgggaataggatgaggtggacttttatcatattggctttcatctgcccacctgccatacatgaaaagtccacacaaccacggatggaaaaccttttgggtttatttccacttctacttctgtgtgcctgtcattgggcatgatttctgtgaattttgctaatactcattagatttttttaatcctcaatgtatctctgttttttttaaagccctattttgatataaccaggatagtgaaaattatcaaacacacacatccaaaccactttaaagcaactaatgtaaaattttaattgttttctagaaaccaatagctgatttaactatgaccttcaatattttaaagggaaaagatggccaacctcaaaccaagagaaatactctcatcccttggtatctatggatggttggttccaggactcccctcagatacccaaatccacagatgctcaggtcctttatataacattgtatagtatttgcatataatctatgcatattctcccatgtactttgtcatttctaggttatttataatacctactacaatgtaagttctacgtaaatagtgttatactgtattgtttagggaatcatgtcaagaaaaaatgtctatacatgttcagtacagacacaaccatccacttatggttcttctgaatagttttgatccaaaagtggttgaatccacagatgtggaacccatggatatgaaggggatgactgtatttacctacagaaaatccaaagaggaaatctactagatgctttgagatatttgatgaagaagtacttggagatgagagaaaaggctattgcatgagggcaaatgcaggcatactgggctgaagaaaacactgaagaaatttttccttccaaataggaaagcagttgccaagaacagcattacagtctctgttttccatgtattatattatatctaaggccatattcatgcagcaaattcaccacttggagtgctgtttatacattttctgtcaacagaaatcaacagacacaagtgttctgtgtttattataatcattagttgaggttaatctttgatttgtcaaggaggtgtttgaatttcctcaaataatattttcagattttaaagagtcacacacacacacacatatacacaataacacatttatacagacacacgaacaactttatacaattggagagaagcttagcagattaaccattttggcatcaaaatggatttcgccctatctaattatgctagtatataaaaatttgtgtcaaagagagtagccagcagcatgtgcctgtgtttggtacataagagagaatagaaaatacattgttttctatctttggctgagaaagatttgtttcctttttctttgcacctttcgtattatccaaaaaagaaaaaagcttactcttaggttttgcaaaatacacagtgagctgttacaattcttaagtttcttattgggtctgtgttttaggtggaaccaaaaaaccctaggacttgaaaaaaatattgtaaagcagtcaagacatctttataattgttgagtaccaactgcagtgcaatcactttagtcaaagcctccatcatctctcccctggatttctaagtagcctccaaactggtcttcctgctgccacatgtacacactcaaaatctattctcaacatgtcacccagaggcatccttttagaacacaagttaaatcaggtcactcctctgttgaagacccttcaatggctcccataatcctctaaaagtccaatacagtctaactccacttttgctgcattttttcttcccttcctccttgatatactctctgctcaggccacactgggctcattgctaggccccaacaagacaggcgaatcccaccttgagccattgtttcctcatctcccaagtgtctgtttgggcaactctctcctgtctttcaaatgtttgctcaaatctgtcagaggctttccatgaccactttattaaaatttacaacccccctccaccactctcccatccctgccatcctctctcctgtttattctgctgtgctttctgtttttcatagcatttgtcaccttctctcattcagtcatacccttctttcctaagtgtgtccttgagtactgccccacccatcagaatataagctccacaacgggaagaggctttgtctgtttcgttccctgacgctcttgagttccagacatccaagaacatcgcctgccatatagctggtgtccaataaatattttttgaatgcatgatgtatgtagagggctaacaacattaactttgtatgttaaaaaatagttctggctctttgcggggagaaaagtagtgcccttaagcccagactccttggactgtgttgttcactgaacaaacagctgtcaatcattcatcactatcttttctcaagtttcttgatggtagtgggattttgtggagaatatctcaaaagtaacagctgtgatcatttttaacaactaatttttacagagagtggggaggccgaggagaactcaatgccaattccattgcatgtgtgggaggccaggtgccttgtcacactgggggtgttggagcagataaaggcaaacagaggagttaaaactgtactctagaaggcactccaagagacgtcccagacaaataattggaaacaccagatgacttagaaatcaatttcattgccacaaaaatgacagcctccctttttttccacacagggggaaggttcctcctcattcttgtcggaaacttgccatgaggatccctctgtttcccccaactttactccccccaaccctcaagctctcaagtggtgaccaccgtccttccggccaggtaggactggatgggaggggtcgcttttgagagaagggtggtgtgtagccatccagttttcaggcatcacggacttgctcgtttgtccttcatcctccctttctctacattcccatcttttttttctgctaaagttcccagccacacccatgatcatttcctcatcctttctgccttcctctggtattaatttctccatcattgtgctctctcttcctgacataaatctcattcttccatattgtcttcttcctctttctccattttgtttctctattggcaaatttggcttcctttttaatctggattttctctcttgcactcagactattattcccactttggaaacatttttttttccatttctgcttctcactacactgttttcccgtggtcctattatcttacaatccagtgggatcaagttaactctcaaggagtctgtttcaatccactcccctcaacttaccacagccctccttttggaagtccagcaaaatttactttattcccacatggtatttagagtgaatggggacagcttgtgatttcctgattctctagaagcaagagctcttggaaatatctcactaatagggatgcttgggccaggagctctttgtcagagcaaacttcagcttgaaaatcagagcagactttaacttacccaaggagatgcatcacgaaaactattatattcccttcactaataagaaaactagcataagccattccaaagagtgtgcaattcttagaaaaaagaagcattcttgtgattataaataaagcaaactttattctaatgtaatgaaaataaaattctacagtgagacttgtactgtttttgtcttcaagtatttgttcatctgtgaaataatgcagtttaaaaacatgtcaaagaattactgaaaataactctttactgagaaagaggtatgagttattcctcttcctcgacatcagttgttgctctggctcagagcttttcagacctttgtgggtatctgaattacttggacatcctgttaaactgcagacacttatctaggatgtctgagtggggccggaaagtctgcctttctaagtagctcccaggggatgttgatgctgccacagttccagggagcacattttaactggccaggatgtagtacattcctacctccaggcttaagcacctggaagaagcttgaagcaactgtcatggcattttaatgtattttaactttttgacccaatcacaagcctgggcctttgatttttttttttttttttctactgcctgtaacactagaaagagggacacagggaatgccatgtcagaacaaagtcacaacatggctatgaattctgttcatgtcctctcaacagtgatcattttgtttctgtattaccttgtaatgaaggccatattggaaggtgagtagaggaccgacatataatatcaatttctggcttctacaagaaggcatcagggagaccttgacaatttcttcttcgtttggatataaatgttaagactatcttttaaatcatcagtgatgagcaccattcgatttttttgttgttgttactcttgttactgccctggtagttttgtgttttttgtttgtttgtttgtttgtttgtttgtttttgagacattgtttcgctcttgttgcccaggctggagtggaatggcgcaatctcagctcaccacaacctccacctcccgggttcaagtgattctcctgcctcagcctcccgagtagctgggattacaggctccctccactacgcccagctaattttgtatttttagtagaaatgggatttctccatattggtcaggctggcctctaactcccgacctcaggtgatccgcctgcctcaggctcccaaagtgctgggattacacgtgtgagccacggtgcctggcctgccctggtagtttttaaagctattgtgaaacatctaataccacaagtagaatatcttattttctcaggggatgcaaatgacagtgggtggaggagctaagaacacatgacttaggttttatttttcaaaacaaatgcaatagagacaaaaatgctgcatttttgttgctgtgctctttcaggcttgtaatagcgtgttcacaacttgtattccctttagaatgtcaactgagatacccactggggaaaaatatttattttaagaaagagacaaatatccccacaatacctagacttcaaacatttaatcatattgttagtttgtttggtccctttagctttccactataaaagatgacataaaaataaatatttcacacttttcatgtcaaaataggtctcgtggctaaagcagaaaaagaaaatcccattatagcattttatatttgaaaaaagaacaaaacgttcttttataatagtgtatggaaaaaagatttttgtactaattttaatatttccccaaatgttttttgcattcttgttctttccttaaacatcttcattcatacactacagctgaaaacaaaatgatgaataaaaagtaatagtacataaggccgggcatggtggctcatgcctgtaatctcagcactttgggaggccgaggtggatggatcacctgaggtcagaagttcgagaccagcctgaccaaaatggtgaaaccccatctctactaaaaatacaaaaaattagccgggcgtggtggcaggtgtctgtaatcccagctactcaggaggctgaggctgagatgagataggagaatcccttgaacccggaaggtgatgttgcagtgagccaaggttgcaccattgcactccagcctgggcaacaagagcaaaactccatctcaaaaaaaaaaaaaaaaaaaaaaaggaatagcacataaaggtataaagctgtcatgtgtttgccaaaggataatgttttctattatgatagaagattggccccaagagtagtcatcacataaatagttggaattttacattttttaatttgtgagtgcaaatcttcattggtgaaaaaatatattccttgttatcagctagaccttaataggtgaagctaagtaggtgagttatacttttaactgtggtaacccattttttaaatagctacaaatcactgtagagcgagatataaaataaacaaaaaagatgtttgctcattttatgtatacataagtctttagataaagagctgtagaatgaccaatttctaaaaacaccaatgaaacattagaaaattataaatatatgccaagtaattattaatgcctgctttattctaggatatgccaatttcaatagaaaacacaaaagaacagaaaacatagttcctacatgctttgaaataataaaggtcagtttaaggccgtagaaaggcatcaaaatatttttctgacacataatactaaaaacaaaaattagcatttatggagcacttactgcatcatcaaacacctttaaagcacataacatgtgttatcttcttattcttaccactgtacatttggagaaactaaggttcaaaaaggttaatgaactttactaaggtcagacaagaagtaccagaccttggacacaccatgtgtccttcagctttctaagtatatgtctgaagctaagattttatgatctagatgtcaaagtaggtgacttctctttcttatgttgacatggataaacaagcaataagggtacaacacctgtgcctcaatatacttatctgtaaaatggaaagacgacgagcctctttgttaaagaagcatatctctttgagtggctagaagggatacacaccacacatgtataccaaacactgtttcatttgctggtggcatagcccagcctccacaagatcgtggctaaattgtgccagagatttcacccccaaactgatcacaacagcacaaggcattaaacatcacaggcagcacgttcacattgctcaaagtcacttgtttttagcaaacttctgggagaagaacatctctgaggactagattttagaaaacctccagctctgtgaaaacaggactcacctctaggaaaccacaattagtcacagtttctgtcactgagaggtgggcagctgttttccgtgttcatcgcatctgctggggaagcaatgccaagcagaaggaaagggagacacctgaggcacagtgtggcctgcacagttgggttaagataattttgagtcaaccttccctgtctatggctgctgaaaactcatagttcccctctctaaagcagcaggattgaggaagggctcacccactctcacctccttccaactttggctttcctccttcctctcatctcctctacttgcaagccattcggcttatacatgtcaatgctgtttcaacaacagactcagtgggtttgcttcccctgaggtcttctttctctctctcctcttcccattcctcctcttaagtctgtctcttgccccagccttagaacagaatccttgttaactaacccttcttctgtactatacaagagaggagttagagtacacgttgggctttgcaacgggtctgctttcatttgttaagcaattgttttttatttggatttcatttattcatttaaatatttatgaagccctactacttaccctcaggatgctaggcattctaaaggaatatcttgctagagaaacgtctccgtttagattgtaccttaagtttcagtcacagcacagaaaagggcttctttggaacctgtgacaggtgaccgtcttctccttttcctctgcagttagattcagggcgactgctttgggctaaattatgaaagacttaagcaggagtaaagagatttttctgaaagtaaaaatatctaaatacctaaatagattcccgagggctgttgtgtgtctctttgaagatctttaaatgcggagacaaagaaggcgtctaccagcagagggttgcgtatgtctgagtgacctttttatgatctcttttgagtccgtgaaggatgcgattaattaaagtcggaagtttgtcactgaaataatagttatgagatccagagaattcaaggtgttggaggactcattaagtagttgcataaatatcatgctgaaagatttaatgagaccacagggtcacttatagaacgatggtgcagagatgacctagaaaaaaataaattagaatcgatattgtgcttctgaattaacagctatagattgctatattaacacctgagacataaattctataattatatcttaatgatgaatattgatgttcttgtcacggaaaaaatgaaaattgctcacatttagtattttacttatcaatagtaaaataaatgtatatatgcgtgcttatttctgtgacatctgggaaccgtgaatgctttaagtagctacaattaaatgaatagtgttttttttttttccttttaattcaaccaatagttattaaatgcctactacacagcaggcactgggctaggtgctgggaaaaaacacagatgcacccttttccccccttcaagttgattatagtatagtgctatccaatagaattttctgcagtgatggaaattttccatgtctcagtgtccagggcagtagcaactagccacaagtagttattaaccatttgaaatgtggctgatgcaactaaggagttgaattttttattttattttaactgtttatatttaaatataaatataaacagccacatgcttaatcttagtttctaatgtgtaatccaccgttgtgtcaaaaaggattgcactgggacaaaagactatgttcatcattataaaagagctgtttacatgggaggaaaggctgacacataattgaggaaaccaaggaaggcttcacagaggtggcagtcactgagctgagacctagaggagcagataagaaggacttcctcatgacaatatgaaaaagcctgagatgcgagtatcatgttacttgcatcttgtggaactgtatgtaatttcatcatttgcatgttgtgttactctgctcagcttccacagcaaaatgtcacagactgggtggcttcagcaacagaaatttattttttcacaattctggagtctggaagtctaagatcaaggtgcccgcgagattcgtttctggggaggcttctcctctgggtttgcagacagtggctttttgccatgtcctcagatggcctttctatgcacatgcacagagagagagagagcgcatgcacacgctggcacttcttccttttcttataaggacaccagccccatcagatcagggacctactcataggagctcatttaaccttaattacttcattaaagatcctgtctccaaatataatcacattgagggttagggctttgatatatgaatttggggtagacacaattcagtccataaaggaagtatatctctcacacatagctcacacaaattctgtagaaaactatcatctatttacctagcatctggtgattttaatcactgcttttgacttgcatagtgatagataacatagggttctagaatagtaacaggtataaaaaatacctaaaccaaagtatccacctcacagaactcgaatgtaattaaatattgcttaagcaaatattaattttcctttattctttgaagacaaaccagtggtgagctggagcttactatctaagctcataagagtccattttaaaatttttcagggattttgtgacctggttattcaacacaaccattactacaaattaaattatataaactttcaatgaaataaatttattcaaaacaaatgtaacaaatactcataactcatcatttaccaattttttcctagagctttgttgaagcactttttaaattttttttaagacagggtctcactgtgtttcctggctggaatgcagtgaagcgatcatggctcactgcagcctcaatttcccgaggtcagttcaatggatcctcccacatcagcttcccacgtagctgagaatacaggcttaccaccacacttggctgatttttttttatttttagttttgtagaggtggagttttgccatgttgcccaggctgatcttaaactcctgagctcaaagcgatcgtcccgcctcagcctcccaaagtgctcggattacaggcatgagccaccatgcccggctcacttacaaataatttaatacctctcactattgccggtgctctcactattgctggtgctctctaggtactttgcatctttacatctactacgcaccatcggtagtggtggctctgacagtctgctactgtacacctcctcccaacgccttattcaaggtcacgactttgttactttgagactggctctgggcaagtatttacaccattgaaaatcaacaatctctaaaactgggccctttcattttccaggagagccgtatattaatcatttaccggcataccactggcacaaaccttaccctctttcatggtacagggttttcccagtatttatctggagttcctgttgcagctttccatggttgaaacattattacccatcctttaaaaacaaaatgaaactttttactgaaataaattaccttctttaaagcttttttttctgtttcctccattagacagagcctgtactgctctgttgatctatgaactttcaggccctcagtataaaatgttttaaggacaacagaaaagtcccctaaaacttacacctagcattgacaacatttttctagccccctcagcaatgtcttctacctaaaattgcctcagctgtaacgtaacatacctcctgctgctagtactagctcacagctaatactaagcgtaacacctgactccattttacaggggccactttttttcctctaaaagttttatgtagcagtaagtgaaatagaatagatgctggggtaaacagcagtttccagattaaatgttattttctgtaggaaacatttctctccaatgttgccccttcacaccatccccaaacaagtaaaaagttgctcagactttgaaaatgtaataccatctggcagaactcacattcgaccttttattaaaactacaattatgtcacacctgtgaggtttaaaattcaaggctccggaagttaaagcgacgtgtccaaggttacatggaaaattcttgagagctcacagtttcctgccctggcctttcacttcggatgtacaccatagtacgtgtgttttctgattagagctctcttcagttatgatttattttaccatcataacattttgggaggctggtatgagggagagtatagaagaaggaattcaagcagaaaaggttaaatgatttacagttttcgccctttctccaagggaaatttatgtgcccccaaattttagaatcatgaatttagattgaatgagaatggataaaatccatttacagtcaatttagattgcataagaatggatgaaatccttggcatatctaaagaatggaaaagggatcccaggaggtagttctggataacttttaacttgaaaacgtctggtagaggccgggcatggtggctcatgcttataatcccagcactttgggagggcgagtcaggcagatgacttgagcccaagagtttgagaccagcctgggcaacatggcaaaaccctatctctacaaaaaatacaaaaattagctagctgtggtggtgcatgcttgtagtcccagctacttggggggctgagagatgggaggattgcttgaacctgcgaggtcaaggccgcagtgagccaagatcgcactactgcactctggcctctggcctggacaacagattgagaccctgtctcaaaaataaataaataaatagtctggaaggatagaaaaagcaagtgagaaacaaaaaagggaccacctatgaggtaggaggaaaaccaagagtgtcaaacaaacccagaggaaaagcagtgcatgagtatgaagggcatgatccccagtgtctaaagttggtgaatgctacaggagagtcttctttggttttagtatccaggaggtcattattggccttgatcttaatgaggaatcagccaaaaggtggggaagggaaccaggtaagagtggattaaacaggagaccaggaacaggagacagcttatctaacactcatttggaggtttagactcgaagggaagcagggatctggtctagtaatggaggaaataggagggaaaatccatttgagaagagattaatgaatccttctaattcatggttcggtctagtttatcatgaaacactaaatcaaatgaaagagttgcttctatagccctgtgcacttccatcagcagattttatattgagttgtgcagatcaaccccattgccaaggaagaacaagaaaaagatatttcacctacattaatggttggcagagtggtttttccctctgataaattaatattcaatggaggaacaatatgttaatgagtatacagcatatattattcagaacaataacaataaaggatttctgtagaccttgtttaaatgttaggttttcttttgctgttgagtacatgaacagcaatacttacacaacttacatcatgatcgtcagagccgatacagaaagccacaggcctgcctggctgctacactgaggtgtctacagaccaagaggcttcacatgtgcctttctgtaattagtatttactcagcctcctatagcagggaaaatattttgcacataataaactcatatatttccttacccattaaggggtaatgtacttaagcacattttcctgtaggatttttaccagcaaggtcgagtcatagctccaggagaggaaagaatgggactcactagaagagaagatcctcattagcaagtgaaaaattttgtaaaacagggattacaagagaggaaggtatttttttttcaaatttttcaaattcctttaacttcttctaacatggaagtcagatctggggggctagagccttgcttgctatatacccaaagatgacagaactcaggataagacatagaaaaagagaaaagcctgcccccttcttcctcaggccttggaatcgttggaagaagaaggggagagagagaatagagcaggaaatgagactttgtatgtacctctctgacttctaccctccaggcgaaaatccggaagattctggagcaggctcatgacacctcatatcttgtgtgtcttagaagggacacgaaagctcttgcatgtcctggtgatgggaaatggtggtgtgagcgggggctggtgtgagcgggggctggtgtgagcgggggctggtgaaagctgggacaagacaaagaggctccctctggtgttgacttcataactgaagtccgctggactcaagtaatgagtggacttggccagactctaccggggcatctcgccccaaatggccagcagtcttgtgtccatggagaaatctagaccaaccatttcacagcacagacctatgaggatgcagagagcagcctggcaggtctaagtctgtgcctttctcccccttggaagacacactgatttcctgaatagatttacccaccatttgggagagctgaaaatgggaaggacaactttacaagcttcaactttacccaaagagactgactcatgcaaaaaaacgtgtaaaaccaatcctatggggagtgaaatgttgaagaaaccataaggaaattgtctatttcctttaacagttagaaggactagggcagcttcccttcctgtcatgggaagtgtggctcctacgccctctgggagagtggtttgagaagtgtttccgctgtgacttaaattatagccatttcccgagcaggcagcccagggactgtggtaggcagtgccagctactcggagtcaattgaaagggaattggtcgcctgggaggtttctaacctgatttcaggtttcctggacaccgcgtcctctcctgacccaacacctgctgtgacagatagatgtttgtaatgaggtgaataacaaacagtctcatgaacattaggtcacatggaacaaaaggcacactggcttaggtggagcctgcattttcctgtttttctaatacatttctctaccaagtctactcactcgcggaaagctttggcaagatttttaggcaaagcctttaaactcacatttttttgaagaaaaaaatgtttgctatttcatggctgaaagagagactcaattctgctgttacattcagaaatctgtttttttgtttttaaatgtctgtttcatacttaaaatctcagaatatcttactgagaccagctctaaagtaaactatttcaccacactcaaagaagacccaaccatcataataaaaggggcagaaagaaacattgggaggtgatggatttgttgtaaaaatgaatgagggccaggcacggtggctcacacctataatcccagcactttgggagcctgaagtgggaggatcacttgagccaaggaaatcgaaatcagcctgggcaagatagtgagaccctatctctaaaaaaattttaaaaaattagctgggcatggtaacacatgcctgtagtcccagctactgaggaggctgaggcgggaggatcacttgagcccaggaattgcaggctgcagtgaattatgatcacaccactgcacagccagggcaacagagcaagattctgttttaaataaataaataaatattaatgaataaaatcaaatattcctaatagacaaactggcttttgacttttctggtggtatttcaattgatttttcctgtagcggaattcataggtgaatgcctgccacagcaagggtccagtgtgaatgaagctttctatgtgatttgtaggtttttcctctgccctgatgtgactaccagaagtggggttcagctgggagttttagaaatgactttttctttttatttaaattttgtgcctaattatattcttagatgtattggtcagagctttatcatgatcattcgtatatctacagtccctcagtatttaagtcttattagcaaaagtaaatgtgaaaaaggtattgtgtgagattttacaacagcccaagatgaagagtatagatgtgtgtggtgtttgtcgatggcattatgcttctatccttgttctgacaggattctggccttttggaacattctgtctaaggattgaagctaatttagttgagaaacctaaatattacatttcgagaatgaatttaacacctagatttccaatcttgaaattacaatagtcactcacttatcaaagagtagagtagaaaatagttctttccttttaacatcttttctctcttaaaattggaggacagggatttataagtagtgttccatctatccatccatccatttatccatccatccatccattctttcatccacctatccacctatggtatgtacttgcatgtgtgtgtgtgtgtgtgtgtgtgtgtgtgtgtaaacatatttaaaaggcaggtttactcattgcttttggtacagttctctaaactaaagaagcttatgttggtacttttattgtccatgaaattatattatgaaacaataacaggtaggaaggatgggttcccataaatatcctcttactctctttgcattttgtatcatgtgcactactaatctcttacatttgttaatccattgctatggttttgacataagttggactgacaccttcatttagcagatgtagaaagaggcccagagaggtccacttacaggcaggagtagggccaggccagaaatctagtctcccgtctttttgcttttcttagcaaacagattccccaatgagcagacttgattgtgtcttgctgcacagcaatccacactaaccatacaggtgtaatgtccattatctaaaaaccccagtccgctttgatttcggatcatgtgcttcccttctctactgtgcagatgtcaggtaaacaggtcatcgctgcactgcttcattgtttgttccagtcttcttttctctgggttccttcctttattcattttcagctgttatgaatttatacacaattaaagggggagggaggcatattaattgaaaaattgatgacataaccttgagggctttgctttaattacctccagtgtccaggaatgacagttcttcagatttatcttctcttccttaatagaggattttcccactggacagacttctggcaatatctggtgttcagactgtagtgccatgctctgctatttttattactcacacaaaagtgcgttgatgggccatgggcaagttaaatttatcatcttgcaacggtgggatgaaagagccattgctaaccctggcaaacctaaggtgtacaatttcacaaaattacatagatggtaagaggtggtgttgacacaattggagctgacactttcatttagccgacgtggaaagaggcccaagaggtccacttacaggcagtggtagggccaggtcagaagtctaatcttcagcctccttgctttgtactcccgacctcaaacccgaccactctcttctcccaaccataatgcatcttagtgagttacagtacaacaaaagatctagaaatatctgactattaaaaaattatctgctgatcataaaacaattgaaaacatagagaagaatttagttaggggctagatgtagtgtttaaaatttgaaaatcaatagttttcctctatagcatcaataatatctatctgtctatctaattatgtataatatgaaacaaaacaacagaaaccataagatatattaatagaacacatataacctgtttatagatattcctaaggaggattgtggcaaagattcctggaagtgatatttaatggtatcttataaaatggtagtgaagagaaaagtaaaacagtggcaaagaatatgaaagatgagataccagtgtataagagagcaataaataattaaaagcaaacaaatgggaaggaactgatctttcagaaaaaaccaggagatacagctaagtgcccagagcacaggatcccatctgagagggacactggaaagagaaaaccaagggaggtaaattatcaaagaaatattataagaaacattttcacaactgaagaatattaattaccagactgaagggccaaactgagtgcccagccacaagaaagaaatgacccacacttaggctccaaactggaaaattttggaataccaaaaacaaaaagaatttttttcaacatttccagaacaaaaactaccactcacaaattgaaagtcagaatgagatcaggcatctctacagaaaatgaaagtttgaagagtaaagcaaagcattcaaagtcctaaaataatttaatggggaattctgaagccatactatcaagccagagaatagaacaaaaacatgttcagacatacaaaatactgtaccatctatatatttttctaaaaggcaaaacaaattctgttctttctataagcatatatatgaatatgaatgaacagagaatttctggacatctacataccaaacttaaaccatggtttacctgggggaggggactgggattagggaggtggccaaagggtgctttgcagctatccatattgtttgtttgcatgtgtttactgaaataatgtaattatgtattatctgggtgattaaaagtattcttcatgttaatgcaagataatccattagtgataaaagttagttttaaatgagagcttgtttgaaattctaagctttcctctaactgttcatctggaaccacttctttcaagtgccctttctatttctagctttaaaaagaaatccaattcaggctaaaaggagccattatagtttcttgatatcatcacatttctgttaatgagcccttcaaacttgattggttcttagtagaattacagtgattctgaagcaatcctgaagtcacctgtttccctctgccatagaaaatgccgcatctgttgctgatataatctaagataacaaaatatcaagaaaacaaaacagagagacctgagcttccaatgaaaactctgtataactttttaaaatatgtttaaatgcatcaatgaatgggaaaaaagtagagaacgctcagaggacaaggtccaagtgaaagcaggtaccagagaggtgagcagagcatgcaagctgtcctttatcttgaaggtgtctatcagtgtcagcttggtagaacttggtattgaaacttggtgtagaatagaggaggaaaaaattctccctgagaattcatgattgcaagctggtcctcactggggggtttgaagcctgaattcaccccacctgacaaactcagggccagactgaagggccaaactgagtgctcagcaacaagaaagaaatgacccacgcttaggctccaaactggaaaatttcagaataccaaaaaacaaagagatttaatttaaatctgtctcatcctggaaatcctctgggctcctgacataattaatcagtttgtttaaaaaggaacccatctttaaaccagaccttaaactattactacagataaagttccaggaaattcaccacatgaaagcaatcacaatgaatacgaagaaagtccatgagtgagaaagagcaaaaataacagacagcagaatgacccctacaaaaacttgagattttggaattatgagaaacagaatattaagcaagtacttttaaggttgacaatatgagtaaaaagcaactgactaaaaaaagcgatgaagcacatttgcaaacaaacaaattgattctctataagtgaaaaatatatttaaaatgcaatgcatagttatagcaacagaaagagaattagtaaatttttagtgatctatataattagcaagaatacagcaaagtatcaaagacatggaaaatatggtagagagatcaagaggcacgaaggatagaatgagaagaggtgagagcaaataggtacaggagattatctgaagaggttatgtttcagaattaataaaattaattctggattaattcatagattcacaaattcatagattaagaaatctcaagcatagtgtattttaaacaatgccacatctaaatataagtatcatatttaagttccagaaacacaagtatcatttaacaatgaaagtaataaagagatttttagcacagcccaggaagacaaaagatggggagcaaggatacagtgaggactgagggtttcccaccagcaaatcttcactaaaggaaatcatatctccatatgctagtcagacaaaaagatgcccactattatccctttctgttcaatgcagtaagacaagaagaataaataaaagatacaatgttcagatattaaatgaaaaaatatttgcaaatgatgtgaataactattcagaataatctacagataagttaatgagttagcaaatatgctgaatataaaattaatttataaaaatccatttcatttccatatataagcaacaggcagctagaataacttaaaaaatatataacatcataacaagtaaagttattattgggtataacatcaaacaaggtctattataacatgcttatgaattggaagagccaatagcataaaaataagttctggccaacatggtgaaaccccgtctctactaaaaatacaaaaattagctgggtgtggtggcatgtgcttgtaatcccagctacttgggaggctgaggcagtagaatcgcttgaacccaggaggcggaggctgcagtgagccaagattgtgccactgcactctccagcctgggtgacagagggagactcagtctcaaaaaaaaaaaaaaaaaagttctcccaaattgatctatagattaaatgcagtaccaaaaaaagtcaacatttgtagaatttgacaagctgattccaaaatttttatggtaaagcaatggcccaggaattaccaagatgtttctgaagtgggacagaacataaagattcatcacatatcaaaaatcattctgaatatgtagtaattaagatattagtgggatactggcagctttaacattggcacaaatatgtgatctatgaataagcgcacactgatgtgagaacttgatttatgagagagatggcactggagacatgtggagaaactcaggcttttcaataaacattgaaagaactattattattgatatggaaaaaaactaaattggattcctacctcacctcacacacaaaaatcctatctatgtggtttcaagaattaaatatgaaatataaaactataaatctttagaatattatgtagaatacctttgtgcatttgggaaaaggaaggtttttctttaccaatatagaaaaagaacaaaatttaacagaaagattgataatttgggctaaattgaaggtaagatattctgttcatcaaaagacactttgaagagagtaaaaagacagataactcctacacttaaaacttaatcaaaaattagtgttatacatcatcctttgctaaccatgagggatttgttctaggacccaccccgcccagataccaaaacctgcagatgctgagcacctgacacaaaatggtgtagatagtctcaaattgatttccagagggtttgcaccaatttttacttccaccaacagtttacagttgtcccagatgcaccatatccttgaaaattacttaatatcattagacttaaaaataaaaagtagcaaaacatgaatccctggtttagttggttaaataatggtccctcatattcctaaacacttcctcagatatgccagtgtagaggtataaaatagtgtaacactgtggtttatttatatgtattataaatatatattatatatagtaaaacctattcatcctcctatatatattaaatcctctccagattacttatactacctaaaatgccatataaatacttgttacactgtattggttataatttgtattatgttttatttatgtttttttttttcaaaattttttgagttacaattgggtgaataggtggatacgaattcaaccagcagatacagagaacccatggatacagagtcaactgtattatatagtattatatatactctatattatagtaatatattataacatagtattatattattatatatgaaattcctacagattaagtgaaagacaaacagtagaaaaatgtggaaaaactcaaacaggtgcttctaatatggaaaaacacaaacgattggcaacatataaataggctcaagctcattagtaatcaaagaaatgcacattgaaaccacagtgttatattattttatgccttcagacaggcaaattttttaagtctaacaatatcaagtgatttgcaaggatatggtgcatctgggacaactgtaaactgcaggtgggagtaaaaactggtgcaaacactctgaaaaacaatttgagattatctagttaagttgaaggtgtacagtcctataaccagaaattcctcatcaaggtagaaactccctagagaaattgtagcatatgtgtatcaggagcgttgtgccagagtgttcatagcaacactctctgtactagaaaaagaaatgaaaaataacccacctataatagtagaataaagcaatgttaatatattcctacaaaagaatattacacaacaactaaataaatatgacttgtagctacacataacaacttggataaatttcatcatcaaaatatttagttaaaaaaacaagtgggaggaaaatatatacagtatgattcaatccaataagtttaaaagcatgcaaaatgaatcaatattttagtatacaaatatgataccaatcaattttttaaagtatgagaacaataaaaccaaaaaattcaagactctcattacctctgaggagtcagggaaggagagaggattttataaactagtcagtaggtgtttatgcttcaatgttctttatatcttatgactattttaccctcttttatatgtactcaatattgaagagatcaaagctatcttgagtagaggtaaaagaaaaatttttttagttaaaaaatatatttaaggccgggtgcggtggctcatgcctgtaaacccagcactttgggaggctgaggtgggtggatcacgaggtcaggagttcgagaccagcctggccaaaatggtgaaaccacatctctactaaaaatataaaaattagccagacatggtggcctgcgtctgtatcccagctactcaggaggctgaggcaggagaattgcttgaacctgggaggcggaggttgtggcaagctgagatcacgcctctgcactccagcctgggcaacagagcaagattccgtctcaaaaaaaaaaaaaaaaaaaatatgtatatatatatatatatatatatatatatatatatatatatatatatatatatatatttaaatgacacttttaaaaatggagggaggagagtagttatgatatatcagtttactgtaagaataattttgacagatgggatattttcgcatgtcagcatcattcaaattttttattatgttaaactgattaacagtaattacatataaaaagtggacattcaagtcattcagataaagccactaccccgctctgtgggtttgtcagaaggtgtcaagtcctaccttctcagtaggcgtctacacagcctggcgctgtatccctctccacccgccccctcgcagtgtgcactatacttccactgttccagctctttgtctgtccccagatggaaccatgcttctcctgtttctgctgctaggccacaattcctccagatatctccacactggtacctttttctgcagttcttggttcaaatgtttctttgcagagagactttctcaaatggcagagtagtttctatcttttttccttttttttttcttttaatgtgtggcaccatcattctgaaaatatcttattcttgtgattacttgtttataacttgtttcgtccccacacaggggccgcgtctctgttatttctccaagcacctggcatagaggagatattcaacaactttatagaatgagttaatattttgcagactaaatagttgggcaatagaaggttgcatatatattcttattttttaaattggggaaacagtaaagttcagacccattcactttaaatattcatccaaaagatatttattaagcatttagtatgtgtcaggcactgcgctgcatactaagaatacagagtgaacaggaaggtagccaggaaccctgtgctgggaatggacaggcctccaggtgcctaagaagatcagagtaaaatcaggaaccaaatgatctggaagctaagttgccaaaatactgtgggtaggattctgggcatttttcttcaataattctatagtgatacctaaagccagtgtggagattaaaggatgagactatcagaggtaaggggagctttaggacacaaagctagtcattgcaccaatgccagagtttccacgagaaagaaaaactaaaaagcagcaaaacacaagtccctggattagttggttaaacaatagtccctcatcttcctaaacgcttcctcagatatgtcattgaaaaccccagctgggaagacccctctgagttccaagactgactaatgaaatgatatttctacctttgatctgttgcaataaaattaagatgtgagtagaagagaacagagatatctctataaagttccctgttacagctcagtcagccctttgtatccatgggttccacatccatggactcaaccaactgcagatcagaaatatttgggggaaaaaacggtgtctgtactgaacgtgtatagatttttgtccttgtcgttattccctaaatcattgagttaggtattatcattattccctaaatttacattgagttaggtattataactagcctagagatgattcacagtgtataagtggatgtgcaacgggcatatgcaaatactacaccccttttttgttttttgttttttgagacagagtcttgctctgtcacccgggctggagtacagtgacgcaatctaggctcactgcagtcttcgcctcctgtgttccagtgattctcctgcctcagcctccctggtagctgagattacaggcatgcgccactgcgcccagctaattttcgtgtttttagtacagatggggtttcaccatgttggccaggctagtctgaaactcctgacctcaggtgatctgcctgcctcagcctcccaaagtgctaggattacaggcctgagccatcatgccccgccagagccaccacccctgcctgcaccactttaaataaggaacttgtgcatccgtggattttggcatccaaagagggtcctggaaccaatcccccatggatgcctagggacaactgtattatattaggttgctaatcaattcgtgtacactttacccagttttataccatattcaactattgatatttgatttgacatacctgtggccatttttgaacaaggccattctgaactaatatgtcttgatgtgagagcatattccctagtggcatctttgtttctatggaatgctctgattcaatttatatccctttgatttatatcctgtttccatcagggaacaagctctcagcactaacgccttctacacaggaatgcctctaccatctctttcagatagttcagaaggcccttgaagatcttacacattctaaataccctgggacactttccaccatatcacaaggtcattacaattgtctgccagtgataattttgttccttaggttccttaacatttactcctggttctcggtgggtttgtcagcatctcacagggttggcaatgacacccactatacttctctctatcccgccttggggaatcagtttaacatcttatctccttgcttgttggaattgacacatccagcattcagactgtccatgctacatgtaggataaccaacaaacaaaattgcgttttttgaaacttaaaagctcaatacctttatttactattagactgcagattgttgggcctgtaagtaggacacacattgcctagagtggtccggctctgtcctttgccatctggctgcatgaatcaatgtcagctggatacaaatatatctctggaaaggggacattgggaaaaagggtggatacactaagcatagaccccagaacctgttctcagaaaaatattttcatggtaaatcctgagatattaaaggacaggtttaaaatgctggctgcatgctttctctgtcttttattttcattggatgctagaatttgaatgggccctgtttctgctttattaatccatattttgtggcaggagaaattcaggagaactcaggaatggcaggaagtggatgagaaagagtgtgtgatagaaactgcaagtagccttaagggcaaaacaagaataatgctactgagatgatgaggcttgcatatccagctggctactgtattctggccaccagaattggatttcagcttggattttcgaggcttagcagtacaatgaggactgggattcataaattataattataagtgttatttattaaaaggtagttttggtctcagaaggaaccaaataataataatgcatgcatcactgaaagataaaaatccataaaaaataattggggaatatgagataaggggaaaattgagaataagaataaaaaggtaacttggagtaagggaggaaaaattagtaagccaatcataacacacaccccataacatcctggatattggttgatgtctggatattgagttcatgggtcaacactggccacagaggtgaagcatcattggagtagcttgggcttgcaaggaaggttggcattatatctcttcccatccccagatgccaccatagactcacctacactatccccaggtcctcattgtactcattttattcattcacacgttttttgaatgtattcaatatgccagtgaccaagttctggagaaaccatactttgtaaaaagtagacattgtccctgctccagtgaaatttacccccccaaaaaaggagagaaggaaccaataaacaaatgatctcctgaactaattgtctagctacaaacccagacaagttatctgaaagaaaggagcatggtgccaggaaaacccagactggtctgagcaaggtaggtataggggatcgaagatcaggcagaacatcttggagcaagtgatatttgaactaagagccaaaggctgagtaggaattaactaggtaaatggtataaggtctggtagagtgagaaagagtgtgtggatgaagagaaaccctttcagatacggagaataatacacgcaaagtccctgtgataggagggaccatggtgtgtgcaaggaactgaagagtcatggtagatagaccacagagcatcaggaaaagaatatacaatggagccagaaaggtagacagaaatgaaacccataaagccttggctgctgcattaacaattttggcttttatcctaataagacttaaggctggctgaaggtagtgatatgatcagatttagactttgaaaatatttttattgattaatgtggggagcaaattaaagggtagaaggggcaagcgggttgcaaaagattagctagggatattatgttagtgcaggcaagagactctggcagtgtggagtcggtttatgacagtggtgatggacagaggtagaaggatgtgagaaacagggcctggagccggattggctgtaggatacagggaaagggaggagtcaaggaattgcctagacatgtggtttgtgcaactgagtggattttgactcccattcctgggctaggtgtcaaactgccaaactgggaatgagggggagggagccatgacagcaacgttggacatagtatgactgagatgttttcaggcatctagagaagtcatgtggatggtgaaatgtaccactttggaattgagaagagaagtcttagctggagataaaagatttgtgagtcatacataaaatggaaggaaagtggagagaatatagcatgacaaagaaaagaaggcctcaccaggcgcagcagctcacatctgtaatcccagcactttgggaggccgaggcgggtggatcacgaggtcaggagatcgagaccatcctggctaacatggtgaaaccccgtctctactaaaaatataaaaaattaggtgggcgtggtggcaggcgcctgtagtcccagctactcgagaggctgaggcaggagaatggcatgaacccgggaggcagagcttgcagtgagcaggagatcgcgccactgcactccagcctgggcaacagagcgagactccgtctcaaaaaaaaaaaaaaagaaaagaaaagaaggcctcagatggagccatggagagttttcaaggagcaactaggcctaggattattctaaactcagcactaggattgtaagggcaagtgtttattttctcaccattaacttaaacttcttctctattgttttgtgttacccatgacagaaaactctcactcatctctcactctagaatttcctcagttaaccctaaatcatctttgccaatgatgatagaagtttcactctaaatgggtttaatcaagatgaaaaatataatcgcatcattttataatgaataagacttcacaggtatgctaaatggttgttaccaaagtcatttaaataatagtgattttatgcgtctgtgtttcagtggttggcttctctggccttgacctgtgagctcagcatgaagtgctgagatttgatttaagatgacctagagtttatgtactgtcatttacttggaaattatcactttgcgtatttcagatgacatctcttaggtcagttttgcaagttcattatttcaagctgtctaaaggaggtataggattttgtaacaagtaattaaggaaaccaccataaaagtttaagtttatactatatgatagttttcattatccaatgctgcattttttgtaatagacattgaataggagggaactatccttactaagtggtaggcatttttccccatgattatttgttcactgaatttggaagtgatggaattccaatgaagagctatatcaggatcatatgcacatgtgcagtataggtatttgcatttgctatgtgtgtttccctgtgttcgcgatgtaatatataaaatcaagacatcaactgttgtctccccagagttatggctatataacttaagcagcaaaggaaaggatttaggggtccattttaatgtaggcaagagataagaccattttttcaagttaataggaaagaaaattatggagctgtactgtccaaggtggtaaacactagccatacagggctatttaaatataaattattgaaaaattgaataaaatttaaaattcagtttctcagtcacactagcacatttcatgtgctcagtgttcccatgtagctagtggctgtggtattggacagtgccaatatgcaacttttccacaattacggacagttctattgaatagtgccaaacaagaacagggttcaaatccaggccagtgcctctgtttgcacagccagtgcactaagaatgattttgacattttgaacggattgaaaaataatcaaacgaagaagaatattttagagcacatgaaaatcatttgagattcaaattctaatgtcctcaaaatttctattgagcacagccatgtgcattctgttatgcattgtctatgtgttcacactacaacagctgcattgagtagttgtgacagagactttatagtctgcaaagtctaaaatatgtactccctggctctttaagaaaagtttgttaactcttgagctaaagggaggaaaggagtagtatcacacattaccgtcataaaaaatattctgtatagatttggaaaatgaagtcaataaggagaagggaaagtgtatctagaattcatgcccagatttgatggctgtgggatatcctgcattggggggtgtgatggtggatgggttgaaagctctggaaacgttggcaatagcctttaacatgtatccaaaggctccatcaaaccctcagctttctcagtgtctttgcaggttttttaggatactctcaaaagctcacttctctctgtaattcaccatcttccccattgtaaaaggcaaattaagtcctctcaaaagtttgacaatatgaaacaaggaaattcagttagtctcttgacagcaatgccaattatcttccttttttttaaacattctcttaggcgaatgcctaagacaatggaaaattattttgcagtgagacccaagccaatccagacacaagctgctctcattacaaccatctcttctcatctcttgaggatgagctcactaataagagtacattatctcttattgggacaggcttaaatacatgcaagaacttcattaagtcattctctatcagaataggagctattgagaatttctgcagaactaggattgtgtcttctctacctatgaaatgagtggtgtcatgacaaagcactctagggagccctgccaacctatttgataatgttgatggacaagattgtatggggagtggggagaaaaaacaccttttatattcttccctgatgtatgtataagtagttctttaggaagagatgaaatgcgtggctttgtcctgaatagattcccttaggggacacccagggaattcctaggcccagtggaattaatgttctagaaagagaatcatgcttctgttgcagagcccccttcttaatcctcatgaatcctagttaataacacatataataaagtattcttattgatgcctgtaacttcctttgaaatgcacccaaaaggataaatgatatagacatatgctaaagcaagtatggtgaaatgctacgggtggaatctatgtggtaggtatatgggtgtccactgtaaaatgatttcaactcttctatatgtgaaaagattttcataacaaaatgttagggaaaaaatcctcctggaatacatttcatgtaagcctctaattcctcagcattagccacaagcagaactgtcttcaaaggagtaaatcatcaggaaaagtccgtgaccccaaaagagtgctgtccaggttttctcaggcatggctcaggttcaggcacaaatgcaagttcccagttcccatctcctcagtgtgtgcccgctgacctccctgcaacagttctgcccattgaccagtaggggataattcagatgaacaccttcgtgcttggaatatgagcacttagacttctagattttaaaaggatttctgagcccgatctttacacacatgctttagtttgtactgtctttctgtacatcctcagttaagagatgctttctggagtgttttgtagatggatttgaagacttctcactgcttcagtacagaatgccctggcaatgcacgcctggaaggagtccatggactgatattttctagccaaagggagctaaaaatcagccattttgacatttggatttttcattgatgtgtcttgtttatttaattcaatttaatatgaaagagtagagagggtagaacaaactgttcagcaacgtatagatcattaggttttaaaaccaaataaaaagtactcagtgtaaaaatttgcctgactgaaaggattttgaaattattcttgaaagctctgaagcacgcagaggcagctttggatgtgatggatatttttgctgcatagagtatccagtgccaaagagatgattctgtcagaaaatattacgaagccaacctagctttgataattgcttcagattgtctacatatataatcctaaatctcttttcaaagtacttacactaccagtggtctttgatttataactgctggtccaagagatggcctactaataatataaaacagggtcttagcttcactgcgtatcgtttccagaggatgtgaatcttaagtcaatataagagatgtgtgagtaggaatgagaactcttagaaatcataggaaggggttcaagtcacagggaacagcagatgtagctggcctaaggcaaagggaacagtgcaggatcagaaagaagtccattccaatgaaaagagctgagaccaagggaaaccataatggggccagagcatgcaagaccattgcaagaagcatcaagggcttggagctttatccagaagacaggagcagccattgagagggcatgctccagcttttgttttagcagaatctctttgcatgtgatgtggaaaatgaattggagaggggaaccaggaaacctgttaggaggctacttctgtaatccatgaaatggcaatattctgcttttatgtccctgagaagaaagcataggtaaggaccactgaatacacatttggtagaaaaagaatattccccggctaaggattgggaagataaaacaatcaggaccacccacccattacttcattttcctttatgtatccgatcaagtaccctttctaaaagaaggtaaactttacagttttttttttaatttaagcatctcattagaacctactgaatatgagtctccatgtactaattgtagtaaaatctctctgaaggctggcatcagtatgtctgggcaggatgtatattctagcccagattttgcatagatgtcacaaggagtccagaatcccttgattttcagacatagccattagaagcacactgatcttcacaggtggaggcctccactgccatcagtctattactgctgcttaaattcacagcaccgtggacaagaggagaaggtagcctagctgtttcattggcccccgcatctctctgccacatgatggacagccatatcagattgcattagaatgttgactgcatgttaactggtgatccttcttcctctcaatacttattttaaaatcactctaaacgccctgctcttattactaattagattatttggccttggtgtatagtgtcttggggtcatcagtatgaaggtcaagtcacgcaaaaagagtggagtctccaatgtggatacacccaggaggtcactctctccccaggctgtgtccaagtagcataggggagcacagggctctgtccccatgatgtactgtccttttccatgacattggagatgaagctggacctcaactctgcacatgcatattcctacaacttctcagagtcctgtggataatgacggaggagagaaaccatgcaggaaacagccccctagagcacccaatctggatctaagtttgtcttacatgtttaagaaaaatttgctttaatttattttactgtattaattgattaatttttaaagaaatagtggagtccatcactaagacctcaggccataccttagatattgagatgttgaataaatcccaccagtttattttattgtaatgtgcctcatttttcctaaaaactaaaccccaaaatataaaagttttcgttgttacttatttatttattttagagacaaactctcactctgtcacccagcctggagtgcagtagtacagttgtagctcaccatagcctgaaactcctgggctcaagcgatcctcccacctcagcctcccaagtagctgggactacaggcacataccaccatgcccagctagttatttatattttgctaaatgaatttttgaaataaatttcacagatatttccccattttcagttgaaatttaattttctttctttctttctctttctttctccctctctttctttctctttctttctttctttctttctttctttctttctttctttctttctttctttctttctttctttctttccttctttctttctgtgcttctttctttctttcgtattgctccttgtgtagcagggctatcccataggcagggtgcccagggtagtgaaagtttaattttcagagtttttaatgccagaatccgacttatgaattcactcagtagatattacatgtcactggcatatgaccttttaatagatattttattggcctaggaatggtaaggtcagagacttgagtggttccacttctaacagcaaaaagaaactatttctggctataataaaatttagcatcttaaaatttaaatagaatagttgtttatacttactcagggaactggagggttatatgggatatttaaataaattgtggaacacttggtcctgaaaactgcccattataatactttaaactaattaaatttcatttaaaagtttcaagcttcctgaacatcagggaaacgtgaaaatacagtcatgggttatagagactagcatcaggaaaaacagccagaaattctgaacttggatctcttcgcatgtccttgttctgcttaagaaattgcttaagagatgaccttgataacattttaaaaatttgagtgcgaagtgcaatgtattgcctttccatggattagagcacatgataactcttgagccagattataggaatccctatcataagattaggagaagtgagagaaaagaatcagaatcgaaagcctggcccacaggtgactcccttgtctaaagaaaacgcttggtcttgctttcagcacatggcttcctgaaaacgaactttaccttaataagtaactgtttaaaactttacttattaatttgaattagtttgagtccttagggaaccctgcgagggtttagttgtcttgattacaaaggcccacatccctcagaaagtaccctcatgtcggcagctggacaaccttaaggattgtcattgtggaatcacggcacaatccaatttcttatctcactgttatgagttgagtggtggtcaccaaaaagacatgtccttatcctgtttcctggaacctgtgaatgttcccttgtttggaaaagagatatttaaagatgttataaaggtaaggattttgcaatgaggagattatcttgggtcttccatgtgggccctaaatccaatgatgtgtgtattagtctgttctcatgctgccaataaagacatcccagagactgggtaatttataaagaaaaagaggtttaatggactcatagttccacatggctggggaggtctcacaatcatggcggaaggcaaaggaagagcaaaggcatgtcttacatgacgacaggcaaaagagcatgtgcaggggaactgtcctttataaaaccatcagatctcatgagacttattcactatcatgagaacagcacaggaaaaacccacctccatgattcagttacctcccactgggtccctcccattactcatggggattatgggatctacaattcaaaatgagatttgggtagagacacagccaaaccatatcgatgtatgtccttaaaagagtgaggcagggagagatttcacacagaaagaagaggaggaggaggcaatgtgtccacagaggcagagattggagtggtgcaggctcaggtcaaggaatggtgacagctactaggaagtgaatgaagcaaggaactgattcccccaaaggagtgtggccctgctgacatgttgatttcagatttctggcctccagaactgtgaaagaatacatttctattgttttaagccactcaatttttggtaagtcaatatagccgctgtaaaaaactaatacgctaacaacgaattctgtttcctccatttattcataccttccctaatgtctgcttttccaggtgaagtatctgaaaggtctttttcccttccatgctcttgcccatccttctggaatattctctgtggcagttatgcagacctttacaaccacatttcttgtgggttgtatgtgtgaaatcttcagagctcagaaaaaaaaaatctgatcaaaagcaacatttgaactactgaatttctttcttttcaagttcattcattcaatattatttgttgaataaatattcagcaaatatttattgagcatgtactatgtgccaggcattgttctgcatgctggagaagcctggggaagtgaggggaaagatgaacaaaaatccctgctcccattaagttttcataggcaagcaatacataaaataaagaggtaaagttatagcatgttggatgtagtaaaaagaaactacagagaattaagaaagaaagagggatagggaatagttttctggtttaataggatgattatggaagacttcaccgagaaggtgacctccagaaaggagatatatcagtcagagttcccccgagaaattgaaccaataggagatattcacccttacatatgtatgtgtatgtgtatgagatttattgcaagggaattggttcatgtgattatggaggctggcaagtccaaaatctgcagagcagatgtcccagtttgagttcaaaagccacaggctgctggtcagcacagtggctcacacctgtaatcccagcacttcaggaagccaaggcggccagatcacttgaagtcaggagttcaagactagcctggccaacatggtgaaaccccatctctattaaaaatacaaaaattagctgggtgtggtggtgcatgcctgtcatcccagctactcgggaggctgagacaggagaattgcttgaacctgggaggcagaggttgcagtgagccaagtccgcgccactgcactccagcctgggcgatagactctgcctcagaaaaaaaaaaaaaaaaaaaaaaaaaaaccacaggctgctgtagaataaaaaagaaccaatgtcttagttcagaggccatcaggcaggagaattctttcttactcaggggaatgttaacctttgttctattcagaccttcaactggttggatgaggccctcccacattagggagggtaatctgctttgctcaggctactgatttaaatgctaatctcatccaaaaacaccctcacagaaacattcagaataatgattgaccaaatatctgcgcactctgtgtcccagcaaattgacacataaaattaaccataacaggagaggagttgagtgagccataagggatctgtgggaagagtaaaatttctaggaagagtaaatttcaaaagctaagggcctggcttgttgaacaatgaggcagcaagtgcaagagggactgagagccacaggagatgagtagcagatgaattcggagtgcccttgaggtgaggctggtagcaggcttgatagaccatggacatggctttttgtctgcttttggttattttgttagacctatttcagggtctccaccgttgtcacattctttcctttttaagagtattttttttttctggttatacccatgaaaccttattttaagtccctaaccacaggctttagagatctatgctgtataaaaagtaattcatccaattctattatgacttatatatagcaatctactcatttatgaaacaaagaattccaggcatatcttgttttactagcctgtcctgagtattgtggttcgaattcatttgtggactcttgagtagggctgtctgtctataatgacaatgcatatacatgtagaaccagcttatgagagtttatgttttataaactgcataatagatttaaaagtttctccatacatatttcatgattcccacctcagagggcacaggaaatggtccaaagcagacgactctaacttaaaatgactgacaaggcatctgggtcagtgagctttggctgcataacaaaccacttcaaaacttagtgacttgaaaacaaatcactgttgagacaataaccatgttactgctcacaagtctatgggtcagctgaacctttctgctgctttgccttgggcttcattgatcccagctggtcttaggcaggtatctgtgttcagctagcagatcaactgaagtctggctagttgaggatggtcttacctacctggctggcagctgactggctggcagttgggacagcaggagtgacggggccctgtgtctctcttcttctagcaggctaatcaaagcttgctcaaaagcaggagcatagacttcttaaggcctaggcccaaaactggcatattgtcactttgaccacattttactgtccaaagcaaaccccaataactgcccagattcaagtgggaaagaagtagactttaagtgttaataggaggagctgaaaaataactgtggccattttttcaatctatacataatatgctaattaattgtatgtgttaacttgactggtccacagggtgcccattcacttggtctgagtctgatggcctgagaatgaggagagctgatggggtattacacacacacacatacactattgattctgtctctctggagaaccaagactgatacagatttttgtcccaagagtggttctagaggaagagaatttttaggatgagtttcctgaattggttctgaggtttctggcattggttctctcatctgattaggtttaacgatgctaataactctgtttccattaataaagagggcactgatagatagtccgtggtgtactctgtcaatagagatatataaatattaccattggatactcctaatcaaccacttataagaagcaaagattttggtgactgtgtatatgatgcttttgaacatgattggcaaagtaacaaatgtaaagagattggcttctattgtcatcgaacaaagaatgagctcagggtttgaattcccaggtcaaatgctgcatacatgatctcaaagctgctatgtctgccctcgaggagacctttatctcctatagccttaggactaagatcactgaaaatcaaatgcaggatctcatcctgtgactggctgaaccaacacaatttgaaccctcagcctcacaaggtgtctactgttaaagtcagtgtattaactaggaaggaatgcgttgctcaaagttggaatggagatcagcttcagccccgatgaagctgaggacattgagcccctaaattatgatgagggttctttgccagcagaagagccctctccagcctcttctaaggggattaatcctgcatcaccagaggaaactctaagggcctccctcaaggcagttgccatgcaagatgatgctgattctattcaggacccctctttgtttctagacctgtaactacattcaagtccaaagaggcccctaaaggtgacgtacaaagtgcaactcatgaggatttatgctatactccaaataagtattaagtatttaaattttctaatttataatagaaaagtttggaaaactgtgagggaatgcatattaagaacataggataatggtaggagaaacacaaattagatcaaaatgaatttattgatatggataaaggaagcagacagcatgcatttaattttgcagctcaggcatttggaaagtgctgtaatagtttgtttagtcagttggctgaaacatgggccagaaggtcacccacagtgagcaagttggaaatgctgaacttcccttggtttaatgtagagggagggattaaatgacttagagacattgggatgttagagtgggtttgtcattcaagaatgactcactcacattgggagagtcctggagacatacctttcaccataactgtgggaagtaagtttgtgagggagtcccagcatccttgaagagctctgtgacactctactctgtaggccagaacttacaatggaaactgcagtcactgaattgagaaatctaaatgtaatgggaataattggatcccagggtggcaggggccaagtggcagcactcgaccgtcaaaggcaatgtggccgtgattaccatgatgaacagtggagtcaggcagcaaccaaaattctctaactcacagagaaccatggcactggccagttgatcatggtgttcctggaaagtaaaagagataggctggtgactaaattcttttttgctctctgtaagctgaaaatttctatgtcaaataaaaaaaaaaaaaaaagtattacctgaatcatgaaagcatagagtcactatccttcaaggaattcccatacttgagccagtttatagacccaaaaccctttcaatgaaggggaggctgagtctctttgaggaaagactcctgtatattactgaaaatttatactgttcatctttctcccatccttctccaaatggacctatggtgttttaccaggtgactatgcattggagaaaaggaaataatcagacctgttggagactactgaccactggctctgaactgacacttattccagaaggcccagtatttcactgtggtccaccaggcagagtagggctaatggaggtcaggtgatcaacagagttttaattcaggtccatctcacagtgaagttcatgagtctctaaacttatcccgtggttattttcctagtctgaaatgtatacttggaatagataaattccctgacagaactgctatattggttcttgtgacctgtggagtgagggctattacagagggaaaggccaagtgggagccactagaactgtttcaacctaggaaattcgtaaacgaaaagcagtaccacattcctgaaggatggcagagattagtgctaccatcaagaatttcaaagtcgcagggctggtgagtctcactatactcccattcaacttacttgacgtgcagaaaactggatgatggagagtaacatggaaagtttaaccaggtggtgactccaattgcagctgttgtaccagatgtggtttcattacttgagctattccctggtacttggtatgcagttattgatctggcaaatgcctttatttccatccttgtcaataaggctcgtgagaagcagtttgctttcagctgtcaaggccagcaatacacctacaccgtcctacataaggggcatatcaactctccagccctatgttataatttagttcacagggatcttaattggctttcatcactagtccattacatagatgacattatgctgattggacctagtgagcaagaagtagcaactactctagttttattggcaagacatttgcatgtcagagggtaggagatatatctgacaaagtttagggaccttctacctcagtgaaattcctaggagtccagtggcgtgggacatgttgagatattcttctgaagtgaaggataagatattgcatcttgcccctcctaaatcaaaaaagacggacaatgcctagtgagcttctttcaatttttggaggcaatatattgctcatttgggtgtgttactcccactcatttatttagtgacccaagaagctgctagttttgagtggatcccagaacaagagaaggttttataacaggtccaggctgctatgcaagcagctctgtcacttgggccatatgattcagcagatccagtggtgtctagatttaatattatgtgtcatgtcccaataaagcttggaagtagatcttaacaccattgccatcacccacccacacacatccctacaagtgaagaaacggaaacctcaaagcaggtaagtgactggtcacaaaaatcacaggtaataaagccaggaatcaaacattatcgcagcatgctagaaagcctatctgcttttgatttctcagtcacattattttttagtaattcttaaaaaaaaaaaaaaaaagccttggccaggtgcggtggctcacgccagcactttgggaggccgaggcaggtggatcacctcaggtcaggagtttgagaccaggctggccaacatggcaaagcccggtctctactaaaaatacaaaaattatctgggcgtggtggcacatgcctgtagtcctagctatttgggaggctgaggcaggagaatcgcttgaacccaagagatggaggttgcagtgagccaagatcgcgccactgcactccaacctgggtgacagagagaaactctgtctcagaaaaaaaaaaaaaagcttgtgtggtggactctaacctaatcagggctgatttatatgttgtttttttctcacatattttcctcaatgttctgttcatatcacatagaatcactgagaattcttctctgacattcacagggcccctaagtactgcttcacagactgaactgaagcaatattaatgggtctcttcctagataagcccaagcctcaagcatagccctgcgcctcagtcagccaatctagaaatagggcaagcttctaaagatgaaagggcacagtctctgcttttagtaatctcactagggcaatatagccaagtggaatgaagagatgagacaagggctagactgtgtgacatgggccataggttgacagaagctccaaaaatagagtgagtgctctgaggaagctacacagtagcaagaacatggtgagctgggtggaaaacaatgagttaggtcttgcaggatgcctggcaaaggtgggacgtctgtagagggactggcttgagcaaatggtctcagaacaagctgtggattccctcttttaaagttccagactttcataacttcactttggcctgcatgctttccttttggaggcaatatcttcataaatgccataagaggaaattcaacacagaaccctccactgatttcattttctatttgaatttggcagagacccctttaagaccgaatctcatcaagaaaaatataatctgagctacatattgtactaaatcacttcccccctttttaaatttgaaatcagcttttcttttatatatatttattttgagatggagttttgctcttgtcacccagctggagtgcagtggtgcgatctcagcacactgcaacctctgcctcctgggttcaagtgattctcctgcctcagcctccggagtagctgggattacaggtgcctgccaccacacccaaccaaaatacaaaaatacaaaaaaaatttttgtatttttagtagagatggtgttttaccatgttggccaagctggtctcgaactcctgacctcaggtgatctgcccatcttggcctcccaaagtgctgggattatagctgtgagccactgcacccagccatcagcttttatttcatatgcatgcatagcatcctacaacaataactttaaaaaaaataagtcatcaccattttctatgattgcaacctatatagagaaatagcctggtgttatcctacaagacaatttccttaaaatgtgtgagtaatggctattaaatcattttatggagccatttctaaaataatactctttgtcactgttaccataattacttttagttgtggccatattttaaagaacagaatgctttatcgtgactgttataaatacaaattatttttccccttgtgggaatcatcaggctaatttgtttaccattttccttctaaaacagatcattattaaaaggaaatcagtacaatgattgtgattaagatcaacagctctcttaattctttgttctgttgaatatcaagttttttctgccttcctacctctgtctttccgtaagacaaatccttttgctggcaaggggtatatgtgtgcatgcaactcctgacttatatctccactcttacacgtgtgctaattgatcttaaaattaaagtccaggatgccaatgaaggaaataagctctgaaccacgcaggtcacagtttctgttggttgtatttgtgtcagggagctgtcagactctgcagtttgaaatttaagttctcaatggactctgagcgcatatccttgatgtgtgattcacacctgtggtatcatcatggggtcattttattgaaatgttgaacttgtttgcaggggccttaattctttagctttctgcaaaacctagttatgtgatgtgttctctgtttggggataatagagagtaaatggaaataagacattaacattgcccaacccctattatagttggtgttaataatctttgcctataggtttggaagtaccttggcttatataaccactattcagataaaacaaggaaatgatgacatcagtgtaagattgaatgagatttgaccactgcacatgccatgctttgcaatagtctaaaaacctggacagaatgatcagaaccatctaactcaagcccagggataagcaaacaatcagtaaaaaatgcttacatagaaagcgcatgatattttaatatgaatttttaatatttaattaattttagtggctattgtctaccttttatcaaataaacagctatttattattagaacttcttgctaatgattactgattttgactgtttgtaagtctagccttacaatttattcagaagtgtggttttaaacacataaagtgcttcatggcaatgcaaaatcttctactgaagtgttttgtattatttcgatttgaacttaagagattatgtggattctgtacgtaataggttttattcatagacttgatagtgtagcaggacgagccgcagacaagaacccctcagacaccgagttgtagaaggaaagggctttattcagctgggagcatcggcagacttatgtctccaaaaactgagctcccggagtgagcaattcctgtcccttttaagggcctacagctctaagggggtatgagtgaaagggtcatgattgattgagcaagcaggcggtgcgtgactgggggctgcatgcaccggtaatcagaacagaacaggacgggattttcacgatacttttccatacaatgtctgaaatctatagataacacaagcagttagctcaggggttgatttttaactaccaggcccagggcgcggtgctgggctatctgcctgtggattccgtttctgccttttagtttttacttcttctttctttggaggcagaaattgggtataagacaatatgatgggtggttgcctcccttaatagttaaatgatttggcaataacaacaggccgaaatataaaagagaaaaatttaggttggtgcaaaagtaattgcagtctttgcaattgagagtaatggctaaaaccacaattagttttgtaccaaaatatgtatttggatatatattctttaattgatgttaacttacacattaagtttttaaaatattagaaaacctacaaaatctgggttgaaaatgagtatttgaacttgaagcatggcaacctttcacccattttgttttaccaaattgtaaataaatcataacctggtaccatcacctagacagaaattttgtggaatatctacactataaataatggaacccctgtaaagtagtaactatttcaaagttaggatctcctggctttggcaaattttatttttgtgaaaattaaagttgggcattggcaacccaataccttttagtgttccactagaacaaaattaaatattaggccagtaatttgatgcagtggtatccaaacttttccatttcatgccctaaaaattagacactcacaacccccatcataggcatattcacttatttgtgtgttcatttttacgttgtaggtattactagactaacacatgtgttcatcataaatgaatgtataatatatatattttaaatgataaaatataaataatgagaaagaataaagatgaaaataatgttttattttgtttgttaatgattcaaaacaaatctttgccctccatatagagagtccatgtgtttgaatagactttattattttcaaaactcctcacttaacactttgatacaggaatccaaaactctgatcttaagtttggattttcttttccatatttggttttaatggctgtcactgctggggaaaaaaaagattcctcacacagatttgaagattaaaatggaaggtgtgcatcctttgccgaggctactgcttcattacactccttttattcattcccatctaccagttgtaaaggtttgactttctgatggatgcttaatttttaagtgcctgctaattacaatggcttgccactttcattaacatgccatacacttaaggcaaaactcactgttagctgtgagaaagtaaatacatatttcaaacagtcttcttcataaaattactttttaaatggattctcctgcaatatctgattgttttcacctcagaatgtaggaaaggagaaaacgtcagctctcaactctgccgttgtccttttgtttgccgttggcacaattgctaatgtggttcatctcaatgtctttgcagggtttagtccatttggtgagggtttgtttggttaaaatagataaggtagcctgtaaatccattgaatctgagcatgtgtacactgaatgtgttgaaacaagctgaaaagtcatcgtataagcaagggcaccactgtccaagcccttgaacgtgtgggacaggccaggttccatggctaatgcctgtaatcctaatgctttgggaggctgagccaggaggatcactttagtccaggagttcaaggcattgagctatgattaggccactgcactcctgcctgggtaacaaagtgagacctggtatcaaaaaaaaggacgggggaggggaaaggtgtggtgccctcttctttcctcaggtctcaagccctgtaagtcactaacaaccttttaacaaactaatgtggtgccagtgtcaataggtatgagtaaagctaatttcccttacaagtgaaattctagtacacttttcccataatccaatagatcatctttccttttatcctctgaacatatgcatgcatcttaaaagactacggatttaaagtactagattaggccaggcacggtggcacacacctgtaatcccaacactttgggaggccgaggcgggcggatcacgagatcaggagattgagaccatcctggctaacatggtgaaaccccatctctactgaaaaaaaatacaaaaaattagccgggtgaggtggtgggcgcctgtagtcccagctactcgggaggctgaggcaggagaatggtgtgaacccgggatggggagcttgcagtgagccgagatcacgccactgcactccaacctgggcaatagagcaagactctgtctcaaaaaaataaataaataaaataaaataaagtactagattatgtttttcttcccaattaaacagatcatgagttcttttggtgactagggtgttgtggcattttggaggcaggaaagatacaggaagttcccatgctataagccttgtctctttgaacatatctaagcatattagatctgttaatttttgcttcatatagtttgaaggtataattattgggtgtatacatttttagtattgtttctcaaatacattgatctctttattatgaaatgttctttctgtattttcttgccttaaagtaatgctgttcgatacagtagccattagccatgtgcttatttaaatttaaattaattaaagaaaaatataaaaattcagccccgcctttgtgctagtcacatttcagatgctcaatagggctattggttaccctatgggatagcacagagaacatttccatcattacagaaagttctattgggtcgggctgccttaaggctacttcatctaatattaaaacaactatatcaagggtttttttggttgacaattatatggagaattaaataaatcctgaatcacagatgaagattttagcatatccctctctgttactaacaaaataagcaggaaggaaaaaaaaagaaaatcactaagcacacagaggatttgtttaacacaattaaccaacataatataattcacatatttaatgcattacattcaacagttatataatacaatacgcattaagtacgcaatgcggacacattggaagatacacctggctgccaagtgtcctgtagggaggtgttgattgtagagacacacagcaggggctatataattccataatcaggaaacccagcaaaactggtatcacacgaaggaattgcaactattgtattagtccattctcacacatctataaagaactacctgagagtgcgtaattaataaagaaaagaggtttaattggctctgcagcctgtacaagtagcatggctggggaagcctacaatcatggcagaaggtgaaggggaagcaggcacttcttacatggctggagcaggaagaagagaataaagggggaggtgccacatacttttaaacaaccagatctcatgagaagtcactcactattatgagaacagcaagggagaaatctgcccgcatgataaaatcacctcccagcaggcccctcctccaacactggggattacaattcaacatgagatttgagggaggacacaaatccaaaccatatcacctatggtttgggttttggtagcacaacactggtacaacctactactcagggatcctcaaactttaatatgcatgctaatcaacttgaggttctattaaaatgcagattttaatagagtaggtctaggtgcactttgtaacaagtacactttgttactgactttaaaacgagctcccaggtcatgctaatgttactggtccgtggaccacactttgagtaggaagattctaactcaaaagcccaaactagtagcttaaacaccaaatcatgacagaagctgtttcccctggcttgtatcatattgattaacacagtaaagaattagctgctgacatgtacaaagtgtgaagtttcacataagcataagcacctgaagcgtctcttgaagtctgggaagatccggccagggcaagtctgcttccatacatggtccatacaaaagtccactggagcagagtagaggccactagctttcgagagcccatgatttatccttcaccataagtcccacctccactacactgacaccttgccaaccatccatctcacttctttatttgcctttctaaccttctgagacaaggactctcaacctaagctaaatattggaatcagaggagctttgagaaatactgatgttttggtctcagccccaaagatcttgatatggtcatttcaaggggtgggaaaagcctgggcattttaaaagctacccaagtgattctaatatgaagccaaggttgaagacttctgtttaaatcaatttagtgacactagcaagattctcacacaccatcctcagacattctgattctgaagctcaggatcaccacttcctaatatttgcaggatctgagacaaaagaaagctctcaatctatagcctttcaccttgtctttctacttcccacccactcctatactttcttgcaccatgaagaatcttctgtatatagaattagacacacatccaagatctgtccttactccctttcaaacacccagcccttggtcactcttgaacttagacctttgcaaaatgactgcaaggtctgccattagaggaagaggaagagggcctaaaaaggggtcttggggccagttgggaagggaattttggtatcttgttgaagtgttttctgacaccaatctcttctccaacatcggctgaatgtcgaaccattcaattcaattttgatgcacctggatttagggcagaccccacagcttaagtcccacaagactgcccccacttcaggtgccagttgcaagacttggaccacccatacttctgaccaaccagctgtaagtcagaggttcccacaacactgtcctcagcttcaataatttactagaacagctcacagaactcagaaaatccactttacttacatttagatttacagtttatcaagaaggatacagatcaacagccagatgaagaggtatatagggtatcgtagtctgctttgtgctgctataacaaaatgcctgagactggcaatttatacgaacagaaatctattttctcacagttctggaggtttgaaagtccaaaatcaaggcgccagcaggttcggttgtctggtaagggctgcatcttccagaggggaggaacgccatgtcctcacatgatggaagacagaagagcaagagagaccaatgctatcaaaagcctttctaaggaccttaatcacactcatgaaaaagggccctcttgacttaatcacctcttgtttgccccacctgttaataccatcacattggccattaagtttcaacactttaactctagagggaacacattcaaatcatagcacaggacaaggtctggaagagtcccaagaacatgagcttatgatcctacggagttagggtgtgctgccctcctagttcatggatgtattcaccaacctggaagctttacatcattatttaagagtttttataactcaatctttagctctcccaccaggttagtgagggaggctgaaagttccaaccctccagtcagttgatctgtctggtgatcacccctatcctgaggctctccaggggccctattctaaatctacttattaacataaattcagatatgattgaaaggggtttacacaaggcctccttatcactgtgaaaaacccaagcgtcttaggaggtctatgccagaaacctgggacaaagactaaatatatttcttatatcacatctgggtaccccagcattagggaggccatgtctccatgtgcaggagtcatagtcttgtgtactaagctactcacctcatgaggagtgtgtggatgaaggagggctggggggccatgagggcccaagggatgggcctgtcttgcccacatctggaagtccgggatgaggactgagactctctttgtagcaggttccccccagtgattctgatgtcagttgtccacagggtgcacttagaaagacaaactctgcagaaggatcagagctaaagaagaatagcttcccctcttttctctctgctgcctaacatttcttagtactagtcagagcttgggagccacacttggaatttcaaaagaggaatttttcatgcttttctaaatggattgcattttgggggcttggaagccaaacacttagaatctgtaaacagtttgtcctgggagagaatggctgcaggctttcagaacaagagagggaaatttaggctgactgcaccctctgcttctcaaagctctttctgctaaaatgctatagttatatgtggtcgtagaaataaaagagaagccaaacactcaagtgggcactgcttcccattttttgactaatgagagattattcaaaatcttgatattgagttcttactacctacccaagcactgagctgtcttctgtaatcatccacaatatctatgatgtcagctccatcattatcattttatgtaaggaaactgagatgcagactggccactggctcaagctcatacaactattcactgacagagttaagaaccaagcagggccgggtgcggtggctcacacctgtaatcccagcactttgggaggccgaggcaggcagatcacctgaggtcaggagttcgagactagcctggccaacatggcaaaaccccatctctactaaaaacacaaaaattagtagggcatgatggtgtgcgcctgtagtcccagctatgtgggaggctgaggctggagaatcgcttgaatctaggaggtggaggttgcgttgagccgagatcatgccactgcactccagcctgggtgacagaacaagactccatctcaataaaataaaattaaattaaaaattaaaagaaaatataaaaaaaagaaccaagcagggctgagcgcgatggctcatgcctgtaatcccagcactttgggaggccaaggtgggcggatcacgaggtcaagagatcgagaccatcctggccaacatggtgaaacctcatatctactaaaaatacaaaaattagctgggcatgctggtgcaggcctgtagtcccagctacttgggaggctgaggcaggagaattgcttgaacccaggaggcggaggttgcagtgagccgagatcacgccactgcactccagcctggcgacagagcaagactccgtctaaaaataaaaaaaagaacgaagcagcccggccctagaactcatgtgctctaaaccactactctaaaccagctctttaaaacacgtaagtgtaaatgtgcacagatttcaatttagagctgtgtgactcccagcagatttcttttttcttgagcaaaggagatgccactgtgaatattaatgtctgtcatagccagagcagacactcttcagcttttgggcaaactaaaatgctcaaaaatacccacaggcacaacattttctaatcgtgcttccagagccaggcagtgtgttcatgcatgtaagacgctgtataaatgtaggtagtagcaccaatagtgctcatgaattatggatgaagaggaacatccagagtcaaacattcctgagaaagcagaccaggctccctttactgggttaggaaaagataaaaggctaaacttcccaaggcagttgactggtgatttttcattctaacatccgaaaaaataggaataaagttgctatggtttgaatatatgtgtcccttcaaaattcatgctgaaatttaatccctagtaaaacagtattaagtgaggactttacgaggtttaggtcatgagggccttacctccatgaatggggatagtgcccttataaaagggcttgagggagcctgctttgctctttttgcccttctgccatgtgaggacacagcaaaaaggtatcatcttggatgcaggagatgagccctcaccagacgccaaatcttctggtgccatggtcttggaattcccagcctccagaactgtgagaaataaatttctattaattataaattacctggtctaagatattatgttatagcagcaggaatgaaccgagacagcagcctatttcagaagcctgtctctgatgctcctattccaaccaaaatctttaagccagagatcgcaaccagtaacctggctgaataatccacaaacatggtttattgtactcacacattgttataatgtttttttcttagtgttctttcatcttcttgttgaacaggatgccaactttaaaaataaggagatatcctttaaaaatgtttccttgctttaattgaaatattcaaagacctggctcactggggccatgttccaatggacttggcagcaattagctggatctgaggagtggaatccccgattagatgaccttgtgtgctccctttagccacagtcaccatcactgtttgttaccttatactcacataccaccactgactaccaccagtgcttttcactctttttctttacctctcttcctcctaaagtcatttgcatttaataactgctaatttcctgttattcaaggtccctagcaatttatgatatatgtgtttgcttatataaacttgcttcaacaggccacagtagcctaggaggtagtcattgcttgaagatttatactgggctgcaaaataaccctgagtgtctactcaactttcagttcgaagtgccttatcctgtatggtagtgggttactttttgcatgccaactccatcatatggtagcagatgcctgggactttttgttgataaggattccaaggctatctagatggcctggaagtaccactaagattgattagtgatgtctgccatagtcaccccagctgctgctatccatcagaagtcatcagccctgtgcttccatctccatttctttttttggtttttttttttttcatttttttcattttttttcattctgagtgtcatcatttaggagactcacacaaaagtaagagaatctttctagggaaatgttctcttttctttgcttgaactgaagttgcaatttagaggcagttacccttaaccctggcatctttttcccccagtacaagtgttcatagaagcaccacatgtaacaggcaaaaactggaaacaacctaaatgtccatcaacagtggcatgggtaaatgaagtgtggtgtattcacatactttatagcaatttttaaaaacccgactacagctatctacaacaacaaaaaaagaagccagatgcaaagaactatagactgtatgactgtttatataaagttgcaaaataggctgctgtctcagttcattcctgctgccaggttttatctctgcctcctaattattctgtcatttcagccacatctggggttactaagtgtcatttctaaattgtacctactgacattagcgaatatctttttgctggtctcccaaaagaaagatccatcatttttctaactcctaattgaagaacctaagaaaattgctgtgttacaaagtgttccttttcatcaaccacaaaacaatcctccaggacagagttgagcaaaaccaattctgtccaatccagtctgagtctaatgacagaaactactctgagttaccttattcctgatattccaggactgacatcagggcctctgtcccaagaagtggaggaaggcagaactcccactagccatatcccagcctccttaagatgggcctgtggtcctgggaaatctgctcttctaacctttcctttgtccacagaagccacatcagtagagggtcagttacagacaaggggcacacagtgaataaggaggcactcacttcttggattaattggcttagtgtgagaaggctcacttttacatcctaagattggaaagtgccagaggcccccacaaatctccaaaagcatagtttgctctccaattttctcaactctttcccggtttgtaatgtttattgttttcttataatatttaccaaccatcttacctcaccaatgctagatcctacaggtaacagaagcacagtataccagaatgatcacatccaatagcccctggctggctccaggtgtcatgaagtgacctctgattttgttactgcccctgagtggtggccagaagttacattatgtcagtttacagtgtggcagcccccatatccattggggacatgagtgtcaggcaggtcaggtgagtgtcaccacctggaaagtggaagcatctctaaaaacaacttccacagaatgcatgaatttacagatgatatgaaaacatgtgcatattgaattttctgaaaaatggcttatcacaaaatttaaaaaaagtatttatcaaaggaactttgggcacataaggaaataaatccaatagtatgctcatgacaattagttatataaataaaataaagtaggttattagtccatataagatagcctcaggaaaaaattaaatgcccagataaaaagtatgcagcttgacaaatttttacagaatttatgaaattaccacttgtgtcaagatacagaacattatcaacaccccagaaacttccctcgtgctccaacccagtcagtactacctccatccggaagtaacagctattctgatgtcagtcaacacagagattagtttttctgttttgcaactttatataaacagtcatacagtctatagttctttgcatctggcttctttttttgttgttgtagatagctgtagtcgggtttttaaaaattgctataaagtatgtgaatacaccacacttcatttacccattccactgttgatggacatttaggttgtttccagcttttgcctattacatgtggtgcttctatgaacacttgtactgggggaaaaaaaatgccagggttaagggtaactgcctctaaattgcaacttcagttcaagcaaagaaaagagaacatttccctagaaagattctcttacttttgtgtgagtctcctaaatgatgacactcagaataagacgctttcttctccttccacagtcccctgtgctgaggcattttatgtgattgtgtgtgtaagcttcaaagcgttattcaacaaagaagcgctgttctcccaagctctaaccatttactcgtaatgggcatatggtatttcgagtgctgtactttactatttcaccactagagggcaagaggagccccacaatgcttgacattgccagatctgcagtcaaaatgattaatcatgaggcaaaaacaagaagccagagggaaaaaaggaagagctcacaaaggcaaaataaacatccataaacttaaactttcctgggtagggaagatctgaaaaatgtcacccatgagccactttctaacactcgttccatctttctttttccagtgtgcaaaactcaattgcacagtcctcagttgctgaaactaccacccaacagggtgggactagatcaggcagacagatctcagagggcatttttttttagcactgcctagagccttggttattaggaagccgagaatcttgcagaggtcccaggcctcaggggctctgaacaagcaacagagagttctgtgatttcttcttcattctaagtaatatttcttccaataacaccatggtgtttactaaaatcaaggcactaatgagtaaggctaccagccccaacacctctcctttttctcctcttctcccgggtccaggcccttctacctgccacaaacttaatcaagattacagaatggagatgtgttgttttttgcaaggggaggggagtagggaaattaattacgaagccaagttgctgttaaactatttataataaatttctactggaaaaggacctttggctgacaatcgttttcttctgcctcggcatgaccaaatacagtaagaattcaaaaggaaaactgaaaagcgaggaagagcccacagctggagcagtctgttttcacgtctccacgctggcgaacgacaaactcggcaaggagcctcctgtgtatttcctgtcctcgttatctcagttcttgctctgaagggctaagaagccttcaccgttagccaagactccttcgtgcttcagcttaattttccttgcataattttaaatacagatcatgtctacagtacagcaattaatggatagcctaaagacttattatttcaaactaattgatatgtaggaaaagtttaaataacataacggagaggggaaattttaaacgatgtatgcacaatgaatttaaaatttctctctgttgcagatggtagcaaaaacatatgattaatagggggatgtgatcaaaatgtagaactgacttggaaatctttctctttttgatattcttgagcatatgattggaaggaagaaagattcagacatttcagaaatggggtaaggggtgcaggggagagcagattcttccccccccactcactcccaccaattctagggagttatctcacaagataaaagaacacctgagtatattttgagttgtgctgttaggtcagaaataagaaatgggagaagaatgccattatttccattctaactctttggtcaaatccccctcttgagataaacttgagagagaagtctacaaagaccaagttcacccagctgcagcagaacctgttccaagtcaccagcactcccagacccaggattccctccaaattctaagaaatgtgctgtgatgaatcacctcactgacacacaaaaaaacaaaaatctttctaatttccccattcacattccagcaagtttaataggaaagtttagaaaactcatctgaagaaagaatactcttcaaatgggagagagcaggaacattttgttctaagaagggattgagacctaatgatgccagacaacattttaaatatcagaacacagcatttgtaagaaaatagaatctgcttcaaccataaaccataaggggggaaaactacctttaaaatgtattttcttcatatcaaattcatgtcataagaatatctgaatgacttctggccaagtcacttaaattttgtggtcttcagtctttttggtcttctcagatgtaaaatttgccacagactggttattttttagaaccctttcttcccttctgttctcctactttatttaggtagctctacacacacattttgaaaattggatgaacaacctccttctcattggtccatgcaagaccatattactgtatttataatataatacacacccatatacaccacaaaaactacaatactggtttctccccctctggtaccctggcctttcattctccaccctctgcccttcaaggtaacaatgaatctgaaacgtgtgcatgtatatattcctgttttttatatttacatggttatagatatacatgtgcatatatatcatgcatatgtattcctataacactttatttttttatcttagttgttttaacttcataaaaatggtatcatatggagtatcatattgaaatatgataatgtaagttaaaggaccatactgaacctatactgtataaaatttgggggagcctacaatttttcacttaaaaatatgttgcttactttgggaggctgaggctggtgaatcacttgaggccaggagttcgagaccagcctggccaacatgataaaaccctgtctatactaaaaatacaaaaattagctgggcgtgggggcacacgcctgtagttcccagctactggggaggctgaggcatgagaattgcttcagccagggaggtggagtttacagtgagccgagatcacaccactgcactccagcctgggcaacagagcaagactgtgtctcaaaaaaataaataaataaaaagagccagacacaaaaaagtatatacattattattcagtgtatatgaagagttagaaaatatgctatcttgggtaggggacaggatggctagtgattggaaggtggcaggtagaggtcttatggagtgctggtattgatctgagtgctggttaaatgggtgtgttcactttgtggaagaaaatcctaagtccatgaatttgttgtatcagttagctattgctgtataacaaattccaccacaaaactcaggggcctaaaacaataagcatttattattatccacaagctggtgagctgggaagttctcctggtcttagttgttctcacttatgtgtctggagtcaactgagcatgaggtggacagctctgctggtgatactggttggacccgctttcatgtttgagggtcacttggatgtaggttggtctaatatggcctctgctagaacgaccggatctctccacttagtctctaatctgtgaacagacacgcccaggcttgttcacttgctggtggcagggtttcaatagcaagagtagaggcacatgtggccctttgagaacaactcagcactgcaacagtatcacttttgtcatatcctattgacaaaacaagtcacaaaagaggagtgaagaatggtgggtttttgaaaactcaatctaccacacttctcttatgtgaacttctctctgtgtactaatgaaaaaaatttaaataaagtatatctaagtataaggtatctatattgttaaatgttgctatagtttattttgacttattctattccatgaatgtatcgcacttatccattctactgtcagtttgcatttagtgatgtccagttgattgctgttttaagcagatctgctgtgaacatgccatctcatatctcctagtatgcaaactctgtaccagaagttttcttggttgtataccaaactgtggaattactgggccatagggaatatgaatcttccattttacatgatgatgctaaattgtcttctgaagtaactataccactttacactttcttcagcaatatatgaaagactgtattaccctgacacttgccaatagttgatattaacgtcagacttcctaatatttcctactaagatgagtatgaaatgatatctcaatgtggtctagatctgcctttttctgatcagtgaagaaactgaccatcccttctatttagtttgtttttgttttgcctttagccacatgttccttcttaagcaaaatgcctctttgtatcttttggtaatttttttcaattgagtgattggtcttctcattacttcataacaattctttatatattctcaatactattcttttgtcagatgtgtttgttgtgaaaatatttgcccagtttatcacttgcttctcaccttattgagggtgtcatttgaataagtttcataattttaagtatttgaattaaatttttatttaatttttattgttagctttacttgaggcctatttagccaatccttaactaccccaggatctgaaatagattaaaggtttagcagtcaaaacataaactaaatactgtttcatttgcactcacacacacacaccacggcctgctcttgttacaagcagttttggtaatgcggctcctgtgttcattatgaaatatttaggtatggacttgtcctcagtaatagcatctaaatatcacaaactcaggaaatctaaattgttctgacaagttacaagaataatttcaaagaacattttcttttggcagtagaccctgatgttgtgtagtaatggaaatgtttaaattccaatgataggacagggatggccctggctagaataacacaaaaatcattcaaatctaaatggcataaggctgcagcagtccaagtgagatccctcggggagtcttggaccttttccaagatgtaggctctctacagtgtgagtgtgcagagattgtatgattccactggggtcacttccactgatgggttcaatggactacagcactgaccttcacatggcttgttttcatagcttcgagtcctaaagggagatagggtcataggaatatttcaacagtgtaaacagctcacaagtcttccttgctcacttacttagaggtgaccagatgaactgaacataccctaatgctaggctcttaaaataggatcttgttttaaaaaggggttcagtagacaaagaaggccattccctttttcccaactcttgttcttagggtagtgttctcaaactctggcaatttgagtgtgcaaaaaaaaaaaaaaaaaaaattagagtagtggaagtgggacagatagttcctctttagcctcctgacatacctcttgtttggagggataagataatctctcagattgccacctgggcaaggaaactgggcaacacacttccaactcagaagccctgaggttggtggcctgctacctctttgctggtccctcttcctcaaggtttccgctttggaagtagggactgattcttaattggttcatctacttctaaggccagcacttaggaagagttagcttgttcttgattggctcaagaactttaattaataaagaagcaccgaatccagaatatttataaataacatctgctcacaaatagaacattgttccaaatagttcagtctaaacactttcagcttcaaatccacattaagaaaatcataacaattacctttaaactcatgtttccaaaaatgtgatgtgtatgtggattacctgtggatcttgttaatatgcaaattctcattcagtagatctggagtgggcctgaagtgatactactggtcctaggaccacactttgagtagcaaggctttctaaagttctgctctcccgcacagctgaattgaataacttttccttctagagatggcatcatggttagcttttgaaaaccttttggttttttttttaacttcagtcttctagtaattcaagaaagctggctattttttcaatctttctggatgttttaaggatctccttctaattctgaaatgttgctcaggtatttcttgttgaagtcttttccacagggtagactctagcttggggtctattggagcaagttaaatgtcttcaaaggtgatgggttattcaactgaataaatgttttctagaatgtggtgaaacctggaaaatacagtgggagtaggagagggaagaaaaaaaaaagacataatatacttttctccactctacctaccatgataatacatattaatcttgcctttattctttctttattgtatataaaagcttccactaactttccattctagggagtcattgagagaatataaatatgtgggctttttgttaaagcctgataggagaagagattattataagtaattggagactgtggagtcagaataactgagtttgaattctgacttcatcatttaccagctgtgttgcttaaccataaaatgctcataatatttactccagcgaataatgggagaattcacagaggtaatccttgcagataatccctgctaatcatttaacctagtgccaggatatagtaaatgctcaataaatatttatagtagtagtcattgttatttgataactattacagaatagctcccaagggcctactgaagaaaagctttgtgcttaagacactggcaataagttcatttccatatggtgtaacttgaagctttggttttatagattaactcagagacaagtcctaccacagtgattcacagttcctgaattcaaaacactgtgcatatcactgatttggcatttcaccttatatgactagctcgtgttattatttaactttgccttggctcactaattttattttcagtttctaacctttaagaggtaacagttttatactgttcaagactccccaaaccaaataccacagagccatttgtttacattagtaggtccccaataaatattcattagttatttcactgattaattaaagtaatccattcatctccacagggactcaggctggctgaatcaggagagacatcttcagatctattcctctttgagaaattagtataatgtcagtgcattctcatgtgtttcttgaattatgagctccctgatgtctaaagaagactcacagggaagagttcatatactgacagaacaatcattaattagttttcaaactagttttgatttgaaactaagtaatttcaatcagttttttgactttcaactcagtgttgtgacatcatggtggacacaactttcttagaggtatcaataccatcatcatgtccatgtttgatttgacagacaaatattgcaattttattctgttggacattttccaaagaagttggttactgatttattaaataaatatacatattttagggtagtggaagaagaaggtgaatagaaattaatgggtgagcaaaggtgagggaaaaccaaatcaccagttttctttctgattatattttaatctaaaaggctatgtttttaatcaggttatatgtcttgataagtggcgtttctacttaaaaaatgttggttgtatttgtatcccaagtaggaaatgcaaacatacttgtataaagcaaacaagtttaacttgtgtgtttgtattaatgatatgtgatcaaggcacaggaaatgttagtaaagaatcatacacttattatgtttgtttgggacagaacaaaggataagtcattagttggtgagttcagtcattttctttgagataaaacatttggttaaaaggcaggctagcccaggcatcatggctcatgcctgtaatcccagcactttgagaggctcacgcctgtaatcccagcactttggaaggccaaggcaggtggatcacgaggtcaagagattgagaccatcttggccaacatggtgaaaccccgtctctactaaaaatacaaaaattagctgggcatggtggcgcgcgcctgtagtcccagctactcgggcggctgaggcaggagaatcgcttgaacccgggaggcggagcttgcagtgaggtgagatcgtgccactgcactccagcctggtgacagagtgagactctacctcaaaaaaaaaaaaaaaaaaaagagatcaacttgggcaatgtagcaaaaccccatctttataaaaatctagaacttaaataaaattaaaaaggcaggctgatggaaacaatttaattaacttgatttactgggaaacattgatttattggaaaaacaatgaaaatgtacattgatttattggaacttgattaacttgacttattggaaaacattgaaaacatacattgggacaactggatattagatatttattttaatgcagaagacttttctttaaaattgtatttcctttaaaaatagactggcattatgttattatttaattattattttaatgcaaaagctattttcttaaggatactatttatatttctgctactgaatacagcacagtaatatatttcctcttgtagaatacatttagtcttgttttgatgggataaactgcttttgaatatactcactatgtcatgcatgatttatttatttaaatttcagcataatttttcttgacaacctgttctttcacttgaaatgttatgtaacaaaaacaccaggaccaactggcattttagtttatccgtctattccatatgctgctggatgaagcggaaaatgaatgtgtatcatcactatgctgggcacattttattcgcagcctgtcttttctcctgtacatcaatttctcttctccgtttggaaatagcttcatagcaggttaggtctatagaccttaacctgagtgatcacatataatgtaacaggaatctaattggctatggttagagtcagggaccaaaatatattcaaacttacttggattgctgcttgaatataatcacttcaagtccaggtagaactatttagactcagaaagaaattgatttttttaaatctaaacatagttactgggtaatttatgatagatctccagcccaaacatttcataaacaagtcaaataaggtcagcatgcatcaaggactagggcacattaatccaaaactacaagaaaaccctgcaatgtgtccactcaatatatgccagccaataaattcaaactaaggactaagctaaggtcttcatttgggttcccccagaaacaaatcctgagatgaggatttgagtataatagtgtttctgagcagtggtcccaggaaaccagcagggaagtagagaagtgaagcaggaaagggagggtagcaattaaaagtgtggcttttctcagacaagttacaaatgtgggcaactggtgatcaagcccagcatggaattctgggaaaccatgtagactatgcaccttagagttatttcttgcaaagggtgagggagctggagtctatatacaccaactgagcaggcagtttcagccgtttttgcaccctgcaagagaaagcaagctgttggaattaggacagtctgcatgacaatggttaggccaaagagctataaactgggcactaacaatcattagcttcaaattggatgagaagttcgccaagattataatgctagagtctccataattcaaatttcagtggcattaaacccacacctgcatctgacaataatcaagtatgtttgggtttagaaaatattttccaaactgacactacttttttggcaagacttagccattaaatacatgaatgatcctcaacaattcatgtaaatgagaatcacctgcaagccttcttcaagctctaaatcaatagttctcacactttgggattcatcagaatcaggtaggagacaataaaacacagatgactgggctcccacccccaaagcttccgacttagtaagtttagggtgagcctgagaacatgtgtttctaacaagatcccagatgaagctgatgctgctgttcgggagacctcaatttgggagcttctgctctgtataacctcacacaccgtacttgctcctgccctaatcagttttgtattttaccattataaccaaaagaagtacattatattcttcagataaagaaaatgttaagaggccttgattttcaatctacttctaactggaagagttaagcaaaggaagttttttctacctctgaagaaggcaaaccacacaaagttggaatcttctatccagagttgaaaaccctattatacttataatcatttttttattaacatatactgaaagatggtcattcatagcaagaactcataggtaaagattaagttggtagggtttctgagtggcattttacatagcactatgaaaaattatgcacatgattatcttttcttattcatcactgatgtatcaagagatatcttcaattttcagaatgttttatttttcttggcatacaattagacaaaatatttcagttttcaaaaaacaattcagagttcttattatttttcctcttttagttattttaaaatttgatttgaagtgctgcaaagagaaagggggaaatgatgtggtaggcctttgatgaagttaagtggcagtcgcctggacaaatgtgcaaaaagactggcattcagtaatatccagctcttctggtcttagatgatttctattctgtgatgccaaggagaggtagtcactccctcctttgtgttacatttgtatgttgcatataattttcccatgtatattgcagtataccatgtatgttgcatataattttacatatctcagcataacaccttattattttatgtttcacattctcctactagtcttgggacttcctgaagccagggctgtgtctcactcatgtctctgcctagcacctgtcacagtgctaggtttgcagaagtacacttgataaatttttggacacatgaatgaataaatcaatgaatgtgtgagggagaggaggccacaaaaagcgagtagatgtaaatagagaatgagccatgaatcagtggtattggccattcaattcagtattccaagtattgcagtatgttcccatgatttggaattaggatggctctctggctgacatgtcaaccaagaactagaacaggcttgttagaactagaacctagaagatttttcctgtcactggtaagattagctgtagttttctctaaagccatttacccttgtgtaagtaaggatgcctatgatgcatcagaatggcttttaatctcctaggttgagtgttctgaagaaacccccaagttttgggaagcagcgccagaattatatatgtcaggatatggttatctgatgggaagatggaaggagaaagtaagatttagcagaccagctctgccttgtgaatctaagcagaagaaaaacgaatagtgttttaaaactaatttgcaattgtactgaattgaagtcaccggttcctgtccttataagagtaacttcactgcggccatagattctgtatataccttaatccagtgataacaatggaagaaaagggagttttttttcatccttgcactttccttgtagaggagaaagagataaacattgatggaaagtaaaagttcccctgggctttataacactagctctttctttctcatagttataaggtagttataaagtactcaagatttatagttaggattattctctaattctactttaacttcagaataaccaaaaaggcccccagaaatttaagaggccatccttatggcataaacattggctaataaagattaatcataaataagagaaacactcatatctgcatgtatattcatcattcccctgacctcaaaataaatcatgcaacacaaaatatgtatgtgagaatgtattggttagcataatactggctgctgtgacaaacagtaccaaaatatcaatggcttcatacaatagaattttatttcttttttgtacaatagtccaacataagagtttccagttgatgaacagtttatctcatcatggcaattcagagaaccaggttcctttcataatgtggctccatcatcccctaggatcttgctggaaaggggaaagaaatagtagagattccccatatgtccccaaaaagccctgccctaacttttcattggcaagaatttttcaaatggctatgcctggattaaaaagtggtagggaggacttgtaaacattgtccttggatttggcagctgcacccaggcacagcagacaccgtggacaggtgcctgcaaattttgaggataccgacttattttctgcaatgtagaccaaaatactggaatccaaacctgctaaatgtagaattattctaaattgactgctactcacaaagaccctaaagataaaatcagtaaagtgacgactttgtattccaagtcatctctgtagacctcttcgagaaatggatctattaacaaaaggatctgggctagaagacttacaaaagaggatttctataaaaacaacttgctattcaatttatctgacttttcattccaaacccgatgtgtttagcacagttacatcaccacacttacgtgacgaagaaggaaatgggaaaagagggagatgtccaatattctctagcagatgccttttattcaagaataggatcaaaaatttacctgggggtaaggaaagtgtcttcctcttcccagtgatagttgccttgttaaagactttagacaccagcgcaatgtggttaagtctccactagtgcaacaaagaaaaggatagaggccagtccctgaatagggaggccccagcagactttcagatggttaactatcaagtccaaagacagacagatggaatacattacccaaatactccggaagttgcaaatcgacctgcatggtgttttgtaaatttctaatttaaggcaacactgacaaattagaaggtttaacacaaaatccagatttctggattcttttgaaaaatcaaaagaataatctagttagtagaactagttagtagaactagttagtagtaatctagttagaagaacgggtgtctgctgtctgtaaccacccagctcctgtcactcgtttgccttttgatctggccctgcctcagtttgctctccctgagaaatcccatcattgttttcagcttcaccttggggggagaattcaagcacaacaagcaggcttctcaaaatgcctgtgaggccaagaaacaaatgtctagtttcctttcagataaaattgtaaatactcacccaaaaaccacagcaatttaagcaggagacataaacatcatatttagaaggagggactatgtaattaggacatactcccttaagcatcaaaatcaattatcctgataaaaccctaggacggctaaccactcttgaaatatacatttataaaaagaaaaagaaaaaccaaaactaattttaggtgatcgggagaaggatgttctccagggacataactgagttcattctaggacatttgattcagcctgtcccttgttttgtaaatgccatgcacaggctttgagtcgagaaagtggttgtagctagggctcaagttcagtaattactaatccttggttaatcttaaaaggagttatcataaaggcatgcaccaatgaggagactctgatccaagctgaggccaacacaagggcaggacccccacaggaaaaagcctttggagacccaagacttcctgaagaggctgcttcatgggactccaggttctctgagatggttgcttgcaccgtctgcactattgaccttgcttctaatgtgactcggtgtaagaactgaattcataatgtatgttcagttctttctggttggtggcattccacctgattgaaaagaaatacatccttcatctaaaaataattagcctctgaatggccttttatttcaattgcccggagggcttttattgattttttttcagggtttgtgtggttaagagaatgggattcttctggtggtgtctttcttagcctctctcgaataggctgtcatgcccttgctcctcatgtgcggctaaatcagaagctacaaagtagtgacttgcagactcagttgggccttttattggactcttggtatatgttaaaattgctgaatttgagtgttttacacaagaaatacaattccacttggctacagattccactacttctcaattgccttataccagatctcattcacagatttgtgttgcttcttgagccccatagatatttgagttcagagattctgaaattaatatacatgtattaagttaatacatgtaaggtcctaggaacagtgcctgccacacaataagcacttaattaattttaatgttactattattatagtaaataattattttatggttctatatttccttgtttattagcaatttactaggttggttataacccaagagatttttttctttttcttttaagctatgatttttccttattccagttttccatttgcttgttcttttttatggtatccgattctttacagaagtattctgattaaattagactgtacttaatggaaaacagaaaaacaactagctgatcaaataaacatttcctaaactgaagaatgacacagagggagtgaaaaaccaggatcttccaagtatgacagacacaaagaaaagcctgtgatgatttagaaatgtgctgggctaattgcagctggttgagggtcctcgttgttttccataaaaccgtattgtattatgaagaggacagcaggtcaataagaccctgggccatgggacccctcttcagcatcacttttcagtaaaagacaattcccgattattttgtgaaagcaactttgaaatcctaaacatgaaaggaaaacacattggaatgttttgttatattcccctcaacacacaagaatatcaggttcctgagaccttcacacatcctgtttttacatagtgaacagttggcctggaatggtggggatggagccctggataggaggcaagaatttatttattttacttatgtattcattttgagacagcatctcactctgtcacccaggctggagtgcagtggcaccatcttggctcacttcaacctccgcctcccaggttcaagtgattcttgcgcctcagcctcccaggcagctggggctacaggcaccagccaccacacgcagccagtttttttttatttttagtagagatgggatttcaccatgttggccaggatgatctcaaactcctggcctcaagtgatccacccacctcggcctcccaaagtgctgggattacagacgtgagccactgcacctggccaggaggcaagaatttagtattcagatcttgattctgcgctgaaccacttggatggtaggctttagtctcctcacttcatgattgatgggatttgatgaacaatgtgctgaatgtttattctctcaagattataaaacaagtatcttaagcttccttaccccagagcacaggatcttcaaagacttagaacatcttttggtatttcaaatacaatagtaactttctgtttgacaaacgtctttgggttattatcttgattatttttttttattatactttaagttttagggtacatgtgcacaacatgcaggttatttatcatttttgtacaatcaaaatttgtttcctaattcacaatcatttttatgcccagctgagtcttccaaaagaaaacacctaactaaaaatagaaaacttctaggccttaatcgcaggccccataaggagaaagtattccagtgctgacataaaaagttcagggccaggaactcacatattagctgggctgacgtggcctgctgagtagcataattattgtcctaaattgtagtataagttgcttttagggtaagtggcttgggtatgtatataaagcaataagaattttgctcctggaaaatggtaaacaactcatttcatgtcaaggccacagaacttaatgcacacttttgagagaaattataagagtcatggggaaatgcaacaataataccaaataacagacacaaaacttcactggcttacaataataaacatttatttagttcataagattgtggggttcagctgatcttggctgagtgtggcggagcttagctggacttgttcatacatctgtggttcattatgggtcaggcaggtagctctgtagctctgctgatcttgactgacttacatctctgggtatcagttggatgttgatgaatctaggataatttggggtatgggactgggatgactgaggtgactcaactcttttccttgtgttaaatcttctactagagtagtctaagcatgttcccgtgacatgccataggaataggagtgaaagctaagtaagggcttttttaagcctctgcataggccatgcctgctaacatcctattaaccaatgtcatcgcatgaccacatcatcttcaaggaatggagaaatagactcctcatctctcataagagaagctgagaatcataaagcaaaggctctgggtacagggaggagccattaatccagtcaatctaccacagaggagagaattgacgaggtcctggtcctggttttgctactagccagccatatccttgagaaagaccctaacttctctgggccacagattttcactaaataaaagaaaggatttgagtataattgctaaagtcattttctgagacgtcaaagtcatgaagggtttgactatgtaattgttaaatgttcttttttcaggttcctacagtaatctctagacacctgtgagatgattagaaattttgaaatatatttcaggactcagaggaggtataaaagcatggactatgttaggagttttcctctgtggcggtttcatggaatatatgcatatatagaggagttcacacctaagaactatgtcagaatgcatttggcttttgacttgaaataaagtttaaaaaggaaatgcatgttaggaactgtgcttggtaaatcacatggtctctagtttctgtctttcctcttttattgattcagtatttggatctacttagtattttgcctacctcgtccttgactcctccaaccttcctttctggcaacttagcaaccctcattctgcccttcacccaacagccttatcaacactttgaatctaaatctgagcattagcattccagaagtctgaagatatgagatctacaaaagaatggtttaatatttatctagaccctgaagtaatgttgttgaggaaggaagagaatgcacaaaaggagaaaattgttggaagacctttgtctaaagtggtgctattcacagtgtggttcttagaccagcagcaacagcatcaccttggagcttgttagaaatgcagggtagcatgccccaccccagatcttctgaatcagaatttgcatcttaacaaaatccccagagattttgtatgtacattaccttgtcacttttaatgtgcatccatctgtgaaattagccatagattatgaaaacagagtatgtgagaattgtaatccctctattgtaatctatggctaattcatgaaagtaaatgtgtgataatttaatttttatatattagagcagattcaaagttgagattcatgttttctatcacatctacatacttacatatatacctgtagattgtgtagggaagagggaatttacagctacagagctgtgtctccccagtgaatgtcatctattgtatgtccaatggaggaagtgttgagagcttctgcccaaaataaggataatactaaaggtattggcagattctacaaggctcaatttttaagtctcatgtccttcataaagtatttcccatattaccttaaggctacaatacagtcttcattttcagcatccacagtccatcttgtgtgtggcactcattcagtccaatgttttattttccccgtatccattgcttgtcacctaggacggattctaatttctccagtcaccacaacaccaaacagggccttgcatgggtcagagtgttcaaaataccatttattgacaaatgcatcaaaatcaacaaaaaaccagaatatagtcccaaaagagaaatccaccaagtaccataactgaccaaataatgactcaaattaactggaaagaacaaggactggttcataggcaggactttagattttttttgctgtaagtgattttttctctctttttaaaaatgaggttacacaatattaattaataagcaaatcagagtatgctaagcatttaatatgtatgatcttgtttaaaccttttaacagcccaggaaaattggttttattattcctatgttatacatgagacagttaaaattccaagagattaaataagctgagcaaggtcatatttcataaaatgcaagcattctaaaccctatgtggagaaagaatcttatctatcccaaagtgaattgtctactttgtgtagatctatggcatcagtttaacttatgttgccttcttagccctgtgtaacaggttctattgctagttggtatttgttcacaagataaaaattaattttaatattattttgaagcaaatataattatttaggaaaatctacccaaaatataggcatgcatcaaactccagcacccaataaaaagcagcagtaattgatttccattgtgaatggcctgtattcttctacattggcatggactatccagtttacttctgtttacatctggagtattttcaactttgacctagaaatacactgatcaccatttcactcctcatctttagatttcagttgccaatggcaaccttgaattacaaagttgaacaaaagctgcattttacttgagtggtttgtaattttgaacttgagttcatgttttctaggagttgtttgtctataggtgtcagtcctgcccttggttgccgaggaacccgaacattctgaatttgctatgcctctgctgggactcagtgggctttatcagtttctgaacagtttttgctttaaattattgggactgggtactcaattcacaggggtaatatgaatttggaaactgcactcattcatgggtttctaattccctttgtggatgtttttcctcaatgtgctccatgaatcatttgcttccttgcctcatctccaaggttgtggattgggttttcctagttcccatttgaagggtgggcacccctggctctattcagggacttcaggttcagcactccaacacccggcatcctgaggcctcctcttccaatctctcctcgccccgcaaaatggagaatcaattctgttaactgtgagttcctttgttatttctgcgacttaaggatttcttttccttatattcaaactcagctgtaaacttaagtgaatatgtatgtactgtttcattttgcctttccctatgtttggaatagaaaaggaaattttcagtcagccatattgactcaaagtcccatggcaatttattctaaggaaacttagtggaaaacaaataaacaaacaaaaactgaaatggttaggatatagcatgtggtcactttccaacaatccttgggtaacatgactaacctcagtctataaatttcttatgatcctgttatttttattcttgaagcaaaattcatgagattattctaaaaataagatgaggccttgcacgtttgctcaggcttaattttgaaaccattcattctatgaatgtatgattttaatgcatttcccattgcttttaatatccacttagctaactgatgatgttgaggttaaaatactatagtccttgcagtaattctcgtaaaattgtcctagtcactgtatcccacattcagagttctacatttttcttttttgtattttatagaaattatattagattttgttttcattttagaatgctatttttatgctaaaaatgaaataatcacattaccataaaagtgagaaatagaataaataaagatactcataattctaacacagtttatattttagtgtttcttttcaaagtcgttttgtattctttaaaaaaatggtcatagttattatcacagtatgtatacaactataggtacattttttcacttatcacaaaaatataattatttctccctgttttcaaagccattggtttatattatttgactacctcatagttctttaagtgagagccttatgatttttttacagaaacacttacgttttattcatgtttttgctgtttcttggcttttttgttagttttactattttccctgatctttagcagtaaattccaaaatattctgagcaagataattagagtaccatattattattgctgcctctcaaaggctaggagatatatttttaaagtgttaaaagactataaggaattaaattttaaatatatgcagcatgtattttacatctcagaattgctaagcgattaaatttcaaatgttctcaccacaaaaaatggtaagtatttgaggtgataaatatgttaattggctttatttaattactccatgttgtatttataaatcatggcatcattctgtactacataaatacatacaattttaaattgtcaattttatttatatatatgtgtatgtacacacacacacacacacacacacacacacgcacaacagatgctcccagagaagaaaaagaataaaataattgaaaatgtctactgagaaaacaaactgaaacaagtgatcctatgtctatatttaaggtaacataaccatacaaagaatataattactttcagtgaattttggcagagtaatataattgtgcatccttagtaggatatatttgatgaataaaaagaacttcaaaaaagtctcaagcttcatttgcttattttattgacaggtcataatattgaaactatttctggatatattaatataaagcaaataaataaatatgctaatgctatctgaaagcaacctttttaggaaacgtatgcttcagtctttatgggtgaaatgtcatgatgcctgaaacattttcaaatgactcagcaaaaaatatagagatagacaatacataatgcatatgtggcaaaacattgaaattaaggtagttttcacaggctggttttgttttgttttattttttggttgctttgcctgtacaaacaatgctaaatcaatgctatttttcctgtacaaaaataaatatcttagtgtattcattcttatatgttggtggttttgtttctgtgggccaaattcccaaaaatggagttgctgggttacaagcctatgtttgccttcttataaattttgtcaaattattgcccaatgtttcaaagtgtcaatttctcagaatgttattgcttctttaaaggaaatttcttttaaatttaatgaattaaattaaattaatcaatataataaatgtcccttgaaaaggtattgtgctattgcatttctctaattgttaatgagctgctttcatctatatttcaaatatatatagttgtattgtatatatattctttgtattttatttcttttcctatgaattgctttatttatgctcatttttcagagaaatggattattttcatctagataaagatatctatatttttctttcttatgtttttctgtcttgcttaaaaaggtctctgtaccccatgattatacagttattcacaatcacaattatacttttggcacattctcctagacagaagcaaataacaagcaaataacaatcctaagattgttattggcttcatattttatattacaaagtggtatatatactatacgtagtatatataatatacataatataaatattaatatatgtaatacattatattaatttattatgtttatattataaaatatttatataacatataaaatatttttatatataaatataatatattaatatttatattataaaatacattggccttatattttatattaagatctttcatacacttcattgggcaaaatgacctgagttggactctggaattccaaattttgaaaaccttgcaaatatctgtctgcacattatccagctgcatatttttttttaagttttctcaattcttctttgttattccattgtggcttattgttctctggtttcaatttgtttccttaggaaattggtttgattgtctctgattcataactcagtaatctgtcttatatttatgccacatttatgttatactgggttttgtttgtttgttttctgattgtaagctaaccttcaagagtaactttgcttgctccttggccttcacttattttttttatctaaaagctttccttaactatatcaaatctctgccttttttaaagacagaagaaaagaatgtcagagtcagaaaagcatcccaagtacaaaaatctttgacaacacaggaagaattgaatacatttgaacttgaccgtattgccttttcctgcttaactacccagagttcacaaaaatgactagtgggcaatgtcttttgaaaatcaagttaactgagaaatttagaatttgagcctgactagtcaaattaaagaactgggcctataataaaacaaactctgacaacactcttctttattaatatctgagtataataataacaactcatcttaaatttagaggttaaattcaatcatgttctttcgtctttcttgttcattttccaaaaagaggtcttatgaacttaagattaaacaaactcaagtttgacaatgttatgctagaaaggctccaaggcatagcctacaaaatcacatttgtcttgaaaatctatctgtcctgtggtgattttttttccaagaatatgctttgaggccacagcaatgaaaggatggggccagctgtgttagcttatgagtattttatgggtccaggccacataatgagactactttctgttcccctcactcaaagttatagccataatactgctgcctaacaaccaaccataaaaatcagtcacaaaacaagcatttgctaagttgatgagtctatgaactggttctggtctggaccaggctcacctgatctcagtaggcttgttcatgcctgtgtttagctggtggtcagctaggggtgagctggtttagaatagcttcacttttatatctgatagtcaattgaagtgatgcaaaaagtataataactgggccatgtgtctcctcttctggcaagctaggctgagcttgttcacatgatggctgagtaaacttctaactgtgagagcagaagcacacaaggccttgtgacgtctggactcagaacagcatatacttttgacacattctcctagacagaaccaaataacaaggcctccccagattcaagaagatgagaaatacactccgttctttgctgggatgggatgagctgcaaagtcacaccacaaaggttatgattacaaggaggggtgaagaattactgccatttgcacgaccaatctaccattcccacctaacaccttgtttcacttgcacagaatagaaattcaacacatattagagtacaaaacccagaatatggcaattagatagtatgatgctgaacctcagaacagaggcaatcaaaaggaagccctggtgatctgtggaggaccatctaagcctaggattatggggaaggaaaattaggaagaatctaaactggaattccacagttggacctaacttcgggagtcccctggttaaagccagatttaaatctgttaggggaaaggttataaattctccatgagcccagtggggctgatgaatgtgatttgaattgattgccaacaataaaaactcaggctcttacatgaagatgtggatttctgacttcaatatttaatctgacaagcatcagctagaactgagttgtttgtactccctttagacagggcctgtcatctctagctcttcagaaaccccacaaccccctctttcttgcacatagcctgctacttatttacatgacttgcctggcccctgtaacatctgagtttgcaacccttgggctggaatagctctagaccactgatggatggggctttgttggaacggagccagaattaccctgtattcttttcatattttcttacaatgaacaagtatttagtttataagaagaaaaagcaaaagctctaacttggaatgtaataaatacaattttgaaattagttcattaataattgtatggctgtttaaaaagagtgaaatatatggcacttaatatgtcatgaagcagtgacttagtttagaatataataaaatctactactatcccatgatgaaagtctactacagttataacttagccacaactgggtcaattattataaattattaaaaatcatcatcaaaattaaattactaaaatgtaggtttttcttagaattaaattatttaaaatgttaaaaagcattggtttaggtatttgacattttcttgtattttacttcttttgttaataattaaagaaatagtacttatcaagcactatggggtcttgtccaccaatgagcattaacctgagagaaattatctgctaggtcaggtacaatatatccatagctgaaggtcccccagttcaacctataagagaacaacaatctgttgttttcttaaaacaggctcacttgcttttcttccttccctatcttccttggaaacacatgtgttactgaattaaaattgaggtgaattgatgatgaggtctgaatggtagtaaatggacgctgtcaaacaacaggctaagatttcattcatgcaaaagagtacgacattgtaaaagccccacttccttctaaattgttggaacagcagggaaagaactggcaattgtcttcttcctgtttgatgccccagtgactcgtatgtgccaacatggagagtagggccctgtacaaggtgctccatcatagccacatgagtccagggccctgagcgccccctcacagcatgtttcctcctcggcttataagaatttatatgctagcaaatagattcataaataccccacattttatatgtagggagaatagttgactttcaatactcagcctaagccatttttaccagataccatttttatttttattttttcattttctatttttatttatttttatttttctttgatatttcaataatttttataaatttttaaaaatttcaacttttattttagattcagaaggtacatgtacaggtttgttacatgagtatattgtgtaacatatatgtatgagtatattgtgctgaggtttgggatacgaatgatcctgtcacaaaaataataaacatagtacccagcaattagtttttcaaggcttgcccccgactccctcccccactttattagtccccagtgtcaatcattgccatatttatgtccatgaatacccaatgtttagctcccacttataagtgagactgtgtggtatttggttttctgttcctacattaatttgcttaggataatggcctccagctgcatccatgttgctgcaaaggacatgatttcatactttttatggctgcctactattccacattataagtaccatattttctttatccagtccaccattaatgggcacctaggttgattgaatgtctttgctattgtgaatagtgctatgataaacatacaagtgcatgtcacacactttttgatgtgaaaaaaaaaaaaaaacaagtcatttaaactagatccataatctgttatctgagattcttggggcctgttgtttttcagaattttaacttttctgattttagaaaggcaatgtgatgcatataccatgagcataacactccaggcagacctgagtaatcctcaaaatcaaacaaattaatatgtctgcagttaagttcatgtatagtcatatgacagggcatacatgaaattatacatatttcatgtatcagtatcatcccaatatcagttcatgtcaatgagtctgccacaaatttgccagaaaaagaaaaagaaaaagaaaaaaaggaaacttcttctggatttcagaactttgggatagataagggattacttaatataaattaaataatttagtaatggcaaaatttatctgtcacagaagtgagagtgaaaggagttgaactaaaggggatgctcccaagctgctgacactgtctagaaggaggctaagactcaggaagacagatgtcctggagattgacttcaccctggcattccagggatcagaacaagccccagaggctgccctgaaagctgcagatggaggatgcacagccaggatcaagacaaaaagtagaactgggggctgagagtagaacccagacagggagctatcagagtggccaaagcagattaaccaccttggcatcccccaagagctattgagaaacgcaggagctcaggccccactcaggcctcctgagtcggacagaatcaagatcaaattccagacgatttgtgtgcacttaaagtttgaaaagcagggggaaaaatacaggttttaagtccatgtcttaaaaattgcctccaagctaataaggaggtgtgggggaagcatttaaccttgcatggtgtttcaaggattattctccctgctcaccaattgataagcagagataattttctttaaaattcaaggttttctcttggactcagcacagcacagctccctaccagacaactctccctgttgcccccgttctctccctgtctaccggagaatcccagcttttatattattttatgactaagacatccacgtaagtctccatttgaagaaaggcttccaggactttaaaacatctgaaaattctccagggcataaaatagacacattaagagacagtttaaagggtagctaaaatagtttacaaggcaaataaaaattagaatgaaaaatgaatcaaaataaagtggtggcaaaataagtcaaaataaaagttcaagttggttacacgagtttgtttactttgtgaaaatgtatcaagctgctccttagaccccagcattggcttccaggcctctgactaaagctgcacatctcaaagtccactccacactgctctgtctattctactcagcttcttagcttcccccagccaggttcatggctgaccttggaacgctcacctatcaatatttctcaacccctaaatgtaagaacctcagatcattttatattatttctgacacatttttctatttttctttctttcttttcctctttttctttctttctttcttttttttttttttttttggttttgagatggagtctcactctgtcgcccagactggagtgcactggcgcgatctcagctcaccacaaccactgcctcctgggttcaagcgattctcctgccccagcctcccaagtaggtgggatcacaggtgcacgctaccatacctagctaatttttgtattttagtagggatggagtttcaccatgttggctaggctggtcttaaactcctgacctcaagcaatccacctgcttcaacctcccaaagtgctgggatcacagccgcacgccactatacccagctcatttttgtattttagtagagatggagtttcaccccatgctggtcttaaactcctgacctcaagcaatcgcaatcaacctgcctcaacctcaacctcccaaagtgctgggattacacgtgtgagccaccacgcccagactctgacacctttttcaaaagacccgtgtgtgtgtgtgtgtgtgtgtgtgtgtgtgcatttgtagataccgctattcatcttattctgagtctttagccttattgtgccacacataacttgaagttgactttcagctacagacaaatgatgtgtccaactaaactttgttacatctcctctataggtgaccagtgaatgatattttaagttaatgtattcatcagccccttttgtatatctctttcagagagtttctatgggagtgggtatagaaacataaacaacttcaagtcatctcccctcttgatgtctctcagctgcaggtggagctggagcaagaataccaagacaaattcaaaagactgcccctcgagattttggaattcgtgcaggaagccatgaaaggaaagatcagtgaagacagcaatcacggttctgcccctctctccctgtcctcagaccctggaaaagtgaaccacaagactccctccagtgaggagctgggaggagacatcccaggaaaagaatttgatactcctctgtgaatgctcctgccaggccttcagaaattgcatggccactccagcgtcatcggactctctcttattacaaagatcactgcccaggaccatcttcccgagaagcatcccttagcctaaaatccacaccaaagggagagttccagaggaatccatgaagaattcccatgcccaggctccatgtgtcatgtggaaacctccacaggtctgctagtgaagaatgcatgtatgtgagatttttgttttctttccaatagcaaattcaaagcaagcaacttgcaggctccatggaacttttaatgaaggacagtgtcttctttgaagaaaatcaagctcgtgtttttattcgaagctctggtgtaaaatatttcaaagtcatagaaatagtttgagaaatgcatagcattatttaacactattgaacagccgactttgagcattgtttcttctaactgcccctcaactaccattatcttcaagtcaacatgcatattacattttcatcctttgctttgcaagcactggtggcttgcagtttgctaatttatttatcatagagtcatcaatgtatttgttgctgacatggttttattagatactgtagtgattcaaataagttttctatttgaaaaaaaaaatcacttgattgtatccttgcccagtgaagccatcctaagacttagcaatatggattgtacatttggctgcatgagcaagtcggccgcacacttccagacagtgtgctgtttgaattgactatttgcactcaaagtctgggtattcattggttattggcctgaaatgatcaaataactacaaatgatctgttgaataaaaatagttgagctgatatatgttaagcagatattcaatcagaatgaacaggttccggtggttattttgccgtttgacattttttatggttcatttatttttaatatagagaggaagattgaatatttatctagagaatacaaagacccacatgtaaatgataggtattatctccatgtatatatgtacccacttagtcatgtaagtgcatatacacatacacacacatgagtgtagacatgtgtttattaattgacaatgacccaaatctcttccacaagacttaaaaccaaattcagggacaaatggatagagaagaaaagggtcaaacatcgagattacatggatgttaaattatatggagacgctaagaaataattgatggagccattgatgcaaaccgaagtagatttagaacttatatgaatttgatttatattttgcaagatcaaaaattagatgttaagtatcagattttaagcttgttttaatggtcaaaaaattaggacagaaataatatggacatttattagtatcttccataatttttaagtctgacacatttctattttattctaacataaaaaaacttccattatatatttactaagtatatttaattcacttaactctgtctttataagttcctattttagatggaataagagaaacaaattatatcaaggtaaaactgatcaaaagcataattgaaagttctgaaaaaagaaaaataataatatgtagaaaaatgtaacttagagagtaacacatgaacattgaagttaaaacccagaagccagatgctcacagttttattttactttaaaataaacctgtctgactgtagctttgtgaaatatcttaaaacgcaaaaaccaattgtgtcctgaaaattgtttcaagaatttaatatttttatgaaaattattttatttaactttaagcaataactagagattacaattaaattttaatcaaaatgaaggcttagttcaaacataaggaaacagtgtttgattaaaaaaaacacatctagtaagacgtaaggggaaaatcacatcctctttggagatgattatattttgatctgaagggtttggggtgttcattagacacttaataaaacttaacttccaatgaaaaagaaatcttttgtaaatcattctacttttgcactttgaaagaaaggcgttaatcataaagaagcaagaatggtcaaaatcgaatgctgcatttttataaacaaaattacagactgtctgaaattgaagaagaatgaactaataatagcattcataaccaaacacaatgatgattattgcagaacattgtatcacattttagtccagagatagaataaagttgaataaccttgacttacacaaaactgttttggtagttggatttcattatcttagtgaatttagtcattttacaatatgtttgtatttggccatttactgtaatcacatttttatatctgtacaatgacactttttgcagttgtggggtagtgtgtaacactgtccatcttgcatcattgaaactactacaatgatactatcatttaataatattaatattacttgaaatagactaagataaagaaaaggggtctgtatgatgtgcagttttgtgcctttatgtatttgccttgttctttgtcgaatgtgtgaaattccgtactgtggtttttcctataatagaaagtagagctgtgtattaaattagactgtgtctctctgatacctttacactactgagaatagcatggttttggccatgtaaaccaattttcaaagttctaatgacatagccatgtgtttttggttttttatatttcattttaaaatttgagtatcaccatacattaattaatactcctgtagtagataagctgtcattaagtaattcccaaaaaaagggccatttgcttgcattactttgaatttaatgttgcgcttgtgcactgtgttaatattgtttgtgatggattggacgttgtgactcttgccttttaagaagaaaaaaaagataggacaaagtatttgaagctcttaaaatgtacatattttggttcttctatctcaaattatttaaaatgcataattcacatttttgtaataattctatgcaattttgtggcatgatgtttcttccacttgtaattttatgtgctttcatcacaaatccaaaggaaagaataaaaatttcttaacacaacccagcggttatttcttggggtcagagtcaaccttcttttgacagggaaagtggtgggagcgggcataatgccagtctttagggccatcatgcctaccctgacagggcacatccatgcctgtaaaggatattgggatgctgcaatgtgtgtgccagaggacacagttgtccttgctatcattccaccaccctccatccaggagtggaattacacttgccattgtttgcgtaatggagaccctctcttcctttctctcttccttcctttctccctgtcttccttgaccaaagttaagcaaggcaaaacagtcaaaagttttttgacataagttgcagtgacaagaactgacagagcacttgatgtaaattttcttataaaacagattttaaaagtgtttacaatattgataggataagaaatgtatgtgtgagttttatgtaaatgttccagaggcaccccaaatgcaatgtattaggtacttatttctgtgttacaaatggctctaaaatctaggggcttaaaacaatcagaattatctcttatctcttagcttctcaaaaaaaaatgtgtgggtacctagtaggtatatatatttatagggtacatgagagagagatgttgatacaggcataaaatgtgtaataattacattagggtaaatggggtatccatcacctcaagcatttatcctttccttgtgttagaaacaatccaattatactcttctaattatttttaaatgcacaataagttaattgactgtactcaccctgttgtgctatcaaacactagatcttattcattctgtctaactacatttttgctcgtattaatcatcctcactccctcttttccccaactaccctccccagcctctggtaaccatccttccactctctatcttcatgagttcagctattttaatttttatatcttaagaataagtaggacatgtgacgttcgtctttctgtgcctggcttatttcacttaccgtaatgacctctggttccatctacgttgttgcgaatgacaggatctcatttttaatggctgaatcgtactccattgtatatatgttatcatgtttcctttatccagtcatctgttgatggacacttagattactttcaaatcttggctatgataaacagtgctgcaacaaacatggtagtgcagatatctcttcaatgtactaatttcttttcttttgtatatgcctagaaatgggattgctggatcatatggtagctctacttttagtttcccaatgaatctccaaagtgttctccatagtgcttgcactaatttacattcccaccaatagtttacaaggcttcccttttctcctcattctcatcagcatttatttttctctgtcttttggataaaagccattttaactgggataagatgatatctcattgtagttgtttgatttgcatttctctgataatcaatgaggtagagtatacccgtttgccatttgtatgtcatcttttgaaaaaatgtctattcagatcttttgctcatttttaaattggatggatttcttttctaaagaattgtttgagctacttatatattctgcttattaatcccttgggagctgggaagtcttaaaatgttttctcccattctgtggattgtctcttcactttgttgattgtttccttttctgtgtagaagatttttaatctgtgtgatcccacttgtctattttccccccagttgcctgcacttgtggggtattccttaagaaatctttgtccacttcaatgtcctggagagtttccccaatattttatcttagtagtttcatagtttcaggtcttagatttaagtctttagtccattttgatttgatgtttgtatatggtgagagatagaggtcaagttttattgttctgtatatggatatacagttttcccagcaccatttattgaagagactgtcctttctccaacatatgtccttggcacctttgttcaaaatgagctcactgtagatgtagtgatttatttctgggttctctactctgttccattggtcaatgtgtctgtttctatgccagcaccatgctgtttgggttactatagctctgtagtataatttgaagtcaaataatgtggcctccccagttttgttctttttgctcatgacagctttggctattctgggccttttgtggttccacataaattttaggattttttttttctatttctgtgaagaatgtcattggtattttgatagggattgcactgaatctgtagattgctttgggtgatatggacattttaacagtattgattcttccaatccatgaacatgcaatatcgttcctttttcttgtgtcctcttcaatttcttgcatcaatgttttgtagtttttatggtacagatctttcagttctttggtttaaatttattcctaagtattttacttgtagctattataaatgggattatcttctcgatatcttcttcagattgttcactgctggtatatagaaatgctattattttttgtatgttaactttatatcctgcaactttactgaatttatttctcagttctaataatttttggtggagtcttagctttttacaaatataagattatatcatctgcaaacaaggataatttgatttttcctttccaatttggatgccatttatttccttctcttgtctgattgttctagctaagacttaaagtactgtgttcaacaacagcggtgaaagtgggcatccttctcttgttccagatcttagaggaatgacttaccatttttttcaattcagtgtgatactagctatagatttgtcatatatggcttttccttctgtgtccagttttgttagggcttttatcacaaagtgatgctgaattttatcaaatgttatctcacaggttttttgagtcaggaattcagagagggcaaagcagatatggcttgtctctatgatatctggggcctcagccagaagattagaggtctagggctagaatccactcacacatctagtggttgatgttgtatcaagtgggagcctagctggggctctggggtggaatacttgctcatgccctttctatggagaagcctgggcctgggctttttcacaatatggtagctggattccaaggaagagcctcctgagagagccagacagaaaccatcaacatttttataaccaagcctcaaagttacatacatcacttatgccagactctattcattggtgctatcacaagcctcttcccagattcaaggtgcagtaacaaacatagaccccatcttaccttgggaacacagttgatcatcctgaagaagtacatgagggatggaatgaatatataggcatgaccatctttaaaaaatataatctgccacacacagtatgcatgaagccgaatttgtgttaccttcaaagctgctccacctcctttgctttctacatcagtgaacaaaaccagtattacaaatcacactccagcctacacaaccttatggaccattccacctcataggctttttaactaccatttctttcaactgcttcatccatcctttctctttctcttaaatcactcccccagtacacgcacacagacacacaagttcctttggttccctcctttccctggctaacttctatttatcgttcagtttataacataaatgtcaattcctctaggaaccattcttggatccaccaaagcttctgccaggccccttcatctattctcccaatgcaacctgtatcagtcacccactgctgcataacaagccacagcaaaacttgatgtttgaaataactaccacttactattggttgtgggcctatggatgggtagatggctctgctgatctgagctgggctgggcttatctcagctgggctcatctatgccgctacggtaagctgagagctatctggtggctgatcatggctaggctcattgacatgtctggggccttggctggaacaaccgggctgatgtgactctaattcataggatttctcatcctctgggagataaaatgggtatccaataaaatattctccaactattaaaaagagttaaatactgatacatgctaaaacacagacaaatctttaaaactttatgctaagtgaaagaagccagatggaaaaggtcacatattgtataaatccagttgtatgaaatgtatggctttttcacatgtcagaggcaggatataaagaacacataaaagtgctcaaggtctcttgaagtctaaactcagaaccatgcaccatcacttccaccacattctattggtgaaaataagccaaaaggccagcccagataaagaataaaaggagcctccaatgtcacaaggaaaaagatgtagacacagggttgttactaaggtaatcaatccagcaatgccttgttatttcttccacatagagagtgcatgccaactccatgtaatggccttcttactaaatacatcctccatggacacctttgatgtcagatgtcatgtctcatttacgatgaatctgcacactcaccctaatgtcataacttaataaatattgcatttacagtgaataaatccatttgcttatctagctattagtgctacattagaggaaaataaacaattggctaggtacaaaggctcatgcctgtaatcctaacactttgggaggcagaggtggttggattgcttgagctcaagagttcaagaccagcttgggaagcatggtgagacccaatatcatttttcctattttaaatataatttttttccctttcctaaaatagaaaaaattagctgggcatggtggcatgcacctctagtcccagctacttgggaagctgaagttaagaaaatcacttgagcccagaaattcaatgctgcagtgagccatgattgtaccattgcactctaacctgggagacttagagcaataccctgtctcaaaaacaaacaaacaacaacaacaaaaacaaacaaacacaaagcaagaccagaaaaagaaacaactgatatctcaattatctcaataataaatgtcattaagtcaatgctacaatgctatttaggtactttctgagtcagcaacactataatagtaaggctagactacacaggagccacactctttgcctttgacttagggtaccaactccaaaacatgaaagagctagtaactgatgaaaccaaatattattttctgagacattggtgaagaaagtggggcttaccttagatcctggggttaccaagcagactctttttgcccataagagaaaattcaggagcaattcttgcccctgaacattcatgtattgttaaattgcttctttgaacactctggatattgtatctgtttgtttgttttatgtttctctctgattctggatcttttattctttttaatattgtatttaatttttttagaggcacggtctctaaaaaaggcatagtctcactctgtcacccagtctggagtgcagtggtgcattcatagctcactgaagtttcaaactcctgggcccaagcaaccctcccacatcagcctcctaagtagcggggactgcaggtgtgcacaatctagctaattttttaaataacaactttataattcatgttccataaagtacactgttttacaaagtacacactccagtgatttttagtgtaatcacagtttcttattaatcatcaccctaatttcagaacattttcatcaccccaaaaagaaacctcatacccataagaaaacacttctcattccctcccccaaacattctctcttcagcccgtgaaaaccattaattctttttctgtctctgtggatttgcctattctggacatttcatacaattgaatttatacattatgtgaccttttccatctggcttctttcacttagcataaagttttcaagattcatctatcagtatttaactctttttaatagttggagaatattttatcggaaatatattttatttattcattcacacctgatggacatttgggttgcttccattttttggttattatgaataatgctgctatgaacatttgcatacaagtctttatgtggaaatatgttttcagcttctcttgggtatatacttaggagtagaattgctatgttatatggtaactctatgcttaaccctttgaggaactgccaaactgttttccaaagtggctgtaccgctttaaatacccaacaatgtatgaagcttccaatctctcacattcttgctcacacttgttttctgtctttttgattattaatatcctagtgggtgtggaataatgtctcactgtggttttcatttgcatttctctagtaactaatatgttgtgtatcttgaccatatgcatatcttcagtggaatgtctgttcaaatcctttgcccatttttaattggttgaatatttgtttttaaatctaggtctcctttcttgatttttggcctctggtgattttgtggctgtccatcacaaaacctcatcttaggaaggctctttcaattattatttctccgaggctactgaacagctgtaggttgcatagaaatagtcctggttgttttctatgtgactccagaaagccatttgtctgcttattgttttactaaatgtcaaatatttgtttatttccccagacttctctttcttctaaaattagagtacataaaatgtctgataaatgtgagttgcattaacttgcatccagtaaatttcttacagaagaaaatgtatttattaagggcaagtgaaagtttgaatattgcaatggcgatcttagccccacacactttaaaagttgaagcaaattacataacacattatccaactgatgctgtcaagaaattcaatgtgtcaataagaaacacaccaataacaaaggaaaacaaattaccaattaaattatgactcctcatcaaacataaaggcattcaatacaatttcaggaaggttaaaagcaaaagtatatcttagaatcagtgaaatatcataatttggtttcttttttttacttccaaaactacctgttctataagaacctatggttgtacgttaatttatttaaaaccaatagaaagcacaatctccaggcaggattgtattcaaagtaaaaataccccaagaccagaaaaatagctggaaagcagagataagtttgtactaaacttgctacaaaaagtgcccaagtaagatttgattcataatctaccagagtctcttaacattgctttcatcccctctttgtctctctcgtgattgtcactgataaagaaactgccaccaaaaccacccttaaaacccagcttgtacagctcttgccttttctcccctcaccctcatctctgtatttactctattttcttgaaccatctttaatctttgcatgaatcctttaagctttccaatgtgaatcactgtattctttctgaatgctctagtgttgcttcattcagccccccaaaggctcacaaataaagcaggcaaaaatagaattatctttacactgggagaggctacagctacaccttcgttaacatattttccagtaatatactcaatcaacacatatttaataaacacctactatattctaggcattgattctgccataggctcagtcagatttaaagtgcatgtttcttggtaataatcattctcaggtaagtatatctttaagtccactctctgtgcctctactcagactctgtgtctctaccccaacacagtttgacagaaggaagggtctatttctcttttctcacagctaggctaatgctatgcaagtatgcactcttgcacgctcacacacacacacatacaaaccccagattgtggcagagggtcttcagcatcgaatggtatttaccatctttttatcctcacttgcaatttacacgcagcaaacggccaccccaagttttggaacctaggatatagcccaagagacagtttatgagttcaagtagtttatttgggagatgaatttgtaccgaaatctctattaaaaatgccaaactaggattgattcacaacacattacaaagtctctactttccccatcttttcatctccctgtttattacagtcacagattaaagacctgcccctaacatttccctcaattcccagttgatttattccattttctttctttcttctattttctttaagtgaggtgggagtgtgaggaaagttattttgatgactgggttatcactgtgaacaaaagtgctcaagccccccagtcaaactcaaaaggccttaggtgcacccctcacagttaactcaccaagacatgaagaagctgggacatttacccaccatttcccatcactcattagttgaggctttctgctcaggcactagctccttaacacttccaacttgtgcaatttattagccaagcatgctcctgtggcaagaaagcatcctcaggcagaaataaaaaactctttaggtgaagagagatttttctcaggtgatctctgaagaaggctaagggctacatcctaacacccaacatgtcaagaaaggttgcattccatctgtaagtaacatacacggaagagttaggtaaactggtttccataaagctacctatgcactaggaattatagatctttaattgttaaacctcaaggcacccccttgcccaactctgagacttatatgtgaccataattatagcttgactcatcctcaaatggaaggacccagggaataagcctatgccagccctagaattgggcttggaaacatttgagccaggaattctagggtgctggttatagtctaaaaagggtatgttgcctccagtttggcattaggccaaacagatttctccttgtggggtagacacaaccaggcaaaggccagagttaagacctctaaagcatgaggcccaaggcaagcacttctcttgcctggatccaggacagtattgcttccaaacataagcagctggataatatcaaaaatattaaataatataatattgtccctatctgatatggcttggatgtttgtcctgtccaaatctcatgttgcacatgttgaaatgtgattctcaatgttggaggtggggcctagtgggaggtcattgaatcatgggagtagatccctcatgaatggtttagcaccatccctttggtgataagtgagttcttgctcagttagtgcacatgagacctggctgttgaaacatccgagacctcatttctctctctgtctcttgctcccactctgaacgtgtgacatgctggctttccctttggcttccaccattagtaagagctccctgagcccctcaccagaaactgagcagatgccagcactatgcttcctgtacagcctgccaaactgtgagccaattaaacctcttttctttatcaattgctcagcctcaggtatttctttatagcagtgcaagaataaactaatacaccatatgatctttcatttactcaaaagtcaagcctttctgtgtttcatgtctcagagaataaaagcagtaaggtggaaagctgaaagtctgtgaatctcttcctggcatttctcattcaaaaacctgaataattggaagaatggaaaggattccagttatggacaaaatgttgaaagaaatcatgaaacaaaataatgtctgcctgatctgagaaaaataaacaaaataaacagacatggggggtgggtatgttaaaagtatagatgtcagaggttcttgagaaagaaatttagtctctttatgcaaaacaccaaagaaagaacgagatctcagagggaccacagtcaaccttagcaaattgtactaaggcagcttcaataaatccctatattctagtgtggcatggaaacaacagaaaaattccagaattcccaaggttgaaacagacaaagcagtgagaacgattgaatataaatggactaggaggacagcaacaacgtagagtggtggatgtctcagcagaggcctgcatagaaagacgacattgaggatcagtgggttctccttctggcacatcttagcgctgtgtaagcctcttggaatttagctacaactgaaaataagtgagtttctcttagcagatgggcactaaaaaaatgaactattgagttacataaaaacatcttaccaaaagcttctgaatcatgaagagagtcatttatacccaaaatgactgagcttatccgaaatgtcctttaagacctgaaggaatacacatgtatatgacacgaaagataaaaggttgttccactggccaactatgatgaagaaagagctcccttagagattcccatgttgaccactgatttttcttctcagtgcttgaaaccttgctgataatgttttcttaaatttccagatttgcccttcctcttcttctaagatttgggcacacctgaatatttaccttaatatgcttaatgccatacactgtcctttctattccaatggcccgttacggtagtctgtggtccagtatattgtattatcctacttattatgtgctggattctaattctgaggaaagaaagccattgtttatgctgtttatcttatttactgcctgcctaagcactgcataatgcaaagggagattagataaccacatgttagctattccagctgtccatggcctctcaaatcctctctgctttttgaaagttccttcttatgtcattcagcacatcaactttataatggcctctgagacagctaccattttcagttagcttcctagttcccaattttcctaacctatcttccaatttaatgattctcttttcagctgtgtctaatttgctgttaaatctgtctgttgagttgtttgctttttgtttcagctcttgcatatttttatttctagacattttttggcattcttttggaagtgctagatcactcttcatagttttctgttccctgaacattatttctacttgtctttttttcctttaagtatagtaagatgttttataaatgtcagcttcacaggttagtttctactggttcctgcttaaagtgctttattgtcttgtgtgtttaatttttactgaatagtacttattttccttgaaaaattatttatggccattctctaggatctaggatggaagtgccttctgagagaaagaattcatgtttgtttctacatggtgcctaggggagtagctaacctagatctcttcagtgtttgtttgtctatttttgatttggttttgttttttaatgtgtctaaaccactaatgtatacaatatctcattttaagaatacaatttctgatcttgccactgcactccagcctgggcaacaagggagactccgtctcaaaaaaaaaaaaaaaaaaagaatacaatttcttgtgaggccagttttgcagatacagcctttttgggaaaactttttccctagctgagaatcaaagaaactttctttgcaggccctatcataaagacagtgttaagattacttctaatttttctttatcctaattttgaatcctttgggacacctgcttaatggtcaaatggcctcttattagactttctgatttaaattaactcagactttcatttttatctgtcccatggggccatcaaaattgaagttcaaatttgccaggattggtaaacaatgccttcagtgctctacttacctctctggattctagatttcccttagagtttggcctgataattacatgctatcttgtatcttcattatttttaaaaggttttgttttctactttatctagtactttagttgttgtctcagaaaagttattgagttcctactggatatatttgaacatttttaactatttttctgaaaaatacattcagtgatacccagacctggccctgcatctggttaacatgaaatgtttactcttagtctcctgggaaagtagccaatcaaagtctaaaaatgaagtggctcatttgttgtttggggacactccatagcatcacactcatagcaactagatagaaaaatatcaggtagggatggcaaagccttcttctataatctaaagaccttcaagttgtcaaatgtatgtatgatatccttgtaagctaaatttagcacctagagctccagtttctgtctaagatgtgtaaaaactcatctagcctgacagttccctgttggctgcacctctgagaagtcaattattctcaacaatgccaattttaatttatccaccctaaattactcccaaatttctatgtgtatttttaatagaaggtataataccaaatttaagtgctaatggctttctggacagtgatataaaacctgacccttggtcatcaaattgcctgaggaaacagatgttttgattacattatatttttcactaagaaataagtataagatcaattattctttattttatctccagggcttatagtagggccaggcacaattaatgacaattaataaaggttgaataaattaattaacctgtggtagattggttgcaaaaaaaaaaaatggcactaattcttcacagacttcctgtatttttataatgtgactttgcagatcttgccatgaagaggccatgtctcttctctatccctgaatctgggctggtcttaagataggccttggctaagagagtgagttactctattattacaggtcccagattaggcgtctttttttttttttttttttttggaatcctgttaccaccatgagaacaggcctttgctagcctgttggaggaagagaaacctcataaagcagagttaacctcattttcccagctgaaggaccaaacataagatagagcccaaccaggatcagttcagccacctagccaagcagcagctgaccacccagctgagtgagcccagctaaggtagcagagctggttcaaagcagcggaactttctagccaatctgcaaacttgtaagcattaatgaatgatttttttgttttagccactaaattttggagtgcttcatttacagcagtaactaacttgcacaaaatcattgttacaaacccttctaggggtattttaaaagaaaggacaccaggttgggaatcagaagtcttcaattccatttcactctctgccatgagtttgttggtcttgcacaaaacaggccttctctgtgccttagatttgagattcctttgagttctaatcttatttttcatgtggaatcttccaaaatgttttactctgcattcctgccatccctcatgatacagtgagaaaagttgattttttttgtatacttgagaatgtattgagtctccaagggatttgcttgcatatcaagtattggaaattctagaaaattgagctgatgtatccttactctaagccttctctaaaagcatatttttagaataaatccttactgggagctttctgtgatttgtgttttcttttgtttttgttatgttattctcaaagcagaagtcaaacaaacaaactctattaaaataaatatccttgttaatcaaggctttagtgaactttgttccttttcatcatcccaaaaaggaacacaaaacagtgatttaataatggaacaaaaatatcactcagaaaaagaaagaatcctggctaacaccttgaaaccccgtctctactaaaaataaaaatattagccgggcgttgtggcgggtgcctgtagtcccagctactcaggaggctgaggcaggagaatggcgtgaacctgggaagcggagcttgcagtgagccgagatagcgccactgcactccagcctgggagaaagagcgagactccgtctcaaaaaaaaaagaaagaaagaaagaaagaaagcactccaatattcatctgatttttactaattgtttatattattggaatagagataattgtacttcatagccttcaattctgaaaagtataatggattcatatgtaatggactcaagcacacaaatttgtgtttatgcaaggggagcccatgtgacaatgattcttagtagtggagattagggatctcttagagattctgatgtaaactaagaaccttgattcagaaaatcacacaaatgtaaacattcacatagtagactttttcatgatttttgcctcctcagcactttataaacactgttctttttttttttttttttttgagatagagtctcactctgccatccaggctggagtacagtggcacaatcccacctcccaggttccagtgattctcctgcctcagcctcctgagtagctgggattacaggcatgcaccaccatgcccagctaatttttgtattttcagtagagatggggttttaccatgttagccaggctggtcttgaactcccgacctcaggtgatctgcccgcctcggcctcccaaagtgctgggattacaggcgtgagccaccacacctagcccaaacacttttcttatgtttgagaattttttccccttcttaatctgcatacctccggagtagaatctaaaaattcacttcccgtggttgcatctatgacacagacacatggtccataatcaactattcaggtagatatacacaggacatctatttgaaagcaaatgatattcaaacacatgcactcacagatccactctggctaggttggaggtgaagacattgagatttcagacacagtagtgcgtgggcagaggtactagtacattatagtgcatggcatctaagtgaggtgcagtgactgttcaggagtcggggcatcagagtattccctgaagcattgtgcagtgtaactttagagatgttcctagctgtccaactttcagcctaattcttagaccctttcagagattctgggagtcatctgatgcccttcaataaatgcttaaattatgtctgcaacagagaactctgaccaatatatgcatatcaaataaaaaaacagattttgcccttaatttcaagatttttacaagatcttctgaagatcatgcatggcttagctctcagaatacatagatgctcatttgttatattgtcagtggagaggtgatagggaatgatgctgcataaggcttcttggtacagaagaattaacactgaatagagtaagcagtcttggccctagtcttggctttgctactatttacctagtcattgcacagtaagtggtgtctatgtcccctgtcctgaatctgggcaggattgtgaccattagaataaggtagcagtggtgctgtgtgacttccaaggctaagtcaaacaaggcaacagatacaacttctgccttgtagcttgggacaccctgagccaccatacaagaagcctgattacccagaggcctctatgctgtgagcaagcccagaccatacagaacagccatgtgagttgccccagttgagaggctcagctgaggtgccagttgaaagccagtaacagctgccacatacaactctataacttctcatacagattgatacatgagcccaggacatcaggtattacccaggactgtcttgggaaaattgatgtacggccacccttttgagcatctactctgtgctaagcacttgtgccttcctttacctctgtgaactccttaaaatggggtgagggttgttgagctagtatatatcacaaatctcagtgccacaaggataaggcaagtaacaaaaacacatgagacagctgaatttgagtaacagaacatgtcaaggacgtcagtaaactgaaaggcacacacgaagtctagagggaacagatattcagctcccatatgtattatcagaaagcaatgcaggcacaattatctcctaatactctgattttttttttcaaaagaagttaaaaatatacatttttccatttaaatttaaaacgttctagacaatttttaaggtagtctttatgggttggaggatttcagtggactctccaggctaatagtccaaaataaatcaattaatgtaaataccccacaaccactcttaggtatctgctaatcctggctctccagcaggctcactttggggatagctgttatttttgttagaggggaaaccacttctataaaaagccactcttttgtctcagaattctagattgaaggtaattaaagctcccccccgcctttttttttatcttgtgtgaagaagttttaaactatcatgtttagttatataaatgtccacccaggtgcaggaaaaaaaataccaatcatgaactctgtgtattagtcagctattattgtaaaaatgttatgtagcaaatacccaaataacttacaacaagcattaatatcacagtcatagattttggggctggctaatctaggctgggctcagttggatggctctgccttacactgtgaggcagctaactatggcttacattcaggtcttctccctctgtgtttcttctgagattcagggagaaatagcagcatctatccagcagcaactctcctcacagcagatcaccagaatgcaagagctaagcctaattgaacaagttcagctaaggtctctgtttgcctcacatctgctaatatatcactgaccaaagttaagtcacaaagccaagcacaccctcaaagggcccagaaggacactccaccaacaatagaaaggggaaagaagtgaatgcttactgaaactaacccaaactctcatatcctacgtgtctttttgaaaagctgggttcttttctaaatcatccccgaacaacctctctctcaggcctcactggctccccatggagctgctggactctgggacgtcaccccaagtggattttggcctgctgtgagcgaaacacgtggtgggtggaagcaaatgccgaagacttggaactctcaggacaagtgctctaaattaggaacaaagcattccatgaactacgtcaaaactttaaaaataagcctttctccatgcacagctaatgaccttgctgaacacatttaaaaatgtctcatttaagatgtttaagtaattactcaggaggagtgaccataaggtttttccatcccatctgtgccctgcctctaagccctctctttcccttcattgccacgggtcctggttcccttgcaggctgttctcatgtaagacagcaacctaatgtaagaaatctacaaatcaatcgtgcctttgggtggcttctttgctaagaatattgttttatttactctgttcttttcatgccttctaaggagaaagaagacaactactgtcacagagagtatttctttaaggctgagccataggggaccagaggatagagaatacctacaatggtctctgatcacaaactcctttaaaatattattttttaaaagaaccatgaaacaaggtgaacatgctgcaaattcaagcctgagtaaataaaaaaccccacataacacctgatgttttgtaggagatgcaaaaaccagggtgcatagaaaacctagaagtatatattagtcggaagtagactgagatagtaggatagactgacccaggctctcaagtttcttatttactgtgtaactcaagataattgggctacctcatggtcaatcttggtacgtggttacattccgaagaaacacaagtgtctcatcaaacaaaccaaccaagaaatatgaaaatcttccatgaagactcaaagagatgtcaaagatagaggcaaattgtattgcataacacatcacactcctcttccctagcttcttgaagtcctacatctcacagcaacgatttaatcagatttattaatttcaattattcccatttgtttctccacaaatttttttttctttttttttttttaaaaaaaagacctggggccaagcataacggctaatgcctgtaaacccaacaatttgggaggccaaggcagaaggattgcttgaggccaggaatttgagactagcctgggcaacacagcaagaccttatctctaccaaaaataaaatacttagctgggcatgttggtgcatgactcctaggtacttaggaggctgagggaggatgatcacttgagaccaggaagtagaggccacagtgagctatgattgcaccactgcactttagcctgagcaacagaggaagacccctgtctcaaaaaaaaaaaaaaaaaaaaaaaaaaaaaggaaaaaaacagcaacctgggacctaaacagatacacaaaggatgcactggaaggtagagagtcagtgaatatgtatcagtagaatgtatgccttggtcacacttgctagggtcaatttccatacctcagacaagcatttgctctcatgttgggtccagagctcccctggttggacattgtattcaaagccacgctccagtttaaaaaatagaattgaggcctaaaggctttggttctaaccccagtcccatcacttaactagctgtttgcacttggacaagttactttgtttttatgaacctatttcttcaactataaaacaggaattttaaaaaatcctacctcaaggtatcatcatcaggattaaatgatatcatggaaatgaaacctggacacaagtggggactcaacaaggctgtgtgaattctgcacaacagtgaggtttagaaagtgctttgatcacctagatacgccatttttcaaatttctcttttatttatattcatcccctaaaattatattaaggcttccttactgctgtggactgaatgctccacagcctgccacaaattcacacattgcaatctaaatccccaatgtgatggtatttggaggtcaggactttggaaggcaattaggtcataagagtggagccttcatgataggatttgtgccactataagaagaggcacaatagagatgatctctctcagccaaggtgacaatacagcaggaaggtgccatctgcaaaccaggaagagcatcctcaccagacaccaaatctgctggcacctggatcctggaacccatcccagtctccagaactatgagaaataaacgttagtcatttaagccactcagtctatggtattttattacaaaagcctgagccgagtaagacagactcatatagtgccagtccactgaagtgtcttttgaatttctataggtaggacatccagccttgatttcttttccacatgtgatgaggacaagttagttaaaaagatgacagaggatgacttgggctaccctagatgatcctttctcaggaaagaatgacaaatcccaaggaaccaggtacctgctttctgagacacttcctccactcctcagtcccattcatatgtttgccctgttggtggcttttataaagtttattgagctttagtttgtctctgcctgcctttattgactatttaaacatgcctgaaacatctggtcccctgagagcttttaccaaggtctctggagtacagattaggttgtcatttgtccaatttgttgtcaaattcaaaagaagttcttctaaactgaggggattcaggacagctgcatggactcatctgtgagcacccactgagagggtaaaggaggttgaaattaagccctgagtcatgacactgggttgaagcatggtgagagggatgtcttctttgtaagttgactgcctgggggaaatgctttttttttaatctggtgattctcaaaggtcctgcagggctggctgcagtcctaaggacttttagtacaccttctgattgttcatctgagaaaattgagactggaacttatcagaactccttagagggaagatattactatatggacaagatctataattgctctcaaggcttttcatggaagctattatctatccaagagagaaaaaaactcagctaatgtccacagtccaagctaacatattgagtaaagggcctcagaaaaagtaaaagaaatatacgccattttaaaactacaaaagttagtcttcacaggagattcaagttgtcaagaattggtggtttcatttcattcgcttaagttatttaacaaaacaggatatttatcaaaacaaaatagtgtcttcacactattagacattctcctctattaagacaatagccatctgctggagtcatatgtttactaggacaagaatttttggtggggtgtggtggttgacgcctgtaatctcagcactttaagagactgaggcaggcgggcgacttgaggccaggagtttgagaccagcctggccaacatggcaaaacctcatccttactaaaaatacaaaaattagctgggcatggtggcgtgtgcatatagtcttagctatttgggagattgaggcacaagaattacttgaacttgggagtgggaggttgcaaggagctgagattgagccactgcactccagcctgggcaacagagtgagactctatctcaaaaaaaaaaaaaaaaaaaagaattatttctcattctacacctgcattattgaccatttcaatacatgtttgtaaactgaaatgtcttctcaggcttgataatgtgtcaaactcttcttcaatatagaaagaaaagttcagcaaagagatctattatcaaagttgccatgttccttagatatttatgtttgcttcttgcactagagtctgaatccccatctcccaccactgagtgtggatattaccctgattcttttccagtgcctgatttagatggatactaaataaatgcttcctgttttaatgaatgaataaactaaagttatgtcattacattgtctttcttttcaaaccttgatgtgaaatttgttctatgttggcctggcaggaaagtctccttaatgctggaattctcacataatataagttatagtatattccatatactgtataatagtatatgttacaaatgattatactatacaataacatactattattataatataataataagaaggaatgtattcttgctggtgaaaaatgttttttatatacacatatttgaatgtgtgttttatgtttgttatactctttatataatacactttataaaacacacacacacaaacatatatatatgaagattttctgttactttatcatgatccctaacaaataaatagccttgtctagccattgttcggaattgggaagtagacaaaatttctcattgctttcaattgatgagacagatgtcccaagtattgtctttcctgttcaagtagacataacctggtaaatgtatgcattttaacacaataaggatgcttctctagaccatttttccttgaagcgtggtccatggacatcatctggggacttgatagaagtgtagaatattgcccctatcctagacctactgaattagaatccacattttaataagattctgggttagaagaacatagttaaaccaaaatttggagacctcaatgactgctcagctataccgtgggaggtagtcaatgcctacgacaaggaagtccctactatccctcccagttcctgcatcttcctccttgaatttgcaatagatgggagggcagtcattcctaaacccatccttttctctcagaactggtgactggggcaaaatatgtgctttaagtggaattaataataaaatattaacccttcatgaatttgtgaaaatatttcatcctatgtttgttttctgggcttgtcagcctgggctctccttcttagaatgaagtcactatttatcttgctcttatgctcaaccttgaacagactgcttatgaacatttagtttttagtgttttctaaagatgatgacgataatgataatgacagtgatggtaatgatatgctgagagtgcttcaaatgcctcctcctaatcattctcaacaatctgcttagaattctaagtaaccagtgattttcaaaccaagacctgcagaggcctaggtgctgggtcactgcaaggggagaggaaggcaggaggtaggatggctgaatggcatggctgacccacagggactgaggttaagttccagaggatgggggacacaaacccgagcatctttactttcatctgcttttacatattgaagcctggcaaagccatttttttaacataaatttcttaggacctaatattctcctactaaagcaacctagattactactgtgatccataattagtatatcttgaaatacttagtattcatattttcctgggaaggaaagagaaacatttaagagaataaaaaattatattttggcttgaagcatattcttcaatccatgcaggttgatagactttgtttgcatatttcaaattcagacttaggttttagtaataccatgagatgttatgatgagggaaatccagtactgacaacattttaaaagttttaaaggccctgaattctttgaaagaacctggaacacacaactaagaaatgtcatgggagagtctccttgtacgggtacattctgggaagggtgatgaaaagaaaaaaatctccttggaatgtgttaaattcagtttagtctggcatcaaaggaatgggctagatactcattagtgacctgatctattacaataattctacacttccaagtttacttttgaattcctgaggtagaaatccattttagttgagaactacaaaactggcaaattaattgtattgacaacaaacccaaatttccaatctttccattgtccattccttttgccatcacttggattcataatcttttcaatccttagaaacacattgaaataagaaggaacaggaattatattcatttcaaaattgttcctaggttatgtgtgtggcagactatattttccaaagacaaccagcagatcttgctcctacagtgtgatggtgacaccacttccatccgataggggacttatgtccttttcccttgaacctgggcagaccttttgtgactgccttgatcaacagggtatggaggaagtgacactatgagattttcaagaccaagtcaaaaaatactggcactcaattctgccttggtctccttgatcactagctcttgcgaatgcacctgccatgctccgaggaagtccaagccatgtgggtagaccacatgtaggtatcccagcttacaacctcagtggagcttccagccaacaaccagcatctaccaccagacatgttcctcagggagcctttacatgactccagcatcaaccacaatttgactgcagcctatagaggaagaaaaatatcatttccttctacccatcttaggttattggctgaaggccttgtaacaaaagacagatgaacaagagaaaaacgtgcatttttatgcaatataagttttacatgtcatgggagccttcattaggaaatgaagactagagaaagcagctaaacatgggtgtttgtatggtaggttttgtgaagaatggaaagtaatggagaaatatgacaggataaaaagaagagtctgagctaactggagaaaacggcaagatgtgtttgttcagattcttgttggcatcccttatcttggaggtaaagatgttcctttactctgggtatagggaggacacctctcacatgagggtcttatgacctgcttcaagggagaagggtaggggaaggtcagagaggccttcctgcacatgctgtttctcaaattatttcagcttaaaatgtttaatatgccaaggtgccatattttggaatagcatgtcacaaactccatcaagatccatgacataccccaccaagctgaaccccagtcaactctcaaaaccatgagagataagaagaaaatgcttagagttggtttaagctattgattttggagtgatttattacacagcaaaagagaagttaacactctgttaactagggcagaagaccctgtgatcctgaatggtcaactaaattttcttccctgaatgattatctcatcattagaagtagatggtattaattttaggccttaatagccttcatttcctaagggagctgctggacttagtttataaaccaaacacatcattctaccctcaaaaccagcacctctttccaactttcctactgctgttaatgacaccaattttccaggcacttcaggatcatctctgactagaaatgtctccattttcagcatattaaccactccgttatcaaggtcttttgatactttatatttgcaatgtcttctaaattcagatacgaaaatttctctagcaactttcagcctgttgacctcctgcctccacatccccagtcctaccaccataatagcctttttacacattacattgatcatgtcattctattgccccccaaatcccctctcctgcaaacagttccactacttaaactagtgttgcagactaatgtactgataagggctaatcaagtaatgggaatgagtaaattagggcatgtgtaagacaatagtgagtgagggaattgcagtaaactagattatgcatttctcatctaagagaagtagaatcgcccaggtcacaattgttctcaaacagaaatgcaggcccagtattttcacatcatgtgattttttttcaagggaagatggcatatttctatgagatatcacccatcagatgttggcatctgagtcagtccgtttttactgggtaatacaccattccaaaacatagcttaaggcagcaaacttttacatagtggatgattctacagattagcagtttgggctggactcaactgggtagcttttctgatcttagcagggtttccttttagatctgtggttttttgctatgttggattggggaagggatcagttcttttaggaaagggtcagccatgagggcttgtctttgctccataagtctctcatgctccagcagactagcctggctttattcatacagcagagtcaaggttccaaaaataattggaaacagccaaggccttttgaagcctaagcttgaaactagcacagcatcatttcctctgcattctattgtgcaaagcaaatcacaagactagttctgattcacctagtggagaaattgactacatgtattgaggggaggagataaaaagttacattgtagagtgaatggatattggaagtagaaaaggattaggatctttcccacagtctgccaaaatatttttttaaactttaagagattcctgctaaaaagaatatgaatcaaaattatatgtctccacttggctacctgtgcttccctcttatgccctcactcatagagccacacttttctcttaccctttctctttctccttgccattattaatgcattggctccaagcacagttccatgcaggtcatttgtccttcatacctgccctgttcattttcatatttgaatgtgaatcctttgctcactcattaggaatggcttttattacctcttctgtagttcattttctcatttcctcaaaagcttcctcaaatctctgcatttccatgaagcattctttaaatgcatcatatttaatctcacccattcattacattagctcgtggggttttttttgcacgttatttatactttgattgacactactttatattgttctttaatatttttgcttgtgaatgctttgttttctcaccaaaattataagtttttagaataacaaaaccatgcaattttttcatgtagtaatcacaaattgggatatgtattatcaattagctattgctgagtaacaaatagtcccacactaaatgatttaattatacccatatagttagttcacagttctgtgagctagcaatttagggtagacttagctgaatgattctccttgttctagccaggtcccctcatatgggttggttttgctaatcttgctgtattctcccacatgtctgagtcctcagctgggtgaaatggacaaatttgtctgtgatccacatattctctcttcctctagcttaggcttgctcaccatgtcacagctaggaagagtggcaagaaaatgagtgaaaactgccaaggcttattgagcctaggctgagaactggcaaattgttacttctttgaattctgttgattaaaggaagtcacagggccagcccagatttaaggaaggagaatatagactcttgtcttaagaggagaagctaatatcacattgcaaagagattttgatacagagaggagagtagttgcagccatttttacaaataatctaccaaataatgctggcctggctcctatggattcttggaggaaccacatctgtttatccttctcattgtgtggaatttctctttcctcaatttgagctatgtcattagtgtaaaaattgtatcttcttccataatcaatgctcctctggacaaaataattggataaaggctggcctcctgtcccaaatatgttgatcacaataagttatctaccatttttcctcctgattcctgtaacagtgacctctaagactggtctagagatgtgcatacaatctaagcttttccagtgagaatacttctccagggcttttattattacaactggtgataaaaagctacgtttttctcctttgttcttggactaagagcccagccctgccatcacccatgtgcccagctgcataaagaagcctgccttcagtagaaaagctaaaactcagagaaagcagagctgatgatgtccaggtccctgctgtagcttcttttctacagattacttatgcagaagataaatttttctggtttcgcttgtgctggttcaaattgagtttctctcacttgaaagcagagaatcctgacaaatacattaggagtatccttcataatccagcacagtgctaggtccaccatgggttatttaataaatacatgttaaatacaaatagaaaataatatgacgtgatactatacaacccaaaagaatgactaaatttttaaaagacagacaataccaatgtcagtaaagatgtagagcaattgggacttttatacagtgctggtgaaaataaaaattaacacaaccattttgaaaacctctttggtagtatctagtaaagctggctatatctgtgctgcactctaggacccagtgattctaactctaagcatacatacagcaatactgtaaagatatgttcaataagacatatataagaaaacactactcatagtagcccaaactagaaacaacccaaaagtccatcaatagtagaataaataaattgtagcatattcttacaataaaatactatacagcaatcaaaatgaatgcaccacagttaatgtaacaaacatagatgaatctcaaaaacataatgatatgatttggctgtgtccccacccaagtctcatcttgaattgttgttcccataatctccatgtgtcatgggagggacccaggagaggtcattgaatcatgggggtgattacctccttgcttgttcttgtgatagtgagagtgagttctcacggtatccaatgatttcataaggggcttccccactactttgctctgcacttctccttgctgctgccatgtggagaaggatttgtttgcttccccttctgccatgattgtaagtttcctgagatctccccagccctgtaaaacggtgagtcagttaaacctcttttttaaacaaattacccagtcttgggtgcgtcctttatagcagcatgagaatggactaatacacatgatattgagcaaaagaagtcaaatacaaaagagtacatcctgtatgattttatttatagagtacaaaacaggagaaactaattttcactgctagaaattagaataggcattatccttgtgggggagttgttactggaaacagaacaagggccttctatactggctccatgggtgcataaacttatgatttgtgcactattctatatgtatgttaaacatcaatctaaagtttacttaaataaattgaagaagaaatggttctgtggatctttggacagttgtatgctggccaacttcttcctctccctccaagtgctgtgcctgacgcctcctttctctgtagtagaggggagaggaggtgagaactgtaagaagcacagctatccccataaaagagcaaagccatcaagagaaaacacttctgtgacaagggaaaaacatgttcctcgactttccccatctgtcacaccatatgccacaccatctatcaacactcaatttgctgtatgtagttgaggacattccttccacgtaggagaataacttaccccaattagatcttaagattaatttttttttgaatcttgatgctttgtgagtcattatcatttcaggcagccttaactgaacagaattggatcttgaacttaacaaaactcagaactccacacctaaaatcttaaattccaaaaatcccatgacagtccataatcctttgactttcatttctttcttccaatttctctacatttggacttcattttaattttaactccataggccattctacttccaggcattatatgagcaccttctaagggtgatagtttccctaacccatcctctttcaatagctaattgaaatctattaatttcaattagtttaatcattaacttttattcctttgttcctttaatcttcaatcacatttgcccagataaactttattcctaccattcctcattgttttaagttctatatttggtcttttgagaaccaatggtgaaaaatcacagtgatactcctacaaattcatgctctccaaccaatgcctagctttcttccttgcctggtaactctctttcaagtccatagttgattttctctctaattcccctcaaggacagttccaaatgtcaccctttctctcatttcagcagctttagtacctcctctcacttcttatttccataagaaagcccatctggagagctctgcctcctccagggctagttcataaatgtgcaaaacctgtgtaaccacacaaggtttctaagggtcttctcagccccacacttagaagagccctgtgcttgctttaatgctctgcagtaactatcttgaaattcttaatcattgtgaagaaggggtcctcaattttcattttgcactgaatcccacaaatcatgtagctggccctgcctcctgccaatagaaacatgtcatttatactcctcttggcattcctgcctcaggattaagaaggctctcctccaaccaaagagaattctttttttttccttttaagtttttttaaattgagatacaattcacacaccatcacatttatccatttaaagtgtacaatgcagtgatttttagtatattcacaaagttgtgcaaccatccccactaccaaattctcaaaaacaaaaaacaaaaaccctataccattagcagtcattcataattctcccctcccaacagcccctgaaaaccactaatctactttctgtctctatagatttgcctattgtagcattttatacaaatagaatcgtgcattatgtggccttttgtatctggcttccatggaaaccacctttgcagaattaagtcaatgagagaaatctgatatacctgactccatcttgcttctaaccttacaagctgtctttgctcattcctgagcataggccaaactaactatgggaggaatttagttcatgttttaaccataaagcaaggataataatagctccttcccaaaactactccctccttgtttgggaactgaaaccacctttataaaactaatgagaagccacaaaattagaattacgggagaggtctgaattttgctaagacctgcttatagttaaaagataactagtcattgtgtttgctcaggggtctcatatgggtggtcacaagatttgtaacttccctaattgctcctacagataacattgctgttgcaaaacctgaaactggtgtttgagatatttttcattatttttcattctggcaattgattaactacccataccaaggatctgattcaacttggccctgtgacccccatgtaggaaatggctcagcctaagaagacagcttccatccactatgatttcatccccaacccaaccagtcagcattgtccattctctaaccccctgcccaccaaactatccttgaaaaactttagcctctgaacttttggataggctgatttgagtaataaactcccattcttccatctggctagctctgtgtttattaaactctttctctactgcaataccactgtctcagcgaatagctccatctgtgcatcaggcaagaagagcctatcaggaaattacactttcacctcgcataatgttttcaaggccaaggtgaattcttgtgttccttctttggaccccagcctctcctactgtagagacaaactcagagttgttctcactctccatcgttccttttacagatcctgagtagaaggtgagtcaatgtaattaaatcctttccaatctttacaacaaaaccaattccttcaatctcacaattgcttccatgagtccgtgctctctcattttctccctagccaagcttcttagctccctctgctttctcgtctctcatttactcactgccttttcatgtccggcttctgttcccaccaggccaaagaaaatgcacctgttaagtgacaaatggattagctaccaaaccaatgatgttttctgcccttggcttccttgaccttgctgcaaggtttgacatgattgaccgctcctttgttgatacctccttttccattacctctttttctccccctaaatctctctggctatccttctcactataatttttttccagaatcttcatgtttcccttgatctccaaattccagcacatctcagaattctctatttggttcttattctcattctatatattttcattgggaccttcatccaaactgaactatcacatatacgttaaaaattcccaagtcaatgtttctagacatgctttttatcctgagtttcaaacctatatgcaaaggtctattaaatatctctttacctggatatccaccaattcttcagcccccttaaatatgcttgtcgttaaacccacaatccttttccaaacatattcaagtgaattagatccttgtctatcatccaaactattctgtgcagaagctgggactcaccatggacttcctcttacccatacacaattaatctccaagttcattccccattctccattaacatctcccaagcattgtgttagtctgcattctcttcctccccacccccataccacatcaccattggtaaagacctcagcctcaccctgccccaaacaatccgtcccacagtgcttgcagaataagctttctgaggctgggcacagtggcttatgcctgtgatcccagcactttgggaggccaagacaggtagatcacctgaggtcagaaattcaagaccagcctagccaacatggtgaaaatcaatctctactaaaaacacaaaaagttagccagtcatggtggcatgtgactatggtcccagctactctggaggctgaggcatgataatcatttgaacccgggaggcagaggttgcagtgagctgaggtcgcaccactgtactccagcctgggcaacagagtgagactccacctcaaaaaataaaaaataaaaaataaaaaaagaataagctttctgaaacacatgtcttgttattcctttcctctgctaaactcttagcttggtaactaaggcctaaactaaactacccctatgactttcttttccactgctctaatcagagcatgtcatatgatttcacagctctgtctttaaatacatatttttttctctaccagaattatccccatccactaccccatttctcagactaaataatgttctgtaactttgtaaaatattttcccaagagtttgctcttcccagaagcctaattggcacaatttagattctcctttttgcactcaacatgcacatctctctaattgcatgctagcagcatctattaatttacttgcctctttctcctacctgagtgcaagctcttgatcaatcatataccattttagtcttcatatgccagtgcctagtaatgtgaatggcacatagtaggtgctcagttaatgcataataaatgaaatgataaatcacttctagaggtcctatgcgattctgtctttttttttagctgattctcaaataaattttatacagaaagcagcacaatatactcaatggattggagacttgatggaaagcaatagaatcctgaaaactggtttgtggtcgtcaaccctttaagaatctgattatatctggattctgtccctaaaaaaaatgctcacacatacccaggggtttgtgtacaattttggtaaattcctgaaacttattcataggctctgcttgaaattttaaacctgagttctgctttctcctgtgcacttctgagcagacctagctcccaagaggaagtccctactcactaccaggattgaaataagcagactagcttgagggcatgaggacttgattaaatgtattaacatatcaaaggaaagatgtgcacagcagaagggaaatagcttagccctggaaacacataaaaatatagagttgttgtctgtttgttttttggttttgtttttttttttgagacaggatctcactctgtctcccaggctggagtgcagtggaacagtctccactcactgcagcctcaaactcccatgctcaagtcatctgcccacctttgcctcccgagtagctgggactataggtgcacaccaccacaccagctaagttttctatttaatttttgtttgcttttctgtagagaccaggtttctccatgttgcccaggctggtctcaaactccccctagcctcaagcaattctcccaccttggcctcccaaagtgctggatttacaggcatgtgcctataatgcctggccaaaaccagtttgataatgacaaaatttagcagtgtccaccttggcaccattggatcaaagtgaacattgcagttgtagcccacagaaagcatatccgatcccagagacaggaacttccctggtgggagacagaggcatcaggctcttccaaacctgagccactaattctaattctcctttatcattcagttacgtgacaaatttttattgagcacctactatgtcagctactgtgctggtgaaatcatcctatccccacagagttgacaagaattgcatgctgggttctagacagaaatatagttaaaattaagcattaatcaggcagcattttggcccacttccttgttgctaaaagtcatatagcgctagatgctagccatttgcatccccattttccccatggataggatttccaaagttttaggacattggaagtcttattattggaagaattgatttgcaacccatcattcccatagacaggatctctgacataggaatcataaggctcttgtttaaggattccttaaaaggttttttagaccctgaattccagcaaccagtttgaagactcccacagaggaactggatcagcatgagaatacagcgtctttacctccctgtcccatgacttcaccctgcactcttcaaccagtcaatgatctccacacattggcccactcccaaacccttagaaaccgtaacccccgattcctctgggaggtggatttattattccctcctatccctcatttggtgaccctgtaattaaacctttctctgctgcaacccagtgtctctgcatattgactttctatgttcatggggcaatgaatctattacagttacaatagggatggagaaacaagggtgaagatgatagatttgaactcagctctcctggagtttgccttgtgttttgtttccttgcttactcagcaaccctctgattccaatactgcagcagcctttaccagagattttgactattagatattacaatccaattattttcttctctttagtgagagatatttctagctgctctgagtagagactccaaaaaaatacaccacaaaacagatcttctaccagtaaaaaataaaaataaaaaagccacataagtgatgtccttacttatatatataaatggaggtctgttggtgccattgttctagaaaatggggaattaaaaagcaacaaaaacaaatttgtgttttgaaaagcttgggggggacaaggcacggtggctcacgcctataatcccagcactttgggaggctgggtcgggcaaatcacgaggtcaggagtttgagaccagcctgaccaacatggtaaaaccccgcttctactaaaaatacaaaaattagcaaggcgtggtggcatgtggctgtaatcccagctactcgagaggttgaggtaggagaatagcttaaacctgggaggcggaggttgcagtgagctgagatcatgccattgcactccagcctgggcgacagagtgaggctccatctcaaaaaaaaaaaaaaaaaggaaaaaagaaaagaaaaaagaaaagctcaggggggaaaaggctcctgaataccttgtgtaggagataaaggtggggtaatttttgagatcctaaggaggaagtagtccttctccagtgtgaaggtagctgtaatccttggggctgctgcagatctaacagctcacagcctttgatctgagaaacaccaggcatcaccttgaagctgagcaacaggaatttaggttttactaccacacttctgttaaaaaaaattgtcaatggttctgctagcaaagacaggaccagcattcactggagaaacatacaccccactcaccaacattttctctaagtcactctcctcttaacacagcattgatcgaccttagcctatttggcagtaagcaccacagctgggcccgtcatccaaccccaggttgaacccagggagctttggtcagctgggatgagacctccctatactgagttttgccctgctgacaaggagaccactatcagagttgctactgctggggcaacatattgacacttggggttaatacaggagcaagaagcccctcgccctgcaccggcttccctccctttaatgattcaacaaggacagcttcgactcagcaagcaggctccctccagcatggtctgggtgctgagatgggataaagaaggaaggtactatttccctgaggtatggctgtaagcacactgggacccccgagcagacactcacaggagggggagagacctggccattatcctagctactatgactggcatttgaaagtttgaagtagtgatcgggaaactttttctaaaaatagcagatatttcagttttgcgggccatatggtctgccgcagctactcaacctgcctttgtagcaggaaagcagccacagacaatgtatctaggaatcagcatggctggatttggctgctggttgtcttttgccaatccctgcttcagaactgcactctgggaaatggcttgtggcaccacaagatgtgtttgactaccctgggactcactccatcctaacaattcctcagcctccacctttgctctgcacagggagaaagcagaaataagcaaatcctgatttagcatgtttagatcttcgtgcctcttaaatgaacaaacttggctaaaggaagcccatccctgagggattggacctgtcctcactggtttttgagcttcagagcccagggtcattttaaattctccaaactaatgaatgcctcacattccctctgggggaatggccagattttgtttgtttgctggttgcattgtactgccagtactatttgtttgccttcttgtgaaggcagtgattctgatatagtatgtggagagagaatgagatattgggactcaggcaacatggtgccaaatctcaacccagtctctaatttggggaaccatttgtcctcccatgttcagctctgtcactgtctatcagggattccagcccagggccctgggatctcacagagcatcacaaggctctggaaagagcatggtggaagtgctctgcaaacaggataattccgattcttacactgaattattcaagatgtgctatccctttggttttctcatctttaaaacagtgatggggctgggcatggtggctcatgcctgtaatcccagcactttgggaggctgaggcaggctgatcatttgaagtcaggagttcaagaccagcctgaccaacatggtgaaaccccatctgtacttaaaaatacaaaaattagccaggcatggtggcgggcgcctataatcccagctaattggaaggctgaggcaggagaatcacctgaacccaggaggcagaggttgcagtgagccaagatggtgccactgcactccagcctgggcaacagagtgagactctgtctcaaaaacacaaaacaaaacaaccaaccaaccaaacaaacaaatatatatgtatttgttttatatatatatgtgtgtgtgtatgtatatatacatacacatacccacatatacaatagtgacggaaggtgctatgtcctcatagagttgtggtgaggattaaatgagaaaatccatgtgatgttatctgcatgctctctggcacattccaagtattctatccatgcttttgtcctttctgttgttttagaacagttctctgcctcaccttattttagcatagtcatgaaaagcttctggggtgcagtccatgctatgcccagtctgaaaccaagagtagtttatggtcagtagccatcatcataagtaaccaggtcctaagcctactctcaataataactacagcccatcagagatttccctaaatcagctggcctagaaaagcaggacaatgccttctgcaccatcatctacatcatttagtttaaatggcagaatctgaaagttaattgctttatttattcatctgtccttcaaaaaagcctttcattatttattattgactactttttgtaaggtgtcaagaatatcctctaaaatggacctgttttgttttgtgttttagagggtctagggatgaagaattttttttttaagaaaaagaaatgcatttctagcttatcttagttctcacctcaatacttgagtatctccttcattcattcattccttcatttattcaacaagttttaactgagctcctactatgtgtagaagcaatcatagcagtgagtagaacttatgtttcaatgtagctaagagataataaacaaataaaaatataagtgtatagtaatcagctatcaaagagtgctacggaggaaaagtaagtagaaggatgggaatgctggagatgggggaagacttgctgttttatagaagatgactgaggaaggctgcacagatattcaagccaagatccccggaaataagagagcaggctatgcagatgtatgcaggaaatgcaaagaagaggctacagcaaggtttgtaaactcatgggatatcaaggaagcttgggtgcctgaagcagagcaagcttgcagtgaaataagtgatttaaggtcatagaggtgagggcacaaaggggccatcatgtggcaccttgtagttttttctgagtagattgagaaagcctatgatggtttgagcagaggagtgacaatgtctgtgtgctggctggctgctgtgggaaaacaaactgtaaggagaccaggggggacataggagtctcagcaaatccagggagaagagatggagcttcagtacaaggtagtgatcagtggaggtcctgagaagtggtagattctaaatatacttcaataaactgttgccagaattggctggatggatttggatgaaggcaatccaatttggtggattgggtgtcacatgtaacaaagaaagaagagtcagatgattctgaggttatgcaattataaggtgagcaggaacacatgactccagagcagtgcttctctaccgtgaatgagctcacaaactacctggggatcttgttaacatgaagtttctgagtcagcaggcctgggaagggcctgagagtctgcattttgaaccagcttctagatgctactaataatgctggcccatggaccaaactttgagaaccactgttagagaaaagtaatgcatcttagtcattaataaactggtctttggagccagaatacctaggttcatgttctggctccaccatttcctaccaatgtcactacagataagctaggtatttacctgtgcctcagtttctttatctgtatcatggggatcattgtgagaatttcatgagtcagaaatataaagtacttaggggatgcgagaatagttcaacatatgcgaatcaaaaaacatgattcaccacataaacagaactaagaacaaaaaccatttgattatctcagagaaagcatttgataaaattcaacatcattttgtgatacctttgacaaactaggtacaaacagaacatacttcaaaataataagagccaaatatgacaaacccacaaccaacatcatactgaatggacaaaagttgaaatcatttatcctagtaactagaacaagacaaggatgcccactctcaccactcctattcaacatagtactggaagtcctagccagagccgtcagacaagagaaataaataaaaggcatccaaattggaaaagagtaagtcaaattgtatctgcccactgataacataattctatacatagaaaaccctaaagactcctccaaaagactcctggacttgaaaagcaacttcattaaagtctcagaatacaaaatcaacatacaaaaatcagtagcatttctatatacccataacgttcaagttgagaaacaaattaaaaactcaatcctatttatgatagccacaaaaataatctaggaatacatttaaccaaggaggtgaaagatctctacaagaaaaactccaaaacactgatgaaaaaaattgcagacaatgcaaacaagtggaaaaacatcccatgcttatggattggaagaatcaatattgttaaaatgaccatattacccaaagtaatccacagtttcaatacaattcctatcaaattaccaacatcattttttacataattagaaagaacaatcttaaatttcatatggaaccaaaaaaaagcccaaatagccaaatcactcctaagcaaaaaacaaacaaatccagaggcatcacattacctgacctcaaattatactacaagcctctagtaactgaaacagcatggtaccagtacaaaaatagacatagtgatcaatggaacagagtagagaacccagaaatgaagccacatacctacaaccaactgacattatataaagttgacaaaaataaacagtgggaaaaggacaccctattcaataaatggtgctgggaaaactggctggccatatgcagaagaataatctggacccccatctctcactatatataaaaattaactcaagatggattaaagacctaaacattagacctgaaactataaaaatacttgaagaaaacctaagaaaaattcttctggacattggtctaagtgaagaatttatgacgaagaccccaaaagcaaatgcagcaaaaacaaaaaataggcaaatgggacttggagtaaaaagcttcagcacagaagaaaaaaattcggcagaataaacagacagtctaacagaatgggagaaaatatttgtaaattatgcctttgacaaaggactaatatccagaatctacaagaaactcaaacaactcaacaacaacaacaacaacaacgacaacaacaacaaaaatccatgactcaatagtcatggattatttgttgttattgtattagtctgttttcatgccactgataaagacatatcctagactgagcaatttacaaaagaaagaagtttagtggacttatagctccacatggctggggatgcctcagaatcatgactgaaggcaaagagaggcaagtcacgtcttacatggatggcagcaggcaaagagagagagtttgtacagaagaactcctctttttaaaagcatcagatctcatgagatgtattcattatcacgagaacagcacaggaaagatgtgcccccatgattcagttacctcccaccaagtccctcttacaacacatgggaattcaagatgagatatgggtggggacacagccaaaccctatcagttataatatcaatttagtaattcacattcatcaggaaaaaaagaataggtttttaaatattaaggctatgcattgttccatgactttttttttgtatgtgtgtcttagatcatgttgtgaaatgtatttcttctatgcatttcttctgagggtcttggtcaaaaaatgtttaaaatcacttgctataaacaccaaagcaatgtaactttcaaagattaacctggtgtacagcaccaccacataacaaattcagaccagcatcctacagcaatgggcaggcattcttggggctgtgcaaggtttgtgttcagcagtgaccccatgtgatagcaaagcaaatgcattagactggtcagcgctaccagtcccctctctgcctgatgatgggaaataagtctgaccccattgaactgagctagtgacccatatgcactgaaattctggacaatttggggaggagagaagcctcaggaggcatcttgctcagcggggctgtaacaaacatgatatagtaatatttatactcccagctagttcaaaaggttatgtagttgcaaaaggttttcttaaagatttttgtagggagaaaccaggatcttcaaaattgtgttgtaaaatatgttgtttctcagtgaaagtccttccagagtggagggagccagatggcagcaaggtgtacgcctaagaagctgagaaaggttgcaggtagaaatagactgaataatcagtgactatacttcaggggtggttgctgtaatatgatacatgtgtgatatctgatgttataaattaccttatattctctgctaataattctatagtaggacaaatagttaatacagttgtgtgcctcatcatgacttttaggtcaagaatggaccactgaagtgatggtggtcccataagattataataccacattttactgtacctcttctatgtttatatatatgtagatactcaaatactttgcattgtgttccaactgcctacagtattcagtacagtaacatgctacacatgtttgtagcctaggagcagcaggctatactgtatagcctaggtgtgtaataggctacactatctaggcttctgtaagtgcactctaggatatttgcacaatgacaaaatcacctaatagcacttttctcagaattttatccccatcattaagcaacacatgactatatgttaatatttggttttatattactaaatccaaacaaggaaacttgttttaggagggcagaattttcctttttatcagtatgctgcaactattaacactggtactagttgtgacagcctaggtttttgtcccaaattgctatttaaaaacccaatattaaatggaataagtagagaaaccactgcctcaattagcctaatagaaagtgtaggtgaagagggagtgtagaaggctttgttggtatagattcagatcccaggcatatgtaaggatggcttcagccttatctcaagtagtttccctaaatagtcccatatattttgcaagaccagataccacttgaaaaaatctctcttccagataataatcatggtaattttaaaacatgtcctcaaattctgggggctctgcctgtcaaaagatgggttctatgcgcccttaatttgagtctggaccaaccctggtgacttgcttgtagtcaacagaaagcagcagaagtgacaccaggtaacttccaaggctaggtcagaaaaggctatgtggcttctgctagttctcttgtgatgctcgttctggggaagccagttatgatgtaagaaatccaactaccctgaggccactatgttggaaatgccatatgaaggtgcctccatcaagggcctaggtgagctcccggctgacaaccagtatcctatgtcagccacaagagccaccttggacacctcgccaaagtacagtggtgtggtcatggctcactgcagcctccacctcttgggctcaagcaatcctcccacctcagccttctgagtaactggaaccacaggcatgtgccaccaagtcccactgatttttaaaattttttgtagagatagattctccctatgttgcctagggtggtttcaaactcctgggcttaagtgatcctcctgactcagcttcccaaagtgctggaattagaagtatgaacaaccatgcctggccaatcatctttcattacaaaaatcacagaaataaaatcttcctaagattccctaactggcttcaggaggtaatgttttctggttaaagctaaaaacaagcatcacaaataaattttgcaagactgcacatcacttgaaaagtctctcctccagataataatcgtggtaattttaaaacgtggcctcaaacttgaagggactcctcctgtcaaatgatgggtcctatgtcctctcctcttgaatctgggccaatctctgtagttagaaattagggctttttctaactacagagagctcagagagcaaaaatatatgtaaaagtaaactgtagctaattcttaaaaataggaactatgctagcttagcaaattcactgattagagtcagatttacatttctgctttcagctgtggtcatttgtgtatttggacaacagataccctttgatccagattgaaggcccacgatgtcaatgtgtcactcctcacatctcacattggggaacacacatgcaagactaaaattggagtcaacactaacaaggaggcatgaggcagtctgcaaaattaaaccaactgtcaaacagcacaattagaagggtaagggtcacttaagggagcaaaggatgatgtttctggatgagagagatgagctaattgtccccattgggcaagggtatggttctgaggttactggcattaagataaaaagaaaacatgtcagttttaggatctgataccagatttgcttcttcaggcaaactcctcccaggaactgaacccctgtattgtctgggtatttgtagaatagacagtgcttccaaccacaactttgggcaagacatagaaatttacagttcatttaaaatgactgagaaaataaggaggtgggtacagtagggtgtgcctggaggctaaggctggaggatcacttgaacccaggagttagagactaccctgggcaacataacaagaccccatctgttaaaaataaaaaattaagaatgactgagaatatggtccataatccagatatgcagagaagggcatcttgctggtgctgctgcgatactgctctcatgtgcagggtgcccacaggctgactttctggtggaagcctgtgaagatgtttccaagggcatagttccctggcaagaagaagttctctactctacagggacctcatcagactcttctccatctctttatcttctaccctcaaggtgtaatccacagctcatgttgtcccctctgactctctactggctggggtactgaaaagacggctcaggatcaggaccctattgtccatttgactcatctggaaactcaagaacttcccctattcagaaagtggaggtggagctgctcccttccctctatcatctctcaccaatcactttaatctgatcaaaaaatccagagatagggcaacaaatgcacagagcagtgaggcaaagaaagcaagtccctctttcttccaagtaaccagacttatggtgcccttttcccttgactggaggaagggagcaccttcccttcccatatcctataggacggagtaagtttccacctgaaactcaaccccaaagtctccaacaaaatctgctaattcttttttttttttttttttttttttttgagatggagtttcactcttatccaccaggctggagtgcagcagtgcgatctcggctcactgcaacctctgtctcctaagttcaagcaattctcctgcctcagcctcctgagtagctgggattacagacgtgtgccatcatgcccagctaatttttgtatttttagtagtgacaaggtttcaccacgttggccaggctggtcttgaactcctgacctcaagtgatccacccacctcggcctcccaaagtgctgagattacaggcgtgagccaccatgccaggccctgctaattctttttatataggctggcagtaggggagtaatggggagacagttggagatgcaaatcatctgagaaatatctggcagctctttagtttccacatggcatttatctccacctctccatcgttcaaagacaactaaaaaagttatatgtaacattctcttgcacctgccccagttactcttggtattgatctagttatctacttcaccttccagactgtgatctccttgaaggcaggcatgtatcttcccatctagcatatctgaagaactggataaatatttcagtgaacagaaccagttttaagattgggacttcacttaccttgaaatcgttactgccagctttcatttcagcagagatttttatgatgcagattctaagaaaaattaattacctaggtatttctgaacttgccgaactggaagaaatgtgttcttaggataatcaaagcctggctgtgtggctcagttagaatcagagagggtaccctcatctagcctcttccaaaataccgagccaggtggctggatgaaaagagggtttgactccctgagactgcaggcaggagatgagttcctaataaataggtctcctttcgttattgtgaaataagatcagtaacagcctcagagtgagcagagataagcctttgtgcctgtggggacttgagtttaaggggtcctacagcaacactacctatcatccacatagcttggaatggccagatacagatcaggaaagcaaaattcaactgtggtccttgaggtggcaggctcaaaaaggggtcaggtatttatttgctttctctttttttgtgtgtgtggttttataactttatttgacaagcagcaattagctctcatccacattgactgtttatagatttttgatagtaacaggtacatagggaacccaaatatagagcttatttgatgaagatttatcctcattacattttctggacaattgcacgtggatgggacatgccttattcctttggtccaaacagctttgttgagccaggtatcagggtggtggctgctgtaagttggggttgctgtggcacttacttaaaataaaacaacggtgaagtttgccacatcagttgacacttgttctcacaaaaaatttctctttagcatgcaatgctctttgatagtattttacccacaatgtaacttcttttgaaattggagtgaattccctcggccctgcctttatcaactaagtttatttaatattctaattttttgtcttcattttaacaatgttcacagccttttcaccaggagtaaatttcatctcaataaactactttctttctctgctcatccagaaaaagacaattgctcatccactcaagttttatcatgaaacagcagcaattcagtcacatctttaatctccacttctaattctaggttttcgttgttgctgtttgctattttcaccatatctgcagtgacttcctccagtgaaatcctgaacacatcaaagtcatccataagagttggaatcatcttccaaattcctgttaatgctgatattatggccatgttcattaatgatcttaactagatcttctggatgacttgttgcagcttctccatcagcacttgctgctccaccttggccttttatgttatggagatggcttctttccttaaacctcaggaaccaacctctcctaacttctaactttttttctgcagcttactcacatctcttagctttcctagaattgaagagagtcacagcctcactctgaattaggctctggcctgagggaacgttttggctagttggatcttctatccagcccactcaaactttctccatattgccagaggctgttttgctttcttattcatgtgttcactggagaagcactttaatttccctgaagaacttttcctttgaaaacttggctaattgtttggcacaagaggcttaactcttggcctgtcttggctttcaacatgccttcttcattaagtttaatcatttctagattttgatttcaagtaagagatgtgcaactcttcttttcacttgaacgcttagggggtattgtatggttgttaatcggcctaattttaataatgtttcgtgtcagggaatagggaggctcaaggagaggtagagagatggggaacagctagtttttggagcagtccaaccacacccaacatttatcaattaagtttgccattttatgtgggtgcagtttgtggtacctccaaaagaattacaatagtaacctcaaagatcactgatcagagatcaccataatatgtatagtaatgaaaaaattgtaagcattgtgagaataaccagaatgttacccagagacacaaagtgagcacatgttgttggaaaaatgttgctgatagacttagttgacacagggttgccataaaccatcaatatgtaaagaatgccatatctgcaaggcacaataaaatgatgtacgcccatgttatttaaaagaacatatcaaacccagagtttctctctgtctctcccataccaggagactgtggagctcacctaactccctttgtcttcaaagctagcacagtggagaacggttaggtgatgcgcaaggtcaataaaacatccacgttgtgcccagtatacctggagtccttgcccttgtgcagtacaaggaggagcttggtaggtgtcccagatctctgtgctgatggatttttacctacaaccccaaatagagaaatgcttaaaccttacttggaaacaagagagcgattttccttttttcagaaaaaagggagagtgacatacacattggtaatctactaattgtagacatatgcacagttagggaaaatctccagttagaaaacaggcctatatcccctgagggggttccatccacccttctcttttccagagagtagctagggattcatctaatgaaacagaagggaaagaagctaaaacaaggttatgaaatagcttccagaggaatcattaagtggattccaagttttaatatgccccaatacacattagattgaactaaactgtattaattactgtcaaagattgatcccattaatggcccaattattttccctctctatatccatgccccttgccctctgactttgcaagtcatcctactgaagagaaacagtcaattcccccagtctttaaataggctagactatgtgacctgcttcggtcaacaggatgcagtggaagtgatggtgtactacttctaagccttgacttcagagaatttatgtgttttcatctgctctattgtgcctctgctatcaccatgacaacattcttggggtaacctgctggaggatgagaaataaatggaagagatgaatcacccagtcatccaagtgaaggccagcctagtgcagctgacagccagcctaaccccagatacatgaatgagtccagccaagatcagcagaactgcctagctggaccctagctggaccctaactgaccccagttgtgtgagctatcaattgacagttttatgtcactgtggttgcatggttgtctgcttcactgttgtgtatggtgaccacggatgactgacataactacctatcttcccagtggtcaatttatcactatctaaacctcccaatcatctgtgagaaatgtgtcattatttgcactttgcagatgaggaaactgaaccatataatgagattaagtgatttgcccaaaatcacaaatacagtaagacagggagtttttatatccaagtccaggattttctctaatgcattacagatgagttggaagaaagcaaagggtttttaaaataaatatgattgcagactgacttcctgggttaaattcctggccttcccatttactagatttggaacattttgcaattttcttagcctttctgagtcccagtattcatttctgtaaaatgaggattatgtcatctgccttgaaggacattcatcctataaatattattgagtgatgactatgtgcccagtactcttccaagtgctggtgaaccattactaattaaaagtaaaaagatctcgatggggaaatctatcttgcatgtttgacttgcatgtttgaagtacagcttaaacttcagaaaaaaagggagcatttggggtatagacaaaacattttggtcagtgtcttggtcattttgcattgctattaagaaatacctgagggtgggtaatttataaagataaatttttatctttatacaaaggtttgtttggctcacaattctgatagctggaagattcgaaactgggcatgtatatctgatgagggcctaaggctgcttccactcctggcagaaggtgaaggagagcagatatgtgcagaggtcacaaggtgagagaggaagcaatagagagcaggagggaggaggggacaggctctttttaacaaccagctctcttttgggaactaatagagtgagaactcattaactgcttagaaagggtgttaatctattcatgaggattccaccatcatgatccaaacacctcccattacagcccacttgccaacactgtgacactggggatcgaatttcaacatgagatttggtggggaaaaacaaaccatgtccaaacttagcagccagaaacttgaaagaaggatttcccttcctaagatttattgctacactcctccctttgggattaggattggagagtagtgcttgaaaaacatctgggatctcagagcaaagggaaacaacatctttctacctcagtgcctccattctaggggactggtttgtgagaagacacagaaaaattcccatgccctgagaatagcataacaaaatcactagaactaaagagcacgacttcttctctagtggacatctcatgaggacccatgtcaacaataatccatcaaaagattcctgccccgatccccgacatttcagaaattcattccagaattctgacataaattctgggaaggaaacactttagagaccccagttaaattttcttgctgtactgaagggatgatgcttcaaaatgcaaattattttgagttataggaaatgaaattatatttttgtaacacaattttgtagccttagattcacacattttaattaaaattaaacaaatgtcgtgttgttgtttcttttaaaataaggtaaaatgtaatgtccaacactttctgtagaagagacagctagttctccaccaaaatgtgtgctttgtgttccttgatacagtgtttagctagaaagcagctgcccagcaagagatgacatttcccagaaccctttgcatctaggcaagaccttgtgattagtttctatgagcagactgtgagtagacatgatacatgtcttttccagtttgaggtctcttctgtattatctctttcctcatcgtcgtctaaattacataggcccctgaggctctgaggaggcagaaacacaaaatggaaggaaattgagcttctgaatgtttcctggaatgcccaccttttgatcaggaatgccaacatcacattgcgacataagcaagagataaatgtctcatgttaaatcactgatatttggaggcatttttttatattaaacaatctttatttgaaaaatagtaccttgcaatcctaacacgatctatcaaacttcagtgaaagcaatttcagcaacaactaatgaacagtagctaaactgacaagagatcaatcaaaagtattttaaagtgagcagcaccagctgatgttctggtgagtctctgggtgtttaggacctggctacagggaaaacagaatcaaatcagcaggtgctgtggacccaagctcacacatcatgaccagcctccctccttgggtccctagtaggccacagtccccctggtatttccaggcccctgtgggctataggtggagccctaggagccaaagggccccttgggaaaggctggaacttggcctctcagtcagccagcttctgcctgttgcatttactttctttccagagtacctggagtggtctctcagtagataaggtggccgcccagccttcctgggccgttttctcatagaagaggatttctctctgagaactggaagtgtcttacttctattcctcggccaggtcttgggccatcttcttgtagtgatcacaggtatgtaagacacagttcaagttttagtacactttactgaggtccaagcagtagacttcctgctgagaccccatcgtgtgttcttggtgcagtccaggcaaagtgggagtcgccagctgtagcttccggaggtcccttttcagctgtccacttgcaccctacagagaggcctgctggctgagccaactttggatttatgctatgagtactttatccctttggttttcttcccacagttgcatgtctgcttctccaatctccccctcaggacatttaaagaacgcacctaagtcactgtcatcatccacactcttcagagggacttgtgcccaagacgctgggtgaccacgatgtcttgcttccctatttcccttcactaccaagtcctgatggtccacatggtctctactgcccctgagcagatgcgggattctcagtggggtgtgggccaaggaggtcagtcacctccctccaacactcactggcactagtcccaggattctgcacatcactagttctgccatccacaggtgggccatcagcagctgagtatgcatctcctagcgggcaacaggctctccatggctcttgagggctctgcagctctgcctccacttgccagtggcctgtgggccacaactgaccacttggaaccctgaggactgtctcctctccaacagaaacaagggcccaccaatcaggatagaccatctgtcgggctggactgtggggaggggaagcaccctgtgtttgaaaaaactgtgtccctgattttgtgttaatataaagtgacattacttatgcagtgccttgggggagtggaaaaagctcactgcagcccctacctcaggccactccaggccccaccgggtcctacagcgcagctagagggtcaaagcagaagcatgccacagcccggggtccacacatgatcctctcagggcagcatgctgacccgtccctgctgaggctcatgaccctgatttcaagtcttcttctgctgcagggaagcctggtcctgcctgtaaagagtctatctaccttgctagattgagcttcttgaagaagggactatgttttcttcatctccgcatccccggtagctaaccaatgtccagtatacagtagggcgtcagtcactgtcttattttcttgttgactctactctgacttatgacatgacactttcccctcttgacctctctctatttttttttttttttctgagatggatttttgctcttgttgcccaggctggagtgcagtggtgtgacctcagctcaatgcagcctcagcctcccgggttcaagccattctcctgcctcagcctcccgagtagctgggactacaggcacgcaccactatgcccagctaattttcgtatttttagtagagactgggtttcactattttggccaggatggccttgatctcttaaccttgtgacctctagctttaaaacccctccgatatagacagaactcaaactggagccggacctgaggaatggtgaatggagcattttccctggtgtgacggagaggacctacagatctggctatcttgtcccttgcatccctctgcagaatttgaccccagttttcaaatcagactcaagaatgatctttagtgtttatgattttgtgtttttcttttctttttttttttgctttgttattgacacagcttctggaaatctttttcacagagagtatggggactttttggccaaattgggcagatgcaggctccatctgctccaccaccactgtctgggccacagcatgtcccctgcgtcctgctcctctacaggggtttctgcagtggaatctgctccctcacaagcccatctacaaggtgctcctgtgctccaaccctgctgtttccaagaaggcaggtcctgggactgccaggatccctctccctcagacagcgcaatctgtgtaggcagcaggccggaagtggtgacagccaccatgacagtcagggccgagggcaggacgatcacattagaaaacagcatccggcctccaggggcgagcggagtgactcggcctccatctcccccttgaggcagccatcttggcgccgctttcctcaggagcactgcgagctcgtccttaggacccgcttctcggcttttcttctcccaactctttttaccaggcagtggcgtggcctctctggcccagcagggaatgggcgcagggaagggagtggtagtaacgagcgaggcatagaggcttttctgtaacagcagttatgttaccctgattaatacaaaattgcctccacgaatcacaaaattacccaagcaaaaaataaggtctaggttttaagaaactaactcctgaaagaattgactcgtcctgggacaatgtacagagttgatgtctggttaattagaggtcactgggatagaattcttcctgatatagcgcggcataaaggtgtgtattaaggactctaggtaaagaatcacgtggagagaatcttcaggtttaacacaaagatcccagtttttcaacaaaagggaggtaaactactcagatggggtctaagttgtagcccaatgtcacagcctgctcctgccacaatttcttattgatgccaggagactgcctttgtttactgcagtcatcatggctgttgggaagtgttaataacttgctttttattttaagcgggtgtgaattgcatgggttctgtttcctaataagagtagtgtcacctgatattttcacataaagagagctgcctcgtggcatgtcttctgaagctagcatgtgcttatccttcacaagcccacaaaaactgcagactgtaattcagaaatttgatttgatcattccactaaacctctaagcccaatgttttcttcagctcagtgttttccttgccataaacttaccctcagagggaaccactgacattttaagagctgaatccttacagacactgaggccaaaaggacttcagtgccaactctgcattttgaggccattaaaaaaaatatcatcaaagactggggttgccaatcagaggttctccatagtgagtgtccaacaataagatcatagtgactgcttattccaaaccaaagttaccacattcgatactcaaggttttcaacagaattgattccaattagagcttcacattttccattaagctgtatgaaatattataaatctattgagaacaccagtagaagaatggctaactaaatcgcagtatactggcacaagggaatactatactgcaatgagaatgaacaatcttcaattatacctgaccacatgtatgaatttcacaaacacaatatggggcacaagaaggcagacaagagagtatacaatgtgtgagtctcattatataaagctcaaaagcagaccaaattaatctattgtgttagaagccagaatgatgattaggtggagtacttactagaggaaggtataagggaacttgtggagaactcgtcatgttctgatttcagacttggtctctagttccccaagtgtgttcagcctgtaaaaaatttattaagctgtacactacctcctactgcacttttctaaatatgttatacttaaataaaatgtttacttaaaagccaataaaaaatcttaaggacccctggagagatacctcaaagtttaatgatcccaggtaatgaatcactacctcatatacttttgaaaaaatttatttttgcattttgtcatacattgccaattagagtctgtattagtcagctctaacactgctataaaaaaatacctgagtctgggtaatttaaaagaaaagaggcttaactggctcatggtcccacaggctgtacaggaagcatggcagtatctgctcagtttctggggaggcctcggagaacttacaatcatggtggaagacgaagggggagccagtacttcacatggctggagcaggaggaaggggtgtgggggaaggtgctacacacctctaaacaaccagatctcttgagcagtcactcactgtcatgagagcagcaccaggaggatggtgctaaaccattcatgaaggttcatgaagattacctccatgatcccattacctcccacaaagccccatcaccagtattggggattacggttcgacatgagatttggtcaaagacacagatccaaaccatatcagggtaaatcaggttaaaagagttttacaaatgtgagatttggaaagatgtatttatgattggattctgtttcccccttttcccccacgtctttcaatttttgattataaggaaacatacatgttttaaagtggtggctaagattcaggtgtggcctgtgctcttggcaaaagccaaatttcaacaaacttaaagatctaattggctttttcatgccttggggggcatctcatctaaagagttagaaaaggctctctgatgacctgagcaggagttggctttataggcaaaaaggggctgaagaaagcagaaacagggaacaaaaagcagattagttagcatcaggttacttcacattactctttttgaaagagttaaagtcgaggggacttccttatcatgctggctaaaactggccttttggggagtttggctactagccatccctctcctgatttcttggaaagtcagataataacacttagttttattatctaagtaatagagtaatggtaatggagaacttgaacatgactgactccatttcggtttggtctgttggagcctaatgtaggagctcagtccaaatcaatggcctcttatagattttatgtaacactccatagataatctatggacataaaaccagaccttgcttgacagtgttaagcagtcatggctattatgtgcttaagagtcagtatagcccttaaaaagttacctccatcacctcaatgggaatgaagcgcaacaaagatttgtccctcattgcttccattatgcttctctcaactcattgcttccattatgcttctctttttgattctgtcctaatgacacaaataagtcctaaccaatatgtatccatctaacattgctaagctgtgttgtttcaccaccaccaccagcatctccaccatcaccctcaaatggttagagtaatattcacttgctattgtgactgtatttcttgttattattgctgatattattgctacataacagattacaccaaaacttagcagcttttattattttatcttgttcttggtcttgtgggttaggaattcagaaacagcccagctgagcagttgtctcttggaatctctcatgcagttgcaatcagatgttggctggactgcagtcatctgaaggactggacacgcaagatggctcactcaagtgcctagcaggaggtgcaggctgtcagtggacttagctagggctgatgactggggcatctacatgtaattccccagcatgttgatgtcagggcagtcagttttcttatatggttaacctctaacttccccatagcgagtgttccctgagaacccaggggaactgactttgccttagaaatcatacagcattgcttctgttgcattcggttaattataaatgagtcacaaacccaagcaaattcaaggggaggcgattataccccacctctaaatgggaataatatcaaaggattttcagccatttttttaaaaccaccaccctgtgtgaccagggcaataaccaaattaaatttagttgattgtttttctcatgctgatgtcctttggttcttcacccagaatgttgtgtgcagtcatagaaatgcaaatcaattaatccagttgctgcattaggtatattatcaaagaagccacaagatgtttccatttaacgaacacagatttttatagggcttgctcctccaattctgtgggaaagaactttttattcacctgttccatttgaagaaatggaaacctagaagggctcacagtttcctatctcttaagttgcagggccaaaatttaaacatattttctgactctaagtccaagatttacaaatacatctctgatagtttcaagtttaaatgagcttcattcatttcagtaacatattttgcaccaagcacctggatgttttcaagatgagtatatcttacatcctagcattatatcctgggatattctgatctatttgtttaagctaggaattgtgctagcgccaatggattgaagtatctgctgctcttctgatcaaagaaatggaataaacaattttaggaactttaacagaaccatgcacccaagaggaaggacattttattctgggtgcagaatatctttatcaattgcctggctgaaagaactggggattaataaggattagaatggcaagcaaaatgaagatagatggagttgctaagggatcaagggactagactagaattcaatatgatcctgggtaaattaaaaagacagcttgttagaaatgaggaaaaaaaatcagtaggaacaaatgcaaggtggctcatcccaacaaaaatccacattgcttcaaaggtgggtaagactggctagatataaccataatagacactcgccccagagccagtgagtaccatgtgatggatgagagtcagcaatattaatttcaggtgtgggagttcatgggcaagacaagaagactttagctcaataaatggggaatttctctaaccccaccctcaaagtaaatcaactcttcttgcaatacataatcaaaactcctttatcttttatttcatggactttattactgttgtaatttttaacattttgatgtaattatgtgattaatatcgtcttttcactagatggtcagttctatgaaagcagggtctggatctgtttgcatcacgcatgcaatgcctgccatgcagtgccttccatgcgcctaatgtgcagctggtgttttctcaatggttactgaatgagtaaattaatattaggctaaaaataatgtatactagtgcttggcaaacgatggcccactaaccaaatttggcccataacctgtttttgtatggcctgtaaactaagaatggttttatatttttaatggttgaagaaatcagaagaatattttgtgatgtgaaaattatatgaaattcaagtttcagggtctataaagaaatgtttattggaacacatcccacatttgtacctattgcctatggctgctctcgtgctaaaacagcagcactgtgtagttgcaacagagaccacgtggctcacaaaatctaaaatatttactctctagccctttacagaaaaagtttgctggcccctggtatagacaatctggttctcatcatccttggggttttgtcaactcatgggcatgtattcctaagcttttggctgatatctaatggataaagtgacttttgtgccctctctccccccattgaaacaaaataaccactctcttgttttctaaaagactgaaggttataaaataagaaactgctcaggtctccagaatggcggcaacaattatcgaatgaataaattaatattgagatgagaataatgtagactagggattggcaagactaggagctctggaggcatatggaattggtttcaaatcttaattctgccacccaaatgtgtaatcttaatcaaaataattctctaagccccaactaacctttttgtaaaatcctcataggaagctgtggtggttaaattaggtatgatagataccttttagatgagtttgcccatccaaagtcctttctctgagaactgttcccccacttccaacaccaggagcaacctgtacagccctttctaccttctctcctctgaccacaatggataggacaaagcatgaacaaatgatgcaaagtttgtcttaggccaactagatgttttccctcaaaaatttgaaaatgaaacatagaaattctagttagtccacttgaggcacctggactagaaccacttgtttgggcaacaagcaaggatagaagcaactggtttgcagacagagaaaaatgaacacaaaatgaggaagatatttgtgtagagaatgaaagtagccccgctctgttgggatgggaacccttctgaacctgttatgaatggcagcaggcattttcaactcacgggtaaaggtctaagttcattaagtcctgccgttggagcccagcccacctccgtctccaagctgcttatacaattcagcccctcaagcatccatatctccctatggataagctacagaaacaggggtgattaaaggtgacttgcattccattatttgtgctaaacatttggtgcagacttctttgttctgaattctttagcatcagagggaaaagactggaaaagagaacaactacacacagaggtgggtgatcccattccataaaaccaaaactttggaacttgaacatcaaatctttcaagtctcaggtatgacgtcctagcaacatattgttaaaaattcagcttcagatccaaactgccatagcagtttcctgattgcctactctcagaagactgagttccttctgcagctgcatagaaattggatatacacagagatttataagagaacagcagtaaaggggccagagatttctcttgctacagatttttcagggaaacacatggcagtttggggaagtccctaatgctaatgactttccacttcctagtttcattcccttggtggcagcctggctacttttttgtccttggttcagggagatagtcatgcacaaaatcctgttttaaaactagctccaatggagttcagtctattctcacaaacatgcctggactgaaataatgaatttcctggtgcatacttgtcattcaacaatgtaatgattgtcaatatttttcaaagtattattagttggcattattattatggaataatgaaatattgccatggaatatacagtgaaaaccaatgaccatagtttttatagattcagactgcagtgtgcaggcataaaatgacatggtgtctgggatttgcttcagaacaattccatgataaaactttctttttgttttgttttgttttgttttgtttgtgtgtgtgtgtttccatgataaaaatttaaaaacagaaaaagaaaatgagaaagaaagaaatagatagagcaattttggtaaactcttggtaattgttgagtctgggtgatgggtatatgggaattcattgtattattcattctgctttgtgtatattagaatattttcataagaaaaattagattaagattatttttagagttaaaataattagattttaaatatagtaagttgcttacataaaagctctaaaaagtcagttcatcattacagtttgcaaagaatattttagaactatttattctttcaaaatagaaagaaacctctcttggatgacgtagagtggccctgagatagggaaatggactaaatgacattgtaagacaccctccgcacacacacatacttgtcacctctactattcttcattaatgcatttcttcctaaacaaatggtaaagcattcttccaaagaatatttagaaaaccatcaataatccatatgtgtcaaagattgcaatatgtctttaaatctcagaaggagagggaaatcacattatagatttcttctttttccaatacatcatgctaatgacaacgaattattgggtgctctttattctcatgggatgaatcaggccaagggttctgttctctgtggctggtaaatcagaccctggaaactgtgtcatcctggctggcctctttccctaagtacatgcaaccagccgcccgctagttctgggctaatgaagtccaattgctccataggctgaggtttattcagtttgtataaatgggagaaataaagaccaaatatggcctggcctaagtaagacataacagtttgaagcacagaactgagccaagaaagggaagcataggaagaaaggggcataaaacaaaggccccaacatgctctctgctctagaggcagccagagaaggagctgctcagtccatccctgagaaaaagaggctacccaaggttggcagagagggtgtgctgatgatggaaggagaaactttgatgcctccttggtccttttattccaccacctcatgaccatagcctgaaactcgtaactcctgcccatgcaggttggagaattgagaagaaattctacttgaagaaaaggtggtacctgggggcaagtgaacagaactggatgactgaacattaccctaaagaaaggaacaaggcagcacctagcacagaacctggcacataggaggttctccataaatttattcattcattagaaaaaaaatggagtgggtgcctactatgtgctctgtactaggaaattcaaccctgaaggaaataaatataaagttcttggcctcttggaacacagagtctgttgagaggattggtagttatgcagataaacgtataatcgctaagtctgataatcagaaaaacactgatctggaggggttatgggagtctttaagtgttttgtgctcaaaggcacccaatgtcagaataacatgattaactaggagtccaagctccagaaagagtcttcctggattcaaattccagttctatcattccctttctgggtgaccctaggctggttacttaacctctctgtttttctgaaaaacaatcatgttaataataaagtgaatgtgagatccagcctcagcccagaataggaacctgatctctaatggctctgccacctggccctcttgccctctgacttctggttcgatttgaccaatggaaagcatgttcaagagattagaaggctgtggtttggcaattaccaatttcttctgtctcctggccctcccctagaactctcactaactttgaaacccaccccctctagaaaagtgtctggtaaaggcaaaaagctctttgctgttgctagaacagcaacataccctgttggtttcttataatagtcccttcactaaacacccttcaactactctttttaaatgtaccatgtgctttccactgaggccctgaccagggcgcctaaaaataattcttggcccttgataaacacctgataaagagaagctaatattatccaagtaagacactgtttgagatttgtgttatgttatagacagtgtctatgacaccccctatcattgaaaacatgttgagaggagatagtctaactcttcccaaactccctagaagcccatcaaaagaggataataaaataaggacccagcaaaacactaacataaagtggccattcatgggtgaagcaataataattctggtcaccagcagcccttgcctgtgtgcaaaagttatgatgccgttataaaaaataaaaacactgtcggccctttgacaatgatgtgaaaggggagattttccagcaaaagaatctcagccaaatttgaagctgttatttacccgcttaagacagaaagtatcctctctgggttcctcgtgatctaatcctttaagccttctgctggcactggaaacaatgttaagctttgggatcaggccctttggtttctataatccatgggaatttgaagatgataaatttgtggagagcctgaaagttcctaacatttaatggaacccaagggggaaacaattaggatacagtcacgtaactccattaactcttctggaaggctctgaattatgtaagtcccctgctgcagctttcctcccctgcagccccattttgccatgcaacaaggaaaaaggcagaggcaatgaaagcaaatgaaaaaaaggaaagatctttccaatatgactatttatttgcattttctatgagaagtctggtggggaaagaattcaaactgacaacacaaatgaggggcaggaatcaacattagactgaacttactcaggctctctgagccacccccaacccttgaccatcctttccaaggataactgacaactacacacaacaaagaacacatcgaacctattctcattaataggatttgtgggggcaagatagtcctaatttatgctggcgtgggctgaactattgaaaataaaaggatgaacaagaagtttctttcatttcagctgtaactgtcactataaataggacatctacaaagagactggacttttgtgggctgtttgagcaatgcctgtgaaaggttgtaacaaaacctcaaaaaataaattcttatttctctgtttgtcggaggcactaacctagatttgccatcacacctgtgccaagaagagagcctgcaccactgcctctgtgtgggtaccactgaggggttggtagcagggagtatcagctggtgtcagaaaagagggacacctcctacacttggttcatgctgtgtgctgcttactctcttcttctctcacctacagtctcataagacattatccgactcattttcattccagtagacttggtagaagaagtctatggggaagccagacaaaaaagataattgaaagccatctgtgaatttcaagcacaaatagctctaaacaataactggcacaaagtatgggcttagtaaatgtttgtccgactcaactgaagtcagtgtgcaagtttttgttgtggagcagacatgccttggtctcaaggcatgctcgtgcacctgcaggtttgccatacttgagataaccaacatccaggtgggcttttaagccatgaggagaatggacctagccataagcaaatgtgggacaggtaaattcaggtaggtggcacaatctgaagaattgtcgggactgttctatttccaggctcttgcaattctactattagtggatcacttctgggagcaaatgttgccttcccaaaataattcatctggggagcaatttccataagatctcatatttttaggcatttaggacttttctgtttgttttcatattctttaatatgcttaattctcaaattgtttgttttcatctagatggaatctttactggtaaccactgtacaggtgaggaaattgccatcttgactttgagggaaatgctttttagaaatttgactcaggtgttccaggacaggtagtgtgtagggtgctgatctattttgcagaacaagttctctcactggagaggtagatttgtgggaagcctcagacctcttgggttgggaactgaaagcagaatctatctaaatctccaaaaaactttgcactctgcatatggttcattatgaataatttagtaaagtattcttaaattcaaaacagaacctgcaccccaaaatgatggatggatcttaagaacacttgatgaaggcaatgtctgcacactctgacagaaatgctttcaatgcagctttcttttcaatcacttggcagcaaatgtccatgtttgcaatctcatcagggagactaacacttgtgtctcctgctgatcatgccattgtgcagacagacttcatcaacaggcttgattgaacgttctgattggaaattttcctagaaagtttctgtgcagaacatgtggatactgccttgctttcaaaacatttgtctacacataggcagaaaccagtgggcttagaaggaagaattgaaagaattgttgccaagcctacgttcttgaagtaatgcagcataactacaggagacagcccttaagtatactgaagaggcatttcttaagtgtgctaaagaagcagatcttgtccaagatattccttgggcaacatctgctcagtaagaattcatcttttgatccgttccttcaaggattctttacttcatctcatttcttggcttctattttggcttgacctgaaatagtggtttcctctgttaacattacatcttcagcttcctccacctaggcctgcttccccattgccctctttctaacactggggatccaaaaagagttctcaatgtctctctgaaatttcctgatggagaacatgatactttacaaagaaagcagcacagagttaggaaaatactgctcagaaagcttttgtttcttgactgcatcagttatttattctgcaaaacaaccatcccaatttagtggcttaaaatggcacccattttagctcatgattttatgaactggcagttaggcttggctcaactgggtgattcttctggtttctactgggttggctcagagatctacagacttgtgcttatcaactggaaaatcatgtataagggggtctagctagtctaagatgctctcactcaaatatctcatggttggctcactgttacctgggatgatgagggtgaatgaaccacgtgtttctcattcttccacaggataatctggacttttatgtatggcagcttaaaacaattctgagaggatagaagcatataagtgctcttgaagctctattcaaaactagtatgtaaattccacctcattctataggccaaagaaagtcaaaaggccaacccagaatcaagacttggggaattagatgtcttgatgggagttgctgcaatggaaggtggttacagagatgagtgaagaattgaggacatgtttacatgactcagaggaagtttattgactagagaacagaacctacttacctaaatacagacttatttcctgaccccatgcacctcattctttgccctttgaaactccaagagaagttcaaagaagtcaggggacttaacacaattccatctgaatgaattagcaaaatatgggtcagagataactgtgtttttccaaaaggtggagtttatcattaatgatctcacagagcatggagagctgtagattatgccatacaagactaaacaaaacccctgatctagctatcacaaagccttggcatataaggactttttcactttagtcacaaaatatgcttcatctagcacttgtccttactaactaagcctttcagcattgtaggctttttgatcctattgtattctggatccctgcccttcagggtcagctctgggatgcccagatgtttaatcaaactcaatatatgagggctatcaaccagtctaaatagagaggcagatggaacaaagacagattagggaggcttgttgaaatttggctttgtttttttttgcccttcacagtacaattgtgttctcaagactaatgaatgatattttccacaatcatctagactgaaggaggcagagaggagtataatcaacttctgtattatcctcagctattccagtgactgcttctccaacatactgattcagatgggcctggctcttccacataaggaccagaactctgtacatacggtctccaaaatagcatcctttatccatcctccattcactctccctatactgacagttctgtgactgcttacttcatttctacagggtttgcctgtctggacaaagaatatctgactgaggcccccagtttgcttttggttatgaatggtgctacatctaattcttttccacatactgtctcctgtcagatgaaagggaataatcagacaacagaaaatgtctcacaattacaagacatcaacctctattacttatagtttctgtaaagtaactgtcatcccatttctaagcagaatatcccctcactctagtgggggttttacctctaatcacctcatcctacgggtttttcctcatgccagcctcaattgctaccctttttgaaaggtgctcagccaagctttgtttgattgattgattgattttttaaattttttgttttgagacagagtctcactctgacacgtaggctggagtgcagaggcacgatctcggctcactcaactctgcctcccaggttcaagcaattcccatgcctcagcctcccaagtagctgggattacaggcactagccagcacacccggctaatttttgtatttttcgtagagacgaggtttcaccatgttggccaggctggtcttgaactcctgacctcaggtgatccacccatcttggcctcccaaagtactgggattacaggcgtaaaccaatgcacccggctcaagctttgttttaaaatgtaggttttataatgatttagatatggtgagaccaacagataggagacagctgccgttgaaaagatagtttattactcacagttctcaagagggagcagctgtgcccttcagcgccacaccaggagaagcagccgggtccatcaggaggcagagggagcaaggggaaagtgtgggtgagagcctttcttgtggtttccatgggaagaaacaggcaaggcagggtaaacaggcttagggtttgctagtttgaatgatctcagtgggctctgaagggcccaggctgtcctgagttgtctgggatctggtcctggaatgatgagggcaagggaatattggcctggagtggaagagctaagggaggtagttggggttatgagctttggactggttggtctgcatatgagaggcatactctagttattttttctgtctaaagatgtgctaatcctaggaggggcagtctctccctggtcagcaaagccagagcatcattaatatagattccagccccttctaataggccattttcagaatgaaggggctactcactgtcgatggcccctagtgagtccttgcacatcggataccagatactcttaagacttggggacccttcctcacaatatgcagagtcagatgtagcttcccagctccacctccctctgtccttccctttggcttctctgtgctttgtttcaaatggcctgcacccaggactctatttctacaactgcctttgggctaccagagctgctctgcccacttaccctgagagctgtaagttcctagagggctatgcattcacccctctcctgggtccctgtgtccattagcctaagactggcttatataaaatacaaaagtccagctcctttccctccagtggggacaaactctgaggcatgtgtagcttatgttcctaagctcccctgtggggtcagggtcaggctgaggctgaggccacacctgaaatcatagcttccactggcttcttctccttccttttcatgcctgcctgtcccaactccttttgtggtttctcctaggcacatttcttttgaaaaaatatcactacacataaatccctatctcaggatctgcttctagggaacctgacctaagataaagaggaaaccagatgaatttatctgaaccatggtagactcttagtgcatctatcaccatctgcaatacaagttagtgtgaatcagctttttatatcatctgcctaggaaaattggtttcctagatgggtcttgtggtgtttgatctcttggggaaacatcctactgagagtcacaggggtccctcattatcctattcccccagatcatagcttattgcacccatcctgacccaaagtagcccactggttgacatttcagcagcctgtgtggccaagcctgataatatagtggaccaatgagatgctatattagtctgttttcacactgctgataaagacataccaagactgggtaattcataaaggaaagagatttaattgactcacagttccacctggctggcgaggactcacaatcatggtggaagatgaaggaagaatggcagctggtgatgagagaatgagaggcaagtgaaagaggaaaccccttataaaaccatcaaatctcatgagtcttatttactaccatgagaacggtatgggggaaactgccatcatgattcaattatctcccattaggtccctcccacaacacatgggaattatgagagctataattcaagatgatatttgagtgggaacacagccaaagcacatcagatacatttcttgggattctgaatttgtcaaacagagggactaaagctgttaacagcagggtaggcactgagtgaactaatcccacatttccttgatgaataaacccagggatatcatcatgagtgtccagtggagcccattttattgactacacatcacgtaatgtttttgcttccatccttcctgagtgcataacatatagaaaaagtgcaatcaaaattgcctttctgcaatcctctcacaaaacaatctagacgaccctctgccctttcctgttttcctggctacattatcttttactgtgagaaagactttgaacatcgctttgggggatattaacatgtccaaagtgtgctttgttttaagaaaatgttagggcagcttgacagacattgagagacatgaaactaagggagaacaaaatacaaattccagtacttaatagtaaaatagcataaactgggctccacctttggagaagagggactgcaggctagggggcagaagatgctcccagcaatgactccccttgtacagacctgtcttttgtttctttgctcctgcagggcagagagaaacccctgggaaggagaatagggcaaggtggatggagtgctctcattttgtgttttgacctttcagttcttccctttccctcagggtttgaaaggtactttgtgggtggtagactctaaagcctaagattttactcatttgaaatactagatacaagaatattttccctagtgtccttgtccatttaggctgctataacaaaatatcatagatggggtggcttataaacaatagaaatttatttctcactgttctggaggctaggaagttcaagatcaaggcactggcagatttggtgtctggtgaggtcccacttcctggttcatagacactgtcttttggctataatcttgcatggcagaagggacaagggatccctctggggtctccttgataagggaactaatcccattataacagctatgtcctcataacctaatcactcatgaaaggccctgcctcctaacaccatcaacctgtggggtgttcgaatttcaatataagaatttggcagggatgtatacattcagtcctttgcacctacttacacccattctgggtctaatcaaataacttattagtacaacagctgcatgctctatgccatggtcccttaatccatccctgacttatccacagctgtgatggggacagttcctgatggctccatcagctccccacctgaagtacctgcttctttccttttcactgcaagaagtctttctccagagcctcgaaagtgttctcaggctacctgtgatatggccaggaagttgaggatttaatgccaccaggagtgaccctcagccaatgaaaatcagaagtcagtagataaaggcctcagtttcttcattgctcagggaacagatctaaagcatgttctacgcaataccatagagagtctccatagacgtgaatgccagttatagcagtaacctgctcattggcacaccttttattggattcacttcttttccttcttcttttcccaactccctcattagtgctttcctggaatcactcaaaaataaactacttgcacccaagttcttttctcaggatctgctaattaactaggacacttgtggttaagtggaaaaatctgacccttttctcaaagtccactgactttgtcctaagacaatgcactgagtacaagttgaaattaggatggaacaaaaatgctgagcccgagaaagccatttgatagcagagacagtaagagaagtccaagttgccacaaccactacagcctatatgatgccttttgcaaatttcaaaaatattttacttcctcaagacacttttcacctattgaaacattttctgatatagaacaaggcacattattgccatatgccaggaaattgtcataataactataaaaatgtacagtctctaagatgtgaaaggctaacccaaagtccctcactttcacaaccgtatatggtaactctgcctttacttggtttcagttacaattcttgttcctctaaggcccagccaggccatgattcctgcccttgaattctgttgagaaaccgcattgcgttctgcctgtccttaaacagagcttgaatgggtctctagcctttaaagaaacagtagaaagagtcctaagtcaattattacatgtaagtcaggacctccaggccagtggtgtaatcagtttctagctctaaaatttgttgaatagatactgatgaactccagttagaaaaccggtaggataacttagatcaaggtcagtgacaccaactaattatgtagcacacaattgttaatgtaaattaggtgtttaaatgtgtatttctttatttaaaaaaatatttaggtgtattagttaggtttgtctagtgataatgctccataacaaacaattccaaaatctcagtatcttaaggcaactaacatttattttactattacagctgtggtttggccattttcagctgggtttggctaggctagaccccaagttgacttcaagttcaggtctgctttatgttttttgttccaggatgtgggctgaaggaataacatctacccagaggaccctcttttcatagcagagggtggagaataaaaggccaagtcaggccaggtgcgtggctcacacctgtaatcctagcgctttgggaggctgaggcagcccgatcagttgaggtcaggagttcaagaccagcctggccaacatgttgaaacctcatctctacaacaacaacaactacaaccatatatatacacacacacacacacacacacacacacacacacacacacacacacacacatatagagctgggtgtggtggtagatgcctgtagtccaacctacttgggagactgaggcaggagaattgcttgaacccaggaggcggaggttgcagtgagccaagatggagccactgctccagcctgggtgacagagtaagactctgtctcaaaaaaaaaaagaaaaaagattaataaatacataaataaagggccaaggcaagcaagcaagtacatttagtcttcatgttcataggcttgatttactcattccacaatgtatacctgtttcaaaacagcatgttgtacaccacagatacatacaatttcttgtcaattaaaaataaataaataaaaattatatataaaaaagaagtctctgcttggacattgcccatgtcaggtctagtcacattccattgaccagagaatgtccttgggctgagtctcatctgagaagaagtgtatcagtgcctagcaaagtgggaggcactgcacaaacagcagagtgtgcatatgtaattctattcaatggggagtaaagaattggaaattatcacaaggtggaaattcttaaacataccctagacagaatgtcataataaactccaatgtaccctatcacacagctataaccatcacctcattattaatcttctttcactcccatataatttcgaagcaaattctggatattatgtcttttaaaggaagaaaatgaatctatatttttgaagatgagagtttatttagaccttaaagagtttacaaaacaatacaaaggatttactactaagtcaacttgatataaaataagacacaaatacatattcaataacgttaagaaacagtgggccgggcgcagtggctcacacctgtaatcccaacactttcggaggctgaggcaggtggataacttgaggtcaggagtccaagaccagcctggccaacatagggaaacctcatttctactggaaacacacacacacacacacacacacacacacacataaattagccaggtctggtggtgtgtgtctgtaatcccagctacttgggaggctgaggcaggagaatcacttgaacccaggaggtggaggttgcagtaagccatgatcgccccactgcactccagcctgggcaacagagcaagactccatctcaggaaaaaaaaaaaaaaagaaacagtcaattccaggatgctgtacatgggtgttttacgctgaatattgatgaattttatacttaacttcctggtctagctgaaataatgaatactaccaaagattaaaagtaaatgcccactgtttatctagttcattaatcttagtgacaaaagtaaaaaaataatttgcaataacagaattttaagatgcaagccaaagttactttggactaagctgtggagtagaattacatcgtttttggccaaagccttgctttctcaagacactttactttcatcttcggggacatcttaaaagacaaccacaaaataaacttcaagtgagttacaaatggcaaagaagagcaaaactttaaaaagtaccaaaataaaattgtcagagtgtggttaataaaaggaatcatcagatcaatctattatcatgtcacttttgactcatacttaaaataacatctcagtttatgaaatggccaatagaaatccattttcttttttttttttttttttttttttctgagacagagcctcactcttgttgcccaggctggagtgcagtggcgtgatctcggctcactgccacctccacctccggggttcaagtgattctccctcctcagtctcctgagtagctgggattacaggcatgcaccaccacactcggctaattttggtattttagtagagacaggatttcaccatgttggccaggctggtctccaactcctcgcctcaagtgatccacctgcctcggcctcccaaagtgctgggattacaggtgtgagccactgcgcctggccagaaatccatttttaaagtcatatgcatgatttctgtattaagttgttagggctgccataacaaaataccacagaatgtgtggcttaaacaacagaaacttattttctcacagttctggaggctaaaagttgagaccaggttgtcagcaggtttagtttcttttgaggcctctttcattggcctgcagatggttgccgtctccttgtgtcctcatatgactttttctctgttctcttgcatctctggtgtctctttttcttataagaacacgagtcatataaattagggcctcagtcttatgacctcatttaacccttattacctctttacattcatattgggggtgctagtgtcaacgtgcaaatttggtagagacacagttcggtccataacaattatatcaaccagtaagtattattacaagctcttaacaactgataccaatactaaaaatagctaattagctaacaacataactaatagttaacaggccataagatagcactgactatgtgctaggatcctttccatgtgctttacaaatattcactgctttaaaacttaaaacaatcctatcatgttggtattatcaattcccctgccttacagatgagaaaactgaggcttggagaagttaaagaagtaggccaggtgcaggccgggcacagtggctcactcctgtaatcccagccctttgggaggccgaggcggacggatcacgaggtcaggagttcaagaccagcctgaccaatatggtgaaactccatctctactaaaaatacaaaaattagctgggcatggtggcacatgcctgtagtcccagctactcaggaggctgaggcaggagaatcacttgaacccaggaggcagaggttgcagtgagccaagatttcaccactgcactccagcctgggtgacagagcaagactccatctcaaaaaaaaataaaaataaaaaagagtaggccaggtgcaatggatcacacctgtaatctcagcactttgggaggctgaggtgagcagatcacttgagtccaggagctcaagatcagcctaggcaacatggcaaaaccccacatctaccaaaaaatacaaaaattagctgggcgtggtggcatgcacctgtagtcccagctactcaggaggctgaggcaggagaatctattgagcccaggaggcagaggttgcagtgagctgagatggtgacactgcactccagcctgggtgacagagtgaaactcccatctcaaaaaaaaaaaaaaaaaaaacaagtagagatagagtagccagttaaattaggatgcccagttaaatttagatttcagatcaacaatgagtaagcttttagtatgtgtatattccaaatattgcatatgacatgtctatgctaaaaaagtagaagttgctgaaattcaaatttaactgagcatcctgaatttttactttctaagtcttataaccctaagttagagataagcttttttttaaattatactggagcagtgagttttaaattgctcaagagaccctggaattttcaagagctatattaggaaattgctgacagggcaaaagagaagataaacattgagattctccctttcaaatatagcatctcctttataatatctttttatatgttactgagatttgctatgaatattcacttgagaaaaatatttctttgactttaaaaaataaatgtgcaaacctactgtttttcaagtaaaattaacataacttctggatgttttgttttttgtttggggcattttttcccccaaaatggtacctttgtcttttccaaatctgatatattctaactttctgtctccgtaaagaattccctaagactggctcatttgcttggaggaccctcaaagagaggtttgcaaactctggccaatggcctacaggcttactctgtttctgtaaataaaactgtattggcattgtccattaatttacatgttagctcttgctgtttacacattgcagggcagtgttgaatggttgtaacagagaccatgtggcccagaatgccaaaaaatattttctatattatttccaaaaaaaaaatctgtcaactcctaatccctatgtatctgcttctgattgctaaaagaatggcttagaaacaagttgtcacgaagaatttttttttttaagtttaaaagaggagatcaactgggcagatcgattttctatggtcacttttaactgctttatgtcacttggaaaaattgtcttataaaatagccaagttatccaaagtgttcttattgaagatagagtcacatgggttgttgctggtagtgatctttaattctggagagatgaaaaagacatgaagcttctactgagacaaagtctatcaatatttttctgcactgatgacgactcttttcaaaagtggaccttgaagcagaaacccgataatttcttccctgtttccacatcaccctcttgtcagttctcttaacaagttacagtggtctgcaatgttagaattccagacaaggcatttaaggccactggactcttataataatctacaagggtttaggttgataatcccaaaatcagccctggaaactttaatagaactgctgtgtctttgaagtcatatcttagcgacatcttagtcttccttcgtggaaagttgtccataaacacattatccacctcttgaccctggagaatcagttcattattgccgcctcattttgcattttaagcagttattttctgtagctcccagattcttcctgaatcaccaatagtcataattcttccagggccatgaaggactcaggagagtgaaaccacttagaaaaatgttcctctctgaaagttgaactctacatacttagtactataaaaatcacactgtcaatctagctggtacgcatatcagtaatattataatttcttgcatttttcttatttacactttcttgtgatgtggatcatgtatgattttttaaaatttagagtgtccaaaaaattaaaaacatattttaaaagaaagatgctataacataaagaaccacatgaaaaaacaggcgtacagtcatatcatagaaacgtcaacttttccatgattatcatggttcagattttttcccttgaaaccgaagagccacattaatagtatgtttcaaaaacatatttattataaatgacaagacaatctctttacatatttataatgtctacatcatttatatctatttatgataatagaaacatatttgtcctagtctcttctgcattgctgtaagagaatacctgaggctgagtaattcataaggaaaaaaggtttatttggctcctggttcttgcaggctgtacaagaagcatggcactggcatctgcatccagtgagaggcttatggtcatggtagaaggtgaagggggagcaaatgtgtcccgtggtgagagagggagcaagagagggagaaggatgccatgctcttttaaacaaccagcttccacgtgaactaatggagtgaaaattcacttattacctctgggaaagcaccaaaccattcatgagggatctgcttccatgacccaaatacctcgcaccaggcccgacctccaacacggaagaccaaatttcaacatgagatttggaaggcacgcatatccaaactatattaacattagaaaccacctccttaggaatgagacatccctttggtgcaaacaaggatcaatcagtcattttagagactttttgaatgtgtaaaaactgtttgggtggttagggaaggcaatgtgcactatcttatttgattgaggttatccacagtaacctcggcagtgtctggcgtttggtgattcatttgagactggtgttggtcctgagatgcctcttgacgatgaagcaagttgatgtatgtctagggcttaaagaataattggccaggcgcagtggctcacacctgtaatcccagcactttgggaggccgaggcgggcagatcacgaggtcaggagatcgagaccatcctggctaacatggtgaaatcccgtctctactaaaaaaaaaaaaaattagccaggcgtcgtggcaggcgcctgtagtcccagctactcaggaggctgaggcaggagaatggcgtgaggccgggaggcggagctcgcagtgagccgagatcgcgccactgcactccagcctgggcgacagagcgagactccgtctgaaaataaataaataaaataaagtaaaataaagaataatttcccctaaggacctcaataagaggcacctgaatttccaggtagaagctgggaagaagtcgtcccaggggatattgggaggctgagtgttttttcagacagaatgaaccttcactttctttctgtaacagtcatgacaagaaataattggcttgtgagaatcaacattgaagctggaaaaatgatggcatccgaacaagtagacacagccctagtcaaggcaataaactacactaaagacagaggagaaagactcaaagttgttctaacatgtgagtacctaggggtgctgcatgccgttgtgtggtttgtgtactgcatagttgtactcagccaaggaagtggatgaggccacagctttaacatgggctgctgtctgcccagaaggataatcttttccttattttatatctcatttcaggggttctccaacttctgaaatccatccagaaactccctgtatttgggtaacagtattataactttttgcaccagggcttttttgtttgtttgttaatattaattgatttttcttatgttctttatgaaagaataactcatccattaatgaaaccaaatgtgaacttagtgccttctgtgtagaaaaggctaggaatacatattgtgggagattcattacatcactggccttaatactacaccttctcatgttcccccttggctgtgtaactttctagtgtccatatgctctctcttggggtggccagtgtgacttgctttggccaatgggatattagcaaccatgacataacccgaggcttataaagttgcctgctcattgggacttgtttcactgttgcatcccagttattcacatcactccagctgacagccaaccaacaaacagccagacacgtgagcccaaccaagatcagaagaactgtcccactgagcatagtctaaattgctaacatgcaaatgcatggtaagcgctacttgtttatggcattgaggttttcttggttatttgttacacagctttattgtggcagtagataactgatactgatacacgtggtgaacatgacagataagctctctgttctcccaggcttacattttaatggggaaacaagataataaatgaacaaataaaggaacaaatgaactagaaaaaatagctggggtaagtgatatcacagaattacatcaaaacaggagaggggtggtagaattagttagggcctacacaatggctttacttttgatgctgaaggatgatcttaattagtttaagatctgaatgagaagagtcagccaggcaaagaccagtgaaagtaacaatctagacaaaaggactagctagtgccaaggtcctaaaaagggaatgaacttggagaattctagaaacagagaaagccactaggcttgtggtgtagggagtgaggcaaagaggagcagcacaagatcagatcagaaaggaagacaggataagatcagagaagaagacaggccagattacacaaggtttgtaagccaaacaaggagattagagtacccaccagagatggcctttatgtacacaccatagatggcctttgcattcccaccagagatggagtttgatgtcttttgtctcaggcctgggtcagagcacaaagcagcaataacagagaagcaaaagagacattgttggaagaaaacaatcccattcctggcttctgtaaatggaataggaggggacacagaggcagattcctggggatggaagaatgggaaggaggggaagagggaggagattcccctagactgggcagcaaagggaggtcagaaggtctgcccctccagaagaggccaaggcagagccttcaggagggacaggaactcctggggcacctgcaaggacacctaggataccttctctaggcactgcagccctggccttggcaggtgtactttgtctagaaattgcagggagcctccatggtctcagtttccaagcaccatggaaacttcccaagatgccattcattgtgactctggctcagacaatgggcatattagggaagccaatgtgcaccatcttatttgattgatattatccacagtaacctcagcaatggctggtgtttcgtgattcagcctgtgtggaataaggaagggagaggccttgccaaatatttctgtgcccgagacctcccctcctctgtagccagagttgccatgaccttgtagctgaggctggggctcagagccccaattctgactcaaaagagtgtccaggaacccaatgccatgaggctcaaggtcaagtaatttgatttttaagaaaattaagaaatgtgccctcttcatctcaaaaacactatgttgagtgaaagaaatcagacacttaaatgatattcaagaacaggaaaaactcacctatgatgataaaaatcagaacaatggtttcctctgagggttgaggcaggggccgagtgactggtaggggcatgaggaaacttcgggggtgatagaaatgtcattctcttgagccacatgaagctttcaggtcttgagctaaatgtcaccaccaaactgtacacttaagatttgtccatttcaccgtatgtaaattttgctgctataaagtattgacttgagtctcctgtggcaaggaaggaaggaaggaaggatggaaggaaggaaggaaagaaggatggaaggaagggagaaacagaggaatgaaggcaggaaaggagaaggaaataaaggtgcacgtgttgcagatcccaggctgtcacccattgcacactttccacctgttttttccacaaaataagcacctagtttgtgagaggttgtgccaagcatctagtctgtgccaagtggccagagagaaaaaatatgtaaacaaagggtaagcatacaaagctcagacctgggcagtattagttctatccaagggtgaaggagacaagctctcagaaagatttaaaggggagagaaagggtcatgagggctggagggatggggattctctgagatctgaattcaccttgcacttctttttctttttgagaaacagaccacagcaaggtaatcttacagcccaggactcagctgctgcaatctctgtgaaaggtacttatgactaatgctgatgccaccatgaagctcaggaaacaatttacagggacatgggctgttctgagaccccacagccatgaatcgcctaatcattctgacagatttctgcagatgctgtgctcaggtcactgagtttcccagttgtcagtggtgaactggagcggaggcagaaggaaactcttcagacacactgttcccttcaggaaacaagggacaaaagggctgccctgaggagacttgggaaagtgacatttcctcaggctcgaggacatcccgaggtgactttccaaaacactgggttaaattggcctgattgtttattttcctcagctcgctttagaaaaaaaaaaagtccatctgtcctttgatatcaataaaaagagcatttgagactattaaaaacactgatggagatttgtttgggagaacggaaaatcgtgccaccattgaaaatggcaacacacacaaccttccatatggccatttctctgcctcagtacttccaggctgaatttcttgtcagctccagcttctcgccattttgttctcagggaaaaaaactcaggaactatccattcccatgtatttaaatgaaaacttcccaagatgccattcatcttgagtctggaagcaaaatgtaaacatgtttcataaggagtattttgccgacaccctataatctggtttatgacactgctttgtcaagaggcaaaggtttattccctccttttcaaatgaattggagatgttctaagtcagtggttcttgaaatgtggtccctggaccagcagcaacagcatcaccagggaacttgttacaagtgcaaattctcagccaggggcagtgacacgcagcatagcaagaccctgtctcaaaaaaaaaaaaaagaaagaaagaaaagaaaatcctctgactgcagcctagacctacataatcaaaaaccctaggggtgtgcccagtaatctgtgttttagcaagttctctaatgcagttttgaagaaccaagaagctaggctctctcagttcaggattgaattcagcctcgattaaaaactttcaaaataacagtgacttaaacaaagcagaagttcatttctctaacacataaaagaagtccaaaggtagatgttcagggctagtatgaaggctccatggtgacagaggaaacctaagttttttctatttttctgctctgctatcctttgtgtatggttttttatttcaagctggcttcatggttcaaaatggctacaggagctccaaccattacttctctgttccaggcagaaagcagaagttgggggatagagcaagcaagtagggtctactcctgctgtttgtgtccctctgcaggaattttctcaacagtctcacctaacaattccatttatatttttggccacctatagctgttaagagaagcttagaaatacggtcttttatcttaaattaaaattgtcattactgataggtaactcactttctctgccaccatgattccagaccctcttccatataaataaacataattccaaatacaaagcgaggttaaactcttctatcccaaggaaatatcaaacatgagtatgactacatttttagtaattttatgaaagaatagtaaatgatatattgagaatctcataaatgatcttatttaaactttccatttcacaaatgaacaaactgtggcccagagagggagattttcatgtccgtaagagctggtgagaaacagaccggggtgctagaacctgaaggagctaggaataaatccaaagcttcctgaaatgtatgccaaagcagtcgtctcataggagactccatggacaaaaatctccatgatcaagtgttgtcagttaacattacaaagaacttggagcccattaagattaaattttttaaaaaaacaggctgttcttcatactcaacacacagactatttatcacttaaagtgagttcttagaacattaaaagtaaaatggttgtatcagaataaattttattgcaaattctcaggacttatttcagaactcctgaaacctactttgatgatttcaggttctgctcatgaaacagagacaaccatgtgtggtgcctgcattcttggcctgcggggagtggaaaggagacaaagagtaaaacacggtgggaaagaagaaaaagaggttaagaaaagcaaatgtgcctactccaggtaattttgacttagggaccctgattaacttacacactaattaaaccatttccagattttgtgcagtctgaaagcagcccattttccccaacaccaggtcgctcaagatgaccacaggaaggttgtcatcttcatgtctaaaagccagttgacactcaagggtgtcatttcacttcagtgaaatgagaagcttcacagatgtgtagactctgaaaaatctaactggaaaacaatacagggaaatagcaatactaggcatcaaagcagcaaaaaaactactcaattatctgatatggggattatcaatggaataaatgtggggtttgttgtttgttgttgggattgttgtgggttttgtttcattttttagggtctcacttttctccaccaattagatctgtgctgtgagccacacaggttttgagtacatgttttgggactttatatcggtcagactttgccatggtaacactgtgtaacgagcagccccaaaaatctcagtggtggtcaaaagcaaacctttatttctcattcatgggttttcagtttgttcaggctaaaagtaaaatacacagattcttcacctgtctttcattccatgctgaaggagcaattgactgcctgggacatacttttctcataacagaggcaagggtgaaaaacaccaagtcatcttgattatgcaatcccatttttaatgtaaacaatgtcatgtctgcttctatttcattgagcaaagcaagtcatataggcaagcccaacatcagtggggtgataaagcacactctccaatggaaggaggaggggagcatgatcatttgctgaacagtaatgcaagatagcacaagacttgtctggggtgagagagagatcaaagctgtggatcccacccagtcttcaaccaaagcaatgtggctttgacctgttttctgtcttggacttgaataatactttatttgaaagaagtgttaaattgtttattaaaaaaaaagacaagtttg

SEQ ID NO: 358 - DNA, 142165 bp, Homo sapiens
cagcccgggatccccggcctgtccctttaaccccgccgccgggcgggagcacgtgagcggggctccgggtggcacccgggcgccgccgccgccgaggcagttgtatttcgaacgctgcctctggctagcagccaggcgccttggctcggcggtccgcctggcctccctcctcctcatacttttcttcctgcgcaaccccctcccctttatccgcccacgattagaggtgggcactccccccaccaccaccccctccccaagcgcaagcgcgtgcacgcacacacaccacacacactcacactcacacacactcacacacactcatcccacttgaatcttggggcaggaactcagaaaacttccagcccgggcagcgcgcgcttggtgcaagactcaggagctagcagcccgtccccctccgactctccggtgccgccgctgcctgctcccgccaccctaggaggcgcggtgccacccactactctgtcctctgcctgtgctccgtgcccgaccctatcccggcggagtctccccatcctcctttgctttccgactgcccaaggcactttcaatctcaatctcttctctctctctctctctctctctctctctctctctctctctctctctctctctctcgcagggtggggggaagaggaggaggaattctttccccgcctaacatttcaagggacacaattcactccaagtctcttccctttccaagccgcttccgaagtgctcccggtgcccgcaactcctgatcccaacccgcgagaggagcctctgcgacctcaaagcctctcttccttctccctcgcttccctcctcctcttgctacctccacctccaccgccacctccacctccggcacccacccaccgccgccgccgccaccggcagcgcctcctcctctcctcctcctcctcccctcttctctttttggcagccgctggacgtccggtgttgatggtggcagcggcggcagcctaagcaacagcagccctcgcagcccgccagctcgcgctcgccccgccggcgtccccagccctatcacctcatctcccgaaaggtgctgggcagctccggggcggtcgaggcgaagcggctgcagcggcggtagcggcggcgggaggcaggatgagcgcacgcggtgagggcgcggggcagccgtccacttcagcccagggacaacctgccgccccagcgcctcagaagagaggacgcggccgccccaggaagcagcagcaagtcagtacgagggcgcggtgggggcaccagcccaccccgtccccactgccggggcccagacacgcgcggggcggccggagtgcgggagcccagtcgccgcggccgtcgcacactgcccgccggccggccggggggagcggcgcagaccccacgagtgcgccgcgcggccccggggcgccagcaaccctccgggcggggaggtggggagccgcggcgggcggcccggggaaggcgggaggtggggtcgggcgaagcgcgtcctcggactttcgctattgtgcacggccccgagtggcgcggtgtcgcccagtgactggaagcgaccgggatccgacaaacccgggctcgcaggcgctttccgagttgcttttgcaactgcccgggaggaaggaggtgccggggacccgggcgcttcggccgatctgggctgaaggggctagagtcttgggggccggaggctctttctcccgcctcccggggctgctcgcgggtcgggggctggcgcgccgcagccgcccccttggcgccctcctccaagctctcggtggcccaagactcgcgccctcccgacaaagaacgcatggagacccggctgcctggtcctttttgggctctttaaatatgcggcggccgccggagggagcccggggcaggggctacggggagcctggttccccgcaggacggggttaactcgcccagctaagggcgcgttgaaaggagtgtccaagagagtgcagggtagccagggtcgcttccttgtcaggggcccggtcccccttttgcccctggatctcgcgcctcagagctgcagccattaaatgctcttctccaaggccagtggccgggggttgagtaggggacgatcgaggggcgcccgggaccctgcggagtggagggttttgtctgcggatgcaaccaattaagcgtgcagccggcgcttgcagagctgcgctcagcgcgcagggctgggggttttgttcgctgtaatttccaagccgcggcgggcagagttggagcgggatatgtctattgagaacatttaaactccactttctcgggctttaaaacttgctctctgcttagtcttaaatcgcttccttcatggcaaacacgccgattagaaaataatcctagagtcccaaagttgtccgagagcaaggtggggaaactgaacaatgtttgcttgccagtgcattttagaaaaattgagagttgtacctttttgaaatcatcaaaggaaacaagccgatctagaggcccctgagttttcccgctctgcccaagcgacactttacaccgcatttgaatcctgttttacacctcccaggaagtctctgccctcccccacttgtttcccacccgccacccagttctaactcactaattgccccccctccaaaaaaaaaaaaaaaatccaaaagaaattacaatggggtctggaggtgattggatactttacctttgagttaaggcagagttcacaaagaaagaaaaatttgtctccgatgtgtttgctctcgatgtgcccactggtgctagtggtcccacagaagcttgcagggaaccttcccgaattctctaaatgggatgcgaattttcattgaggacgttcatgggttttaagttaattagtctcacttaatcaccgaatctgaatgaaatgtgaatagatgattcactggataaatatttgggatctggaatattaatcatcgcattctcttaaccacttgagtatttactacttggcataggagccatttaaagttttgctaaaccaagtgattgcttccatttctcattcccagacactccattcctcctcgcttttacctccttttagttttctccactccacccccataagagttttctcaaaagaaagttttgaagaaaatatgtttatttttatcaaaagatatttaaatttagactggaggccatgcctgcatctccaaaaggaagtggagaattgaagcaattaactagatgattcaagcaaaacctcccaccatagatttactataattatttggaaattttagggggaatggagttattttgaactgaagaacttgaataattgctccagtatttcactcaaaatgtgtcagttgaatcataatccacctagaaggcaggtatacaaagatgattaaaggccaccttttcaatatggaagattgttgaaatatctgtgatggtagcttcgtatttctgttgtttgaaatgctagtataatgcagagtggtgttcgtttaaaatgcctattattcctatgagttgccaaatgcatagccctgtaaactttacaccttaaaagtatatgactttctttctagaacatgcctcttcagtctttgttaccattttaggtttgaagtagaatctagttttcatatacaaaatagagtttcctctttgaacccttgcattaaaagtatagttatttcccctttctgtaaactctgtaccatcatcatccatttatgcttgaactgaacgtgttccaacagctcttttgagcagcacatgcagaaaatatagctaaagagtcagggtcaatttctttcagacattcttgccacaacagcatttttttttccctcacaattaggaaccaaccggtgagccctctcctaagagacccaggggaagacccaaaggcagcaaaaacaagagtccctctaaagcagctcaaaaggtgagatttctcaagtcaagctctcctaacttcatcaatgactgactacaggagcctgcctgtaactttcccattctaactccgcagccaggaatttgtcccaactgggtaacacaagactcatttcttacatttaacattagttagatgcgagttaaccttttttgtaagcagatgctcagcataaaaagtttatgaagatacttaacagtgttgtttttaaacaaacagccaccaaataatttgaaccttaaaacgggtagaagtgaggaaggaaggggttgcggggggggcgggatgaaaatgacacaattaatatttgcaccagttgtaaatagttaaaaacaaatcaaaactatagattttgcctggtggtaaagtttttgcaatttcctctgaaaaatgataaagattgatttactttgtgcttattacatggctactgcaaaccaaatccccctattaaagtactttgccaaatagacgataattagaagtaaatctagttgtgggatagtggaaaaattccatgaattttgcagctttaattgtgataataaagtatactgtttgttttacaataaacctgcagtatagtatatcataatctcaaaatgccttttcatcaagtgacatagaaatgtctgaattggacaatgagactttttaaaacaagtatttggctcatttaatatctctttttgggcagaatggaacccagttaagtgtaatattcagtgtttatcttaataagtttaaacttgcagtttaagataacttcaggttggctgtgtttaagctagcaaagaggaactatgtcagggttaatgcatgtatagagaagtaccagtcacttttttgactttataaataaattggaaaaaaaagtttctgcgttgtatttgtaggtttgtgtagtaattgagaacaaagtttcaaaaatcagaactaaatttggatataccttttcaccggttttgggtactccatgtacagtatttgttagaaaggactatatgctcatcgtttggggattaatgttttgtgtgattttctttgtgactgtgggtactaactgtaatgtatgtaaactgccatagcaactaatggtacatataaagttatttaggaagttactctgagttcttgtctgttttaacagttttgaacagagttgaggagcatatttttaatatatttaaatttaattgcttcttagagtttagatttaattgtttcttatttaatcaataaactttaaaatagctctaagtaaccttgttatttaaaaatggcaatatataatctggtatttttaatatgaatactttacatttgtttcattttatctcatttataaattaactaaaatggactgattttaccaaggagtttttctatgttgtgtaagtgtggagtttacctaatttacttttattctaaggagatgcacaaatgaatatcttgttagatagctgacacgcatttaagctgtggtataattcctctgaaaaacacatcatgataatatctcctaggaagaaatctttaaatttcaccataaataagtaatttgaaatttaatactaaaaaggaaaatgaattgtctcccatattttactatatttcatgttttttggatgaatagatagaaacgctcccatcgcctccgcttcattttaaaaagcttaccactgactaacaaaatttgtattgagaaaagggaagctgaagctagtgcctagtttaccacctaaagcaaaatttttaaagttgatctattcctaagtaagggttgatttatttttagtgactctagtgacaggcatttgtaaatgacccccctacgccgctcatctttctgaaaattcttcatgtgtatgcatacattattccaatttccaaaacagaagtaggctttcttttttctaaagattccttctccagaatctttcattctttcagacacaattatttcctacaatggtgttataaaaatccctcttgtaataaaaatgaataaatacatttgcccataacatgacttatttttcttcagttttataaattacgcttcatctggagaagagaataccttgcaaaataatgaatgacattgatgaatcgttcatggcatgtgtaaacttaaggtattttcactttcaaatcagaatttgttgagtatgttactattctatataaatatgattttcaaacatttgtttattaagcatatattgtgttctaacaaaacatatatgttcgtcaggattttgcaatgcaaatctttttagaaaaagttatattgttcataacatgtaagataaacataccctgtgagactgaccagaatagatatgagaagtcttctatgagtaacaaagtgagtgttttcctgtaaactgagacccatcacaatgcaaaatacattgcaaagactggtaagtatatgagaagaaagaagcctaaaattagaggagctgcaatgcacactgaaatcctgatggttatatacttaaaatttcttgctgcttggagtttcttgacttacaaagtttatatttggattcagtaattggccttgggacatttgaaaacaaagctgttgatttgaaaattaacagtgtgaaactggacaatgcatgcagaatgttgcaagaccaagtgaatgactactaaattagccatcacttcaatttcaaaccatattcagtagaaaattgatttatataatatgtaaaacaaagacatttataagaacacaatttcctatgcttggaacttttggaagagaagataattattcttcaatctacttaatattccattaaaactaattactatgcatgaccattgtgtaatgattctagtcattcctcagaactccaatctgagtgctcaaaatttgtccctgaatcagtttcatatagttacctgaataaaagaaatcagaagttaaagttttcctgaataattcatttgtccatgtgtgtatacgtctgtgtgagcatatctttacccttttatttattttttagtctgaggtacacctatgaccagttatgtcttaacttccttttttgttttgttttgctttgctttgctttcctggttgtggtggatggaaatctttgcatttttacagttcccagatggttagagagaaagaagttataatctcctttagtttagggttttgttgtacttttttaatcatgacagaatactggaggggttgtcactaattcttcagtgttgaaggtctcaggtcaaattcacctttaagttttaagccaattctcattcacatattttaggaagtttttttctgaggttgaattaaattttattggaaggaaaatgaaaataaaaaaaaaagatctcaggtgtgagataaccctacttcatcatgtcatatatttgttcaccacccttttgactttaggtgtaatggacagatctaggaagcaaagtgcagaatgaaaatatctagataaagtagttatagttaaaataatgtgttcagagtaaatgtttaatctctatgtttgatttgctataaaaagaaggcctgaattaattagatactgtaaagactacttcatgctccttctaatcatttgcatttctcgaaatgtggtttgcttttcataatcattacccacaccaatcacagatattttaaaaagagagaagatagttttagtcaccatttcagaaaaatcattcagcataaatgctgagtgaggacagaattttcttcagaatatagtaggcctaattaaaaggagaaaccaaagacattattattggtgagttaaggaaaggtaactttggaagttatcatataattctggcctatggtttctaaattaaactactatgatttagtttaattcctctgtgtttcaatgggcaggtaagttttattgtgggattcagggccctatctgaggatacaaatgaattcaggcggattcagggccctatctgaggatacaaatgaattcagcaggtgaaattaagtaaagtccaactgttgttccattatcttgatatttaggctgacttacctaaacaattgactaatttttttctttcactttgccagggaagacaaagccttacttaatgcaccagcacattctatctggtaatgcttttaatcatcacagattatgatccaaatatgggagattgaaatacatttgaattatcttatgaagtaattttatttcaagggacctatagttctacttctctggaagctctcatccttctgaactcttctgaacttgaagtctcctcatttctctggctgacctacattcctggctcatttttatctcaagttctcaacagatcattttgctaaggagatagaatataccagattggtattctattgcatttcagttctttcttgagaatagatgggtgctgaagaggattttatgtcagttaaatcattcaaacatgtcttgtcttgttagttgactttctgcagtttacagagcagaaggcacaaagtggaaactgaattaatttcactgattctgaaggttttagttatgaatctttgttctgccaaccaagagaaaaggggaaatagagaactgttatttgttagggcattgcattatttcatattgttttaatacactgagcaattttgaatggcatattctatttaaattagggaagagtagtgcaggcattctcttttgtctaggatcatgtttgctcagaaggtaactcctgtgatcaatagcaatgatctcttgtatcattgctattgatttttatgattacaaagaagtagagagaagatttggaggagaagaatcttaaactttgaaaatgataactttgcctgtcatttggctttggttttaatttagtgtttgtatacatgaagataagcatgtgcaaaataaggacaccagagttgacagtaaaggctaacttgggtaataggcaggaactacaatgggtgatggaaattacttatattttctattggaaaatatattgtgatagcaaattgtaatgtctcttcaaggctaaaagtgttgcatgtaaaattaggaaacttacagaactggattatcaaaaaggtaaaatgagaatttcctcagtacttagtgggattgattcgtagagttgattttgatatcagtgtacattgatttatactgtttatatttttaaaaatagcaactgaaggaaataaaatgtgctttctaggctttggatagtgggcttcatgcaaatcaagatacatgcaaacaagacagggcaccatcacacccaaatatttttctagttttttttttttttggtacagatgcactgatggatttgcagtgggggatttctggctatatcacagtacataaaaaaaatgatgagagaacttgtaatagcaaaaaattaatagccacctaaacctgaccctgaagtcagaattgaattattcttagtttccaacctctgctcttgtccatgtgtttataggaaacttggaaatacattacttttaactaatttgattttcaccctagaaggttatcttttattttttaaatttttgaatggcagttttattttatatgggaatagctctccaaagaacagacacttcactgcattgaaatcagattgggtctcagttctactacctgtgaacatgggcaggttgcttaatctcccatttgtaaaacgggaagtaacacctgccctgccctactgaagtaagataatgcttggaaagtcactttggaaactaagaaaattggtaagtattatatttgtgggtagcattttaaaataaggggagggaaaagaaattacatttgactaagtgctaaatgccatagcttttgtcaggcactttatatatatgttagctcctttaatcctctgatttaggcattgtggtcttcattccacaaatgagaaaactgtgattcaaagatgtaaacaggacatatctgatattcaactctggtaaatggtagcacctgggtttgaattcactttaattctaaagcttatactctttccactaccatgtgctgaatgttctgtaaaatatttgttacaaggtagatttctgttatctccagtaacctgaaatgcaggttggaaattacgctttgggaaacctttgaagggccactccaaaggttataaagggattggaaatgtatgccttctgcgactgatacccacaagacttctggttcccaaataatatcatggggctatgtctttgggaattgtaacacatccagaagttttcttctttgctaaatgagagggctaggtgaaattatctctagttttactgaactctagaattctgatgataagagggaaataagacacacatataaacacttttccttcctttcctcttgccctccctccctcccttcttcctccttcctttttttccttccttccttctttccttccctccctcactccctcccttcctcccttcctccctccctccctccgttcctccctgcctctctctttgcctccctccttcccttccttcaacaagtatatagtgaacacctcctgtacacgaggcactagtgctaagcactgttttcaagctcaagagatgtatttgctagtgaatttctttcctaattagtttttaaaatatgcagtacattgaagagcctggagtacagaacttcttagagaaagaaataattatatttcccatttaacatttctcctaatcttcatggacttgcttctaaatatatcataaaattaagtgtacagttttgaatctgaagtttaaaacataaaaatattaatgagggcaaacaagggagaaatgacacttttaatgagatatgattgttgtaaatattcgcataatagtgctggtaacagtctgaaatttcagttcttaccaatgagaattccgaccatatctcccttttctctcttgatgtgagcaataaatagtgagaattagttatgcctctgttatacatgggtttgtagtataaagccaaattctattctggcaaaggaaaaccaaatatacacttctacagtattgcatatgttaaaacaaaacaagcctcctgaatgttttgtttgtcttttttgaaaaataatatcctgaagagcattaaacacaggaaaacaatattaaagctgatgttttccaatatgtaaaaatcctggatctaagctggtttacaaactaaaaccctaacttgttttgcagcctttgtggagtttgattagaatgattaaataatgtgggttttaaagaacaatgaaaacctcccagattgacgccacacagcacagctaatgtgtttcttctagatgtagtctcagaagagggtttcagtttacatgtaacactggcctgaacgaccaaggagcaagtttgcttttaacaagtccgagtgataatcgtgatattttgccctttagttaatggtgcaaattttatttctcaataggctttttgtaaatgagatgctcatttaaaagtcatcttatttgcagggctttttctgtttttgagagatttgctttctctgattttgaaatacagtgaaactctttcagaaaaaaaacctctctcttcaatagattttagatacacccagatcacatcatggcccctgaaacataacaaccgtgcagaaaaagcctggtgtagcactgttaacttctaaggtcaataggctccttctcccaccctgacttcacacccccttttcaataaaaaggatttctattttccatgtttgtgtaatttactactgggttaactgtgcaatcttacagttgcttccaaagattaagtcagatgctgcttctgtgctagagaactccacactcatgtataactcactatgcaatagccaaagggatccttaaaagcctcattctaaaggtgacagatgggtgtgaaggaatacttgcattgaccaaggcttctgtgagaggaaactaacttgaagaaaaactccctttctgggaggcagaggcgggcggattacgaggtcaggagatcgagaccatcctggctaacatggtgaaaccccgtctctactaaaaatacaaaaaattagccgggtgtggtggcaggcgcctgtagtcccagctacttgagaggctgaggcaggagaatggagtgaacccgggaggcgcagcttgcagtgagcagagaccgcgtcactgcactccagcctgggcgacagagcgagactccgtctcaaaaagaaaaaaaaaaaaaaagaaaaactccctttaagggttccatctagttaggagtgaaagaacacttatggagcacctcatgggaggcaggaacttctaagtacttctaggaatgatgtctcacaggaggagtcatctccattgcacggatgaaaccaaattgaggtcttcaaggacctgcccaaagtcataaagctaaaatggaagagcaggaattggaatctaagcgttccaaggtagagtctgtgatcttctcagggcacctccctctccatgaggcaatgctctgaagagggtattatttacttgacactctgggctttcgctaaattcatgcccttgggactgaaggtaagacaatgccactaacctctgacaacaaatgattcctttgtggagccattcaaaagtgataataaacaatgattcagagtgtccaaatcagatggttagatagaacccctaaaggctaccaggttttcttttgtcctgggaaattaactgaatcagtgacaattttagtttcctaaagtatttttttatggtagcaaatgcttgtatactaccgggtagtagcattgttaagaggctaggagcacagtctttacagttagacaaaactgggttcaaatcccaggtctgccacttacctgctttgtttgtgaccttgagccagttgtatacctaacctatctaagacttagttgttcatctacaaaataagaggaataataatacccactttataaggctgctgtaaggattaacgtaacacatgtgactgacaatcgagtgcctgggatattttaaatgctcaatatttgtgagttaacattacagtcatatagagtttgcgttaattcatgggacctgttggatagtaatgccagatcagggagatactatttggtgagaaatgttgtggcttattttatctctcatctacctgtctgtctatctgcctatccatctatctgtttgtcaactatcatgtaaagctatttgtttttaccaggcagattgaagagaaaaagaggaaagtttcatttggcagtgtagacagtcaatatcactgtaccaagtacccccaccggctgctaactcagataacaaaagtaaaatgtggaacaaggtatcctggttcaagttacctgtatttgtgtgttaatatagccatggatgattcttatacatgaaacaatatgtactaagttttctttatcctaaaaagcaggaacacgtttttatagatgtatgtgatatgtgtgtgtattggtgtgttgttgtgtatgaagattggactagggctgacaaaaacggaaaaactaattgctttataaataatgttaacaactgtgatatcagaaaaatcttctgtgaagtaaagcaatgaaataaactctcaagatagaaatgtattcatgttaagtgtgggattatggttaataaagtacatttttaattaatcattatttctaggcacatatagttttaatcactgggacaaactgatgatttctgcctgcttttttttcctctgctttaggtgaactgattgacaggtgattgtttcaggcaaggaacattaaattaaacatgtagaagtgtgcaaatatttgttattttgaattagaatgcttgtgtattctttttcacatttatacttgcttttgactaccaatataggtagaagagctttgtaaattgtaaagtaatatgtcaatattaatttttgcaactttagttgtgacatggaaagaatcttgatcatcttaagaaatattaattttctaaaatactaacttatgtagttacagaatgtggggataatgtttttaatatggacagaaataaaagcaaaatagcttttgaaaaagcattttcatgtatttcagaagagatcactacagggggtgtcttttagggcgaggggttgcatagatacctctttacatcatgcaatgaagaagaatctactcagaaatgtggaaaaagattaaccttagaggagacgaagtttgttaaaaaaaacaaaaaaaaaaaaaccgatacgtcatctgcaaagcagaacattcttacttcaaatgtgtcccttggtgcagtacttataaacaatgtcaggtagaaaactataatgacttcctttttcatttgcagaaagcagaagccactggagaaaaacggccaagaggcagacctaggaaatgggtgagtaataagatataatttttcttcttttttttaaagaaaaatttctgttgtattaaatgagaaaagttttatttcgtcgattacatgaatttccaacttctggtttgatgaatctttgaaagggttaagtcaagagacaaattatcatcacttcctaccactaggctccaggtgtttacgtagaacacttttctttcctgaaggtggactcatttttctatctcttatcaacatcaaaagaggctccactcttccttcaaatagggtaacaatgagatgatttgttcagtagattgagtaactaaagttaaagggtattatgaagccttggaagttgattacaaatggtgttaaaattcatacacaatgtgtatgtgataactttttaacgtttttcttttttctttttctttctttttctttttcttttttttttttggttttctccatggcttttgtttggacacatctcattttctagatggtttgtgttttctttttcacatggctttgttaggaagcaagggtttattttgagtttttcttgcttcccttagtagtcattctccacatgcaaacattagagatagctgtatccatacaagtgcacctgatcctataggcacacagatcctgtatcttttgaggccagaaattcagtggtcactgaagagctttgctaattttactgcttgaactttgttcccttgtttgctgtgttacccatgttcttctggtctgtctttcccactgacggagaaaagaagtcctaaaaatgaatgaaatcgtttctcaagaaggatgagggcatcctttatacccagtgttgcatatgatgggttctttggctttgctttttcctcttcctcaattctttcttcatgcttcaaattttaaaaagattttttttttctgttatgctggattatatgttcctgtttgccattcctttctcctctagagttctgcatcactttctatttatactttggtattgcctttcttttaatttattcatcttatatttttcctctgctcaacatgtgttgggattagatttcttagcataaggaaatgggatgatctttagatgaaaaacatctcagtgttaaaatgtgaccttaaagtaaggatatttcattcaaccttctgttcattaaattagttctctccaaacctacttatcaagtggtgatcatctagcgtgcttgattacctttaaagttagggaacttgctacctctcaaggctgcctctttcttctaggaaagctctgcacattagaaaattgttccatctgactacctgtaacttccgtccactgtctctaggtcatccttctgggaatatatagagtaattgttttcactttcactcatgatagccctgcaaacggttgagggcaattaacacatactgtttgtatgtatctgtgtttgtatgtaacacatactccagttttctcattttttccccataaaggaacattcttgttattcttttctgaacatgtttgttcgttaatcttttgaaagatgtcacctagaactaaatatcatatttcaagtgtgggttccataaacagtgggtttatcaccttccttgttgtacatatggttccagttatcgattgctgcatagttaaccactctaaaacttaatagtgtaaaaaaactattttattatgcatatggattctttgggtcaaggataggcagggtagagcagaaagtcttgtctctgctccatgatgtctggggcctccactgggaagactcaagcatcaggggatgactttaatacttgggatccagaatctggagctgtttcacttacaaatctggtgctttatcaagattggctggaaatctgggcggatctgggagtgcgtgcactggatcacccatacatggcctccccaggataatcaggcttcttacatgcactcaggactacctctgggaattttctggtaactgaggaggaagctgcaaggccttttttgccttagactcggaagtcaaaaactgctgcttccattatactctaatgagcacattgttgactaagttgatactggcatacatatcaaatagagatctgctgttttctaagcatcagaactctgaaaggacatcccataccattgaactaattaataagaaagacgtgtataatctttctaataggcaacataatagaaaatagatgagttctttgaagccatgggattaatgtggctaaaatgaaattaaattgcaagcgaatacagtggcagttaaccagcaaactaacctccatcatatggggcctcttaactctctcagcctttcatctcctctgcccttgggctgtcctataatggtcaccaattcacctccataggttagagtcctgtcttctccgaaccttcctatggctccacatctggccagctagttaattacagcctgccctagtacttcgaagtcattcagtttacatctacctttctttacagttttctttctcaccacacatccttaaacagttgatgattcagccaagcaggagtaaactatagagcaattaaaggatatatatgttttttttcttaacggattcttgctaatttaggggggatctggatttcaggcatcagatcttcctgctgggtaagaagcacatgtgaggcccccaccacagaaatccttgcctttctgagaatagctgggccattttctttgactctcctggtttctaatttttactggctgtgagaatggaaaatattatgtggtgaattgttacaagtccctgatttggtccccaaagaagagttgttctactgagaagaggaaataaaaggaaattgtatattttttctagacagtgtgtttcctctttgcttgtatatcttctgttgggtagagtatgcagccagtcacagcaaggcattccgttcaatggcattctttgctggaaagcttgtgctgaagaaataaatcattgcgttttccataggaaatgggcttatactttatagcaagttcaattctttccaacagtgtcattcaccgatttccttgagttagagatatatttttgaaccgactggattcattaggtatatgggttagaagccaaattgttccccttttattcttgtgggatattttgctttgttttaaagttcttgtgcttctaaaacttgttccagtagatattatagattcatgtaagaggcctgggaaaagatacctaccgaggaatcctctgatctgatgtaattgggatccatatgggtaggtgtgggagagaaacttgcatcagtcttgctttcagaggggatgaagcattggccaattcagtgatctaacgagtgtgttaactagatttgcttaagaacacttctattgtttactttaattcccttcatctttttttttttttatccccctagtttgaactggatttcagatctattgtttttatgaggtggtctgattttcatgtgtgtgcgtgtgtgtgtagaagaggctagaggtaaattgggtctctttttttcctggctttttatagttaagagctcaggctctggattcagatggcttgggttcaaattctggtccgtcacttagctaactggagtcttaagaaaatcacatgacctttaaaggtccagtttcctcatctgcaaaaggtatatttctcatagagttgtaaggattaaatgagataatgcatgcaaagggcttaataaagagcatggcacataggtagtgctcagtaaatgttggaaattatgattaatttcactgtacactttcattttgacattagctgtaggctaaaccttaattacttacagccaccagtagttacacatagaatgaagtaacagagttatatgtcagactaaccaagtacccttgacagtatcattatgtcctcaatatatttatgctgaatattaatcaagtttaagaactgcttataaataatactaaagaacattttaattctctttgctattaaggaggagttttacattgcagcttagaagcctttcttccaatagcagagatttggtgtcatgtggtgttcatcagtttgaaaagaagtatttctgctgtttgcctcaagatgtacatacagagatgtgctgattctcagaacttctatagaattccattagccagtcctgccaattgaaatttggcatttaattatttgcatttttctattcttgcctaggaaaggagctcgtcacatacctagtttagtgatggaaagtatttggagaaagttttagagagtggggctcaggctcaagaatacaatgaagtaataaagttgttaacctcatgtataaaatcctccatccagatgttgcttagtgatgcagctagtgcttctggaggaaaagaagcaagaaccaaataatgaagactacatcaatgggaacaagtgatacttttaggtgttttgttctcagaatattttaaaagaaaggaaattaacaacagaagaaaaatatttccctatatgaattaatggtttttataagaaaaatatctttctggagatactaagattgacctagaaattgatccaaggaccagatgcttaaagttcacttcaattggtcactagaaagatcccagcaatccccagctggtttctcaggctgctgattccctttatttggtaatggggtgtgtgcagtacgttgattaaaaaatatgcatttccattccattgcttttgaaggggggcagttgtctttctcttattaaagagcttgtgatacacaggaaagtgatgtaattttatatattagtcaaacgtgaggattttagataagacagcaagggtttttttcccctagtttgtagaaatctagaaatttaagtgatgatttgaggatcgagaagggagaactgaatcaaaataaaatctactacacacattctttggttttggaattctttggctttattctaaagatcccaagcattaatgcattgaagaacccggaaatctgattttgaagctaaaacattaagttttacatgtccattactgtttccctccagagaggtttgctacttacacacacacacacacacacacacacacacacaagcacacacacacacacaaaacaaaaacttttagctgtttgtaatttaagactttccttgttgaaagtggctgggcatggtggctcatgcctgtaatcccagcactttgggaggccaaggcgggcagatcacttgaggccaggagttcgagaccagcctggccaacatggtgaaaccccatgtccatcaataatacaaaaactacctgagtgtggtggcccatgcctgtagtcccagctattcaggaggctgaggtaggagaattgcttgaacctgggaggcagaggttgcagtgagcttggtgatcatgccactgcactacagcctgggcaacagagcaagactccatctcaaaaaaaaaaaaaaaaaaagaaatatataactgcaatgtttagaaagggatatccaataatgcagattgaagataattgcaactttgtactggagtcagaggggaagaaataactttgatatgacatcaaaaactgtctgctaatggaatgtgtgaaggtgaaatcattttcccttagacccttgccattatcacgtgctttaaaaaacaggagatgctctttttaaagcaactgcatttttaaaatacatgcttagtaattaaatataaatttgctgatgcatataatgcattcaaagttggtaagtaatattttctgaaactatcttttcctttgcaatattttatgataaaaatagagtacttttcaaattttttccctatggggaaaagtagcttaatcttattttaatagtttaccacaaaattcactaaagagattatttaaaattaaaagattaaatatgaaaacactaataagtcatatctaaaagtgaagaattgaatttgatcattcatgttttgattcaatactaacatctttttcatttgttttaatatgtaagtgctattcttaattattctgttaaatgaagactttcaaaaaaagagattgataatctgccctacttggtcagccagttcatccagtttagcatggccaacctctaccagaccctaaccatttaggattataaaaacattgactgcagagtctgaagctccagtggctttgctgctgtgccaaaatagcatcgactatcaccaaggaagaagagatttttctcacttgtgtggagtggcaaattctagacaggaggtagttcataaaaatatcttatttctccatatgctatcatcagatcaatagagtcctggccaagacagtaatctcaatttttaattctaataaaatgacaaatgtagaatcagtgaccattttgtatgacaacaaatgtatgtaagactttccttacacagtgtactatccctactcccatacacatatttacctacattcaccttactgtaagtatttatggatggtagtaaatatttctaaaaggttggaaatccccatgctgtatattaataaaattaatatgccacgtttttttaactaggtaaacaagtaaaatgattatattccaggagaacatttttgttgtgtttttaaaggtggaggctgcttttataagcgtttttgtttttgttttgtttcgttttgttttgttttcgagacagtttcgctctgtcacccaggttggagtgcagtggcaaaatctcagctcattgcagtttctgcctcccgggttcaagtgattctcctatctcagcctcctgagtagctgggactatagtcccacgccaccatgcctggctaatttttgtttttttagtagagacgcagtttcgccatgttggccaggctggtcttgaactcctgacttcaggtgatcctcccacctcagcctccaaaagtgttgggattacaggcgtgagtcaccactcacggcctttaagattttttttaaaaatcaaggaattcctgattctaaactcttcaatacttgacacaaacatttaaacatttttgacaaaagatgggatgaaatcaagcctactccttgtattccagattgaaaaaaggacctctgcgttttgatgggctgaatacctttgggcaggttgcttaatttatccgtgccttttctcatgtctaagtgcctgacaggaacattctgtccataactaatggctgtcaagcatttatggttgtaaaacacaaaaacctttattgctccagccagctctatcatccagggactgattattgagtttgtgatgatccagcctcttgtccccttctttgctttgttttctctcctcccccctgctgcctgccctttggccatttcactgctcattagcgcctccaccagatggggggcagggtcaggaacagggggtcagctctggtaaaaggcttggtaagaaggaggctgagagtaacagccaacataaggttttcagattatctacatccaggctcgcccccaaccctgtcctcaggaatcactgaatgcagccatgacactgaaatttgtttttcattcattattttttcattcttacaataaacgtggttttataagttagttaaaaagtctttttcaggatgccgtagtaaacaagagtcccttttgagcatttccttagtaaacgatgaatggctgctggtcaagcttgttctggcaagtctttagcctctgttcagattcagaagaatggcatcaaatctatgcttacattagactcaggttgtggaatgtagttctttcaattcaggtttagtgaatttgtcttatgatgctgaaagagtcctgtttgggtgttaagaggccacagagctaaccctaactatatgaccagggaaagcccgtgttatcacattgtactgtaatttcagtgcattaactcagaaaatgcacctcgagtgcctgtttaaacgtgatgttgtgcagaaggaacagcatgtacaggacagagatagagacggaggctactgaaacactttttttgttgttgttgttcacctatttggttgcttgtctctttcttggctggatcatttaaaccctagagttccagttctgagaccctttgattttgtgattttcccatttgtctaaacattttgccaaagccttctgacacgattataaatcaagtctgtgctgggtcctagggatgtcaaggctgacaagataggtggggctgcctttggggaatttatagtctggggagctctaaagagataacctgatacctgccaggtagattattattctatgcttcagatgttaggaggctaaattaaattacagttttcaagtattttgagctctttagaatttaagtccttccatagaagtaattatattgctttccaaatcctaatgacacactatttgaatttacctatattaacaccataatttgaatgttcatgtatatgtatacatacatactatatatatacacacacacacttatatatgatatatgaattggttgtgctatgtgctgtgtgcctggggttacattctctcattatcttcacagcaaatatataagctaatacaaaatgtatacagatttgatttatcaaagtagtcaaatttcatctagttagtattgggttaaaaagatgggtgttaaatcgtcaggtacaggctccaaaaagagggagaaaaagggaatcagaaaaaaacaggaaaattctgttgagccatttaacatatggtgaccttatttttcctctttgtgcatactcaatataatttatgcttatcaaataatttttaaatcaccaggtcttatagcaacttaattatatactttaatatttctgaatagtgcagccctttgtgttttaaaatgagctctttgagggttgggtgcatatctcctatttatctttttaacctcagcacctaggacataggagggaattcagcaaagtgattaagagctcagactgcctgggttcaggtatcagcttaatcaaggcaagttgttgatcatcccagccccagtttccctgtgtgtaaaacaaagggtaatcatagtttttgtctggtaggattgtttcataagaattaaatgagaagccatcaaaaaaactttattcagcatgtgtcaagctctcaataggtcataattgttgatgttagtacagtctcaggcccataatggtgcttactaaatgttcggtgagtaggatgacagtttttctttagtgtgtataaaggatggcctttgaatttttgttttccagtaatgaatgtggatttgaattacattctttgacttaaaaaaatccaaactaatgatttgtatttccaaagaggctacagcaggttttttttaaaaagcacaacctataggcatcaaagcagtatttgtaataattttgaattccatcttatgcctctccactaaagaagtaagctgctagccactatcacccaggcccaatagaaacttcgaatgtcttgccctatgttaatgtttccattccctcactcctggaaatagcattctgctttccaaaatagactcttatgctgtaccttagaaggatttttgtcacaattttggatcatcagaaaaacagaagacagctttattggccaaacctcatgaactaattttctaaggtagtttctctttctctctctctttttacaaaaacttattttaatggcctatttgtgtcccattttctttctgttaatttttagtactaacatgagaataaagaaaagtaaaaagtcaattactctatttgtttctttcaagggcatttgaaagcacttaaagtgatacattaaggcagtagggtgtacaactaaagatttactggggacaacaacctgaaatcctaggcttatgtcaacatgggagtaagtacttcagttagaataatagctagcaatgttacataacttaaaagtttaaggccgggtgcggtggctcacgcctgtaatcccagcactttgggaggccgaggcgggtggatcatgaggtcaggagatcgagaccatcctggctaacaaggtgaaaccccgtctctactaaaaatacaaaaaattagccgggcgcggtggcgggcgcctgtagtcccagctactcgggaggctgaggcaggagaatggcgtgaacccgggaggcggagcttgcagtgagccgagattgcgccactgcagtccgcagtccgacctgggcgacagagcgagactccgtctcaaaaaaaaaaaaagtttaagcattaccaataacggaagtgcaggtttaccaagttcccagaaaacccaaatatcttcaatattaaggcagttccccagtgcaggaagcactaaatcccaagaaggtgagataataactgtatgtgcatggaggaacatggactcatacgattatggttggtaatgttctagaaagcactgtttgttttgcggtcccttattatttcctgttcagaatgattctgatgtcagaaaagatacatcctacgcagtttgtgtcagaagctgatcctcgagtgtaatttccttattacagggtctctgtccctacattttctttcctgccattattctctcaggtagtccaacttcagtattccttaaattctctagtggaaacttgatgaggcatttgcatgcctgggcccactctcctaggggtggagttagaatgtatgaacatggccatctctgtgtcccctcattctcttgagagatggacattcttggcactggatgcacaccttataagttttaaggaaaggatgaaaaggcaatgagtgataatgctgtccatcttataacatgttcattctgtgctattaatctaaaatttctcttttaagagaaagtatagtttgatttacaaatcaataaataaatcccttattcccctttcatatctttggactacatattttccatatatatttggtgaaaaatatctcattcccagtcctaattctccttattataatttcttacatagcaatgtggtagagcttaatgacattgtttggatttgctattgagattttcctaaatgagagtggtcatctccagactaccaaaccaagacaatggtaggctctgtattttttttttttttttttttttttgaggctggagtgcaatggcgcgatcctggcttactgcaacctccgcctcccgggttcaggcgattcttaagccacagcctctcgagtagctgggattacaggtgcctgccaccacgcctggctaatttttgtatttttagtagagacagggtttcaccatgttggccaggctggtctcaaactcctgacctcaaatggtccgcctgcttcagcctcccatagtgctgggattacaggcgtgagccactgtgcctagcctctattttttatttagtattgcccttcctctattggtggttgaattttttgtggatattaaaatttgtcatcaaatcagccaggcttaaagttttgtgccttccatcctgtttagacaattgatgagctacataaaaccatttaaaatccataattttataagcaataaataggtaattttttctaacatgtagtccccctcgctattaaatcactcatcttagtggagatcagttgggatccttttcaactgttaagacctatgggaacaaagctgttacagctatgaccctatttgcactgttggaagttcttagggagccacagtatttacaggaaactaattcacactaaactcacttgtactgcattgtttcctgctatgataaagcaaatgggttatgtatattattgctttaatagaatgatcaatgcacttagattgtgtagtgtgagagagcttggccttacatagtcacagtatgaagagaccgaatttttttttttttttactaaaaaaaaagacttttctgctgggattgtaataatgtggtaagtattcagacttactatttgctatctttgaaacaaatatattacaataaacatttagagaagctgacattttatatccataaggcaaacacaaaatttcccaatttgtatgaaaatttgggtgttttatcctgtgcttttatttatttttttatttttgagtctgagatatttttgtgtccaagaaaatgtttagattaattcacttgcagtcttgaagttatctttggtagaaaaacatccttatgtgtatgaaaaaagcaatttagaaaggagatttcatgagcatccttgacagtggtgtacaagtttaatcgtctttcctgtgacaggagggtcttcatgtattcaacctagaatttctccttttacggttcttagtccatttcctcttgtcttgttcttaatggtgacagagaacatctgctatgttcctcttcaaaatatatcttcctacttggggtactgtaaagtgtacgtactttgggtcttaacatatctgcatttgagtctgaaccttatcacttactaaccttaggcctttgttacctctctgagactaaatttcttcttttgtgaaatgaggctggtaatatctccattgtagtttcagctaaagtatccagtacctagtaaatgctcaaaataccattattttggcctggcacagtggctcaggcctgtaattccagcactttcggaggccgaggcaggtcaatcacttgaggtcaggagttcgagaccagcctggccaacaaggtgaaaccccatctctactaaaaatacaaaaaattagccgggtgtggtggcgcatgcctgtaatcctagctacttgggaggctgaagccggagaatcacttgaacctgggaggcagaggttgcagtgagctgagattgcaccatggcactccagcctgggtgacaagagcgaaactccatctcaaaaacaaaaacaaaaaccaagaaattagacagctgtggtggcgggcacctgtaattccagcgagcagcttgaactcaggaggcggagtttggagtgagccaagatcatgccactgcctgggcaacaaagcgagactctgtctcaaaacaacaacaacaacaaaaaatcattagttttaaaccctgtgaaaatatgttgtcagctttccattttccacaataacattcccaagtctttctcactatgtcctgtttttctaacccactaatcacggttctgaatgagacttcaaatgatatggtagatggaacactacgttcgtgatgaaaggcctttctgacttgcattctgacttaatgaatttctagctttgtgaccttggacaggtgacttatccttgaacctgcttgctcttatgtaaaagagggataataattgtcatatcttctttgtcttcctgtctgggttgtggtcagaataatataagaaagtaatttgtactttgtacaaatttgtacaaggtacagtttgtacaaataataatttgtacaaataatttgaaagtaatttgtactttgtacaaatttgtacaaagtacaatttgtgcaaataatttgtacaaataatttgtacaaataaagcaccttgcaatcataaggtaacagcagtaagtatcagcaattaaaatttcatacactagctggatgcgggggctcacgcctacaatcccagcacctggggaggccaaggcaggtggatcacctgaggtcaggagttcgagacctgcctggccaacatggtgaaaccccatctctactaaagaaaaaaatacaaaaattagctgagcatggtggcgcgctgctgtaatcccagctactcgggagactgaggccaaagaatctcttgaactcgggaggtggaggttgcagtgagctgagattgcaccactgtactctggcctgggtgacagagcgagactctgtttcaaaaaataataataataataattaaaatttcatatactacaatagggtgaatgaaattgttcctgttatttatataacttctaacacttagcttgctatcttcagcttttcccttgtcttatctaatggtttatgaggcatttactctttttccatttccatctgctcttatggttgaaaggctaaaactgacaactttcagatgtatcacagagacatatcaaaagaattccaacatgaaaggtattgggttcatgtgcagaagtagtgaataaataagcagggttgggtgaggttaagagagtgccacatgatctatgtggtaataaataggtgaagtgcccaggagagagagatgagcagaagagacctctccagtagtagacattgaagaggaggattttagaattcgtctcttaagacattcactgccaagttccaacagaacatcatggacaaaacatatctaaatgagaaggaaactttgggacattgaggatggcttggagtggaaatgacctggaaggttgcagtgatcccaggcaggagaggacaatggccgtgtctgcagtggtacagtctgagggggaaggttgccgactgacgtgtggggaactgggagtgtggcactggagaagaccagttggaaaattgattgtcctggctgtgacagctgaaccatgaggactgtctaagagcactgaaactggggagaaaagaaagtagcctggacatggtaatgcttaaatgaatacttacatgtgataccgtaattatcaacagatttaaaatctgttgaatatactgttcaagtttaaatctgttgaatatactgttcaagtttatagaagcaagaaacttccccccatatttgtactgtattaatcttttggtttccttgcctcaattcagttttgtttcatatttaattatggggctgaaagtacataagtttgagtagtctagagtggaatgtggttaaatatccctgcagattactttatgtgtttcagtattctaataaaatcagccgcagtgatccatatgggatttgtagatgctgttttcccgaggcccttttctctatggctgtctgtgaccttagccattgactcgcttaatcgtttttggcctcctaagtcagtgattctgagcgggcagagtggtaatgtgatgtcatgtctggggcatgagcctgcatcctcgccgcacaggggtcccacccttcctggtctaggcagctcaatgcacagtgcttggcgcatcgtgagtgctcaataaattcagttgcttttcccgtctctctctggatctcaaatagaaatatccaaatttgagaatgccaccaaagcattaagttccctaattaaagtccatagtaaaagctgaggcagatgtgtgggaatgcagttccagacactgtagttaatctaggagagatgatcgcactgtatttacaacaaggcttcccatgctcatgaatcataagaactcttacaggattaatgagttttaacttaatgcagaatttttaaactatgtgtaatgctgggacatttcaaagtgtttgtcatgaaaaatggctgatgaaggtacacatttcgagatatcctgtgttccacctacgttgtttgttatcttgttgacatcttctgttccttttacaaaaaggtcagaaggaagtccctccacattttctgtagattgctagataagagaaacatcaatatagaaaggaacattttgatagccttacacatttatgtttttcaaaataaaaaaattctttaaataaaactttctttcgtgccctttctctggtagagagaaaaattagcccccttttctttcagagacgtgccttgtgggctttgaccagttttcccctaatgctggcattttgtaaaactgtagaacaagatctcaattaggatgttgacattcacacaatccattcatcgcgattagatttccccagtttcgcatgtacttatttgtgtgtgtgtatgtgtgagcatcaagttatatacaactttatcacatgtaggttcatgtattcactaccaaaggtattattattttttaagttccagggtgcatgtgcaggatgtgcaggtttgttacataggtaaatgtgtgccatggtggtttgctgcatctatcaacccatcagctaggtattaagcccaacatgcattagctattcttcctgatgctctccctccccactccggtattcttttaagactgtcagttgctcaggagtttgtggcacatcccatgatgacatacactaaatttgtcttctctaagtacacaagaactttgcatgactgtaggaatgtggggagaggaattctggcccatggttcctgtctttggctgtgcagttactctttcacattccctcattataaaggtctggctggccctggcaaaatcataggtgggctttgcacacagctaactgcttgcctgaagtaacttacacttttgtactgcattcagagttctgccaacttcagaggccaggaaagaaagaaaggattggcctgggagtgtaacacacctgcttttcctgaaggcacatacaacaggcgtatttgagtacctgcttgccctttgggatatattgaaacacatgcctgtttcgtcctgaagttgtggatgaataccttcatcccctggaaattccttgtttcacatagattttaaatgtccttgcgggcagatattcactgagaaaactgtcctgttaattgtactttggctatctggcccagtctctagaacaattatagtagaaccatgtcatcttgacacatttaggaagatccacatttgagaatgccactgtaatgtttaggttccccaaataaaaatttcatattacaactatgtctctctctttcctttctctctccctctctttctctttctctctctctctctctctcacacacacacacacacacacacacacacacagagcaaagctgtgctaagatgcaaacactaggcagatggccaagttgcccctccaggctaaatgtctcaggcctgcactctagtctgagaaaaaatggatttgcaaacagttcaaactgtgaatattaacatttaagaatggccaaggtctattgcattccactagtcactcttagaatctgagtgtttgtttaggtaaccagaacacagatgatgatgatgatgatgatgatgatgatgatgatgataatgattgatcataataactgaagagtaaaacactatcaatgtgatcattatgggattcttttggagaatacatttagtatatttggaccaaaagccctgttggatcctaaatcccagctatgctgtggcatacaaagagctgttttttctttttttttttttggactaatgctttttgactattggcacttcaaatatctacgaattacaagtgatattctttatttttggtggtaactattatcttatttaaacaaaaatcatgcttttgaatcagctgtagacatttttgacaatcttggaagtgcagaaaaagttatatttgaaagaaaataattatagaatatcagcatatgctgctgttgcttccatagcaaactcctttgggccttactcaaccaaaataaatgtggccacattgctgcagtaagcatggcttgaggcaaatggaagactgcagttctgtttcctgtgtcctgctttctgtccctgaggtccaagcaatgccagaacagtgaatttgaaagtattaaaatgttggtctgtgtggtccttggtcttcccatctataaagctagacttggtgtagagattatatagttaaatcctcttatattctacaggtgacaaaatgaaaacccagagcaattgtgtccagttcaaggccacacaaccttgttagctctgacaagagccaggtttcctgacttctagtccattgcttttccctgtagcgagccgcttcctcttgcctcacccgatcttccttggatttccattgggaatgttgaccacagttctgataaatctcttccttcaggtcctgtgttagtttcttcagggctgccataacaaagtgccacaaacttgggtgctttaccacaacagaaatttgctctttcacagtctggaaactggaagtctgacatcatggtgttggcagggccgtgctctccctgaaggctctagggaagaatctgttccatctctttcccttcacttctggtgctgttggtgatccttgatgctccttggcttttagatgcattgctccattctctgccttggttgccacatggtggtaacagcagttcctgtgtgtctgtgtctcttttcctcttataaggacaccagccatatttgattagggcccaccccactgacttcatcctaccttgattatatctgccaagaccttatttccaaataaagtcacattcatagagacaaggtgggttagggcttcactatatctttttaggggacacaattcaacccataacagttctttataactttaaacctgttagaaccaggctggtatttgtaatgcataatgagaaactgcagtgaatttcattaagtgtaaagcatcatatccaacatttgtagtttgttacaataacacattcaaaagatttatagactgcttttggtgtgatttttggattaattccctcttttgaagacatttgttgggcttagtttattttaaggaaggaatgaatagacctgaaaacacctaatttttattttcaatttagcctggaagctagcaaaagcttttgcagagaactgaaactgtgtcacagagcaccagcactgtatttgttatcattttggccttcagttttattaatgcttgtttgatgtgttaagcccctagctaagacaaaaagacagaactttagggtttttgtttgttttagcagtaataaagtctagaataaaatgtttgctctataatatttaatggtgtgtattcaatttttaaaccaaaatttaaaagaaagaaatcccattctcattcagcactgtcaaatgtattcattcccccagacttcactggttgaatataataatttgtgtgtataaacagtcttcctgactgcattctctttaatattcatttatcaatttgggaggaaatttccaaataacctttatttgcaccttaaaaaaatagttttaaacgaagtcatgggaatggattgctctgtcttttactgacttttatatatgtgattccaaacctccctttaaattaatgtcttttagcttcaaatatacctcttcccataaggctagtccccatttcctataatcttacagacctaggagaacaatattttcccttctgtcgttttgataattacatcctctgtgctcagtggtggcctattaactcacatgaataccatgggcttgcaaaatggcctcaaatttccatatattggaactgtgagaactttctataatggtgctttagcaataatgatggaggtgcaggcatttcctgaggattaatgaccagctgggaggaaccagtggcccttggctctgcctcccagccagccattaattctaaggaaatgtcttttgctgaggtcgttactgctattataagcttaaaatggaaaaacataataggcatatgagttatttttatgggttgatgcagtttccaatggtgtgtactaatttgagaaaatgaatgtgtatacatacaagagtaagtcagattgttagactcatccctcagtattccatatgttttgtgactgattttacagttctctctacctttctcatttacaaaaaaaaaaaagaaaagaaaatttgattcagcaattcctaaaagtattgtattcagtgacatctttggaaacaccagtttctgttatcaacttcaaataatagtcaagttttatgtatgatctaaagggaaaacaagtttgtttttcaatcctgtgataatttttcttttagaatgaagtgttgcaagaaatgaaaaattaaaaaaaccactctgtaacaattttgctgtgcttctttgatttttctctgtttttgtttaatgggtaccttatatttgtacctttacatattgaattcatgagagagttatgcacagcctagttatttgacattccaggggtttaaaaaaatgtatattaaatattgcagtaatggtgaatgctttaacataaaaccacaaaaaacctcctaaaaataaagccaaagagtctaaatctcgctcactgtgcttctttctgattatttttaaaaggcagcccttcttgtacagtatttctactttttattctaatcaactggactgttgcattatttttatgtagattgctaacaaggtttttgaagaaacactcttaaaagtcataaaagggaaaatcttgacagttctgggatattgccacccttgaccttttggagaaatgtagacagcatctcccaggcatgacgcctagggatcgtgtttatctgtcatcagttggtgactccatgtttattgagcactggctataagccagacttggtgagggactgaaacaattacaagacacagttctgcactggaagaaataggaatcaacctaagatttcctgtcctgctaggtcatcaggttcctgtcccactactttccttcctctaccaaattcacttatagcctccaagtagtgtaactatcaatagcacccctttcactccccaaagtgtcctaatttggagagtaagttgtatgatcaccctacctacagtctgcctgttttccaatgcacactttgtctctcccctgctcttgttacatgtgtgtcctgaggccacttccagattgttcttcctctgtcattactccagcatgtcattgctttgctcagaaactgctaactgggtcttcatttgtggttaaataataccatttttcttatatacatgtagccgaaagctctatttccaatatggaaataactaagagtaaacatcctattccatgaacaggacgaacactttctcaccttcacttttacctgcaatttccttcttccattttcagctgcttaaaatcttctttaatcttcaaagtccagtttagacagcaccttttatgaattagctccttactgccctagtcagaagtgggctgtctcatccttgtaggagggtaaacacgcattgcagatgcttctcaacttgccatggggttatgtcctgatacactcattggaagttgaaaatatcatcagtcaaaaatgcatttaggccgtgtgcagtggcttactcttgtagtcccagcattttgggagcctgagatgggaggattgcttgagcccaggagtttgagaccagcctgggcaatatagtaatgccccatctctaaaaaaaaaaaaaaaattaaaaattagccaggtgtgtggtggcacacacctatagtcccagctactcgggaggctgaggtgggaaaatgcttgagcctggcatgtctagccttcagtgagccatgactgtgctactgcactccagcctgggcaacagagcaagactctgtctgaaaagaaaagaaaagaaaagagaaaaggaaaaagggcatttaagacatctcacctactgaacatcctagcttcgcctagcctaccttaaatatgctcagaacagttacactgcctacagtctgagaatatttacattaaatatgctcggaacacttacattggcctacagtcatcttacacaaagcctgttttataagaaagtgttgaatatctcatgtaacttactgaatactgtactgaaagtgaaaaacagaatggttgtatggatatttgaagtataatttctactgaacgtgtatcactttcacaccatcgtaaagccaaaaaattccagtcaggccatcataggtcagggactgtctgtatgaatgccttgctttcattatagcattctccattttctcttgtactggtaatttttgaacagttatctttaccagttttgtaaactccttgagaacagttttgcattttcttcaaaacctaggactgtggtatacagtaaccgcttaatacaatatttgttaaatgaagaacaaaaaatacgtggctaggctactcaggtcattcccacaaaatgatttctttaaactgcgtaattggaagtttttgttttttcaaaaaagtatgtccacagtattatgtcattaattactataccctgaggaattactgctgctgctaatctcttggattcagtacttagagacataaatataagtgacattagcactgctactgttcaatgagattacaaaatagaaagtagacatagaagcagatgttggaaaatattctcaaagataacaaaatgtagaatatcttactaggcctggttcagggacataggctaagctgaagctgccacacatggtgtttgacttcatggcacacttttctgcagaactggaaaaagatgtgtctactttggggcattttcttcaaaattaagaaaaaaacgtgtctatgattgattttaaaaaagataatttaggccaggtgtggtggctcatgcctataatcccagcactttgagaggccaaggcaggtggatcacgaggtctggagttcgagaccatcctggccaacatggtgaaactctgtctctactgaaaatacaaaaaatgagcgggcatggtgacacatgcctgtggtcccagctacttgggaggctgaggcaggagaatcgcttgaacctgggaggtggaggttgcagtgagcccagatcgtgccaccgcacctccagcctggcgacagagcaagactccgtctcaaaacaaaacaaaacaaaacaaaacaaaaaaaggtaatttaagaaaacaatacatgctattgtattggatggataaaacagagcgttccatgtgacaaaacctgtatgtaaacgtatttcttattttttaatcatcattttatatatgtgggtcactatggaacactgcgttcagaaaataaattacttttctttttcaaaatattgcattggtagtttcatctcgttttaggtaatattgatttatcctaaattggtaaaaaaaaaaaaaaaaaacctagatactatatatatttaatttaagcaccttgtagttccatggaaaacaaactgataaaattttaagagtaaattgagtaaataaatatagattatacttaaattttttttctctctgtgaactggctttaaagatatgctttaacatttaatataacaacatatttttgaaaaaaaaatccgtttttgtgcaacatgtttctttttttttttttttggaatgaagtttcgctcttgttgcccaggctggagcgcaatggcgcgatctcggctcactgcaacctctgcctccccagttcaagcgattctcctgcttcagcctcctgagtatctgggattacaggcgcccaccaccacgcccggctaattttcgtttatttagtagagacggggtttcaccatgttgatcaggctggtcttagtcttctgacctcaggtgatccacccgcctcggcctcccaaagtgctgggattacaggtgtgagccaccacgcctggctgtgcaacatgtttctaagtgaacagtatgacttcagagagtcatactgttttaagagagttaacaaaagaataagcattggatatacttaccttttttcagatgttataacaaatttaccaaaatgcaccatacacacacacacacacacacacacacacacattccataacttcaaacaacagaaaatgggattctgtctgtctctgtgtcccacaatcagtaccaccaccactactacagtttgcttttattatagtattatcaattttctgcaaataagcctaaatgtcttaggtagttctacatttttatattacacagtaattgaggaaaaactaaatatttttgaaagtgcatttaaaatactactttagaacaattaatctacttgggtgtacaaaatgaaagccagttgttagaaatctcttatactacaaaaattaaaaaagtgttaagcatcaaggattagacctggactagaagtatgtgtcacttggtggatgaccatgcaactcaagaagaggaagagtggatttagaattcaagatagagatgaaacactcatgtacttagtgtgtgtgaagtttaggagagggagctgagctgatggagccatgggtcacagtagctgaagccatggctgtggataaagatcccaagagaatgtggaaaatgaaatgtgatatagaaagtggagaagaaagggaatatggggaccactgcacacaaaggagataatataggttgtcaactgccaacggcagtatgtggaccagtggtctttaccacatccttctccagctgtcccaccgtccacacgaacttacgcatgcttcccttgctctacccacccatgctcagctcatggtaattggcatggctgtttcatatctattaggtcactagactgagcttaccactgggataatcaacaacagcagtgaaccctaaatcctgacgacactatcagcacttaagtagagctggggaatgaaactagaattcttttggggccagatcattaactcatatctagtgacaccccattttgcctctggaaaagttaaggttttgttgtgcaattagctttacagaatggagcatttctgttggtttactaaaactgttaagccaaaatagggcacaagtgcaagtcctggctccagaagttggctgtaccttcctttctgcagtacaaggtgaacatctgtaaagaagaatgcaatgtcccgggtgtgtttaaactgactgccttggcctcaaactaaaactgttaagccaaaacagggcacaagtgcaagtcctggttcccgaaattgactgcaccttcctttctgcagtatgaggtgaacatctgtaaagaggagtacagtgtccctggtgtgtttacactgactgccttgttttcaaggatcattagatttcaaagaaaaaaaaatcacaacaatatcctttgcatggaccagatgatgagaaactaaattgtaatttgggattcattcacaagaaaagtcctgaatggttttcccatggacaggatcttggaggttaggaataccaaatcctgtgcccagctcagtctcactgactagggaatgttgtctttagactacagaagtcgcaaccctcaccccaaaacatgaagtattcaaaccttttgaagggtgtgatgtttccaggtaatttggcttggcacaggaattgcatttatgcccaactttggctaagcgattttagtagtccagcaaaaatgctctgttctgtaaaggtaattgcaaaacaatatcttcatttctccagatggaaaatgggatatgaaaatccaccaaaggaaagaaatatcatttcccgcactgtggctctgcaatcttagaagggttccatgaatattatgtatgtgcagtaaacatttatgaccttatttaggtccaagcagcatgagggattttgtgctagtagttgttgatgagcactacaaatagggatcctttatatctgaggtatccatagtaactaagtagggcccatttccatcgtgcttatttgcttccaacctgccaaccatgcttagactctgagggctccaggattcctaattcataaaaaaaacaccccagagaggtgggtaagtgcttttcagaaaaagcaaacttaagcaagtgattttaagagatttgaagagtgctacatggcagccaagatgataattttttggcccaaatataaatttaattgagtagtgttataaagacaaaattacatagccagaaacagaattatgagcattaggaaaataatagtgttgtcttccatctccttgaaatcccctgttatgttactcactccactgttgactattttgtagatagcacacattcaccttgcatttggcagagaacaccagctttgctatgaatgctcacaatttttgtaatacagggaaatatttaacatactaggaaaaaaaggtttaaattcattaacattactattgtaatgttcatatactcctcttttcttaggacacactacaaatgattttatagtgtttccatttaacacacatagtagcttttcttctggattgtatgtgcagtgccattgaacagaagcataaaattgtcagtggcctacattttttagattatttaactatgattagaaatattttgatccattttttcacttcagctctttttcatattagtgcacacttgacccttgaacaatacaggtttgagctggacgggtccacttatatgcagatttctttcagtgaaagttacactgagtgcttctgcctctcctgcctcctcttccacctcttctccctcttctgcctctgttacccctgaaacagcaagaccaacccctcctcatcctcagcctcctcaacatgaagacagtaaagatgaaaacctttatgatgatccatttctacttaatgagtagtgaacaaattttctctcttgcttgtcttatttttttgtagtttacatgtagtttgtaaggatgcagtatataataatatcacatacaaaatatgtgttaatcgactgtgttatcagtaaggcttgcagtcaacagtaggctattagcagttaagttttgtggagtcaaaagttttgcgtggatttttgttggatttctgacttcacagggagtcagtgccccaacccctgcattgttgaagggtcaattgtatttttgtctgatttcatgagggtgaactttttatactatacttttacagatagaaatgaaagtacttagtaataattgaacatatgtacagtaaaaatattatagctgttgttttaaaataattgtattaaattgaaacttaagttagtcttcaggctttttaaggttttcaaatttgaactggaatgcaattcagaatgtgctagaataacatttctccatttctccagtgtcaagatgggaaggcatacattctaagcgtctgtatctccatctatttttctttttttttttttttttttgagacagagtctcgctctgtcacccaggctggagtgcagtggctcaatctcggctcactgcaaactccgtctcccaggttcacaccattctcctgcctcagcctcccgagtagctgggactacaggcacctgccaccacgcccggctaatttttttttttttggtatttttagtagaaacggggtttcatcatgttagccaggatggtgtcgatctcctgacctcgtgatctgcccatcttggcctcccaatgtgctgggattacaggcatgagccaccacgcctagccatccccatctatttttcactaatattcaagctagagttgctggctaaaatgatggagcatcagaatttgtgaactctgggaatcatagcaagtgtataactataattcctttgtgtctaaggagggtggacctctatattagagagaagatttacaaacgttggggaaaaaatggaaattgagactgactcctaaggaaacatctgttcactcactcagcaaacatttagcccactctgctaatgctaggcactgtgctagatatttggagagacactggagaaaacttaaggtccctagtcttgtggctcttacattctagagagggattataaatgacggcgtagttattaaaaaaatacagatgatgatttcaagccttataagagcaaagaagaaaagtgaaccaagttaatgtaatggagagtattggagtaggcgaggctgctttagatcagagagtctgggtggacttgatggaggaggtcatggatagccttgcagctggtagacctgtgggcaacattaacagcagataggacaagagggttaggggctaactgagcattcacctttgtcttctttttcccctcggttatgagtgtgacaaggcggaacatccaagggatatgttgcaggtgtcttaagagtcaggtaaaaggcaagatgattcattatatctgttctttttgtgatacccatgtaactacctataagcttcaaagtgaaataaacattacctcttgtaccttagcccgcttctcattcttcattacaaatttaagaaggcagttattaatgtgaatagtcattcttcttttcagcagtgccaactttaaaaaaaaaaatcactaacacttacctgagatgcagctgacatgtaccaagattgcttgccattgccctctcaacccatctgagtcaaatttttctttctgctgctgttttccttctgctgccatttttctttctgctgctgtcaagataggaacatgtgccttcccatcttgacactggtagagagagagattgagagattgaagggggagaaatcagttctgattttctagtttctaaacactgcagaagaacaaagtagagaagaaagaggagagtgtgtgaggaaagaaatggcaagaggtacatgagataacttagcagggagttaaataactagctcacataatgacaaaaaaacattgacactaaattgagggcctgccatttttgttaactggtatccctgaatgtggctaatggcacaagctacgtagaaacaggcccttgtcctgtttttgcaatgagcagaaatctagcccactgagacatcgagttcttttctaactttttgctctgttgagaacatctttgcttttggatacaaaggcagcatgaaaatctggaggccttctcaggaaggggaacttctaggaacttaatctgttagtgggaaagccaggaaccagcacacttggagtgtcatctgagcaggaggagttagaattggctggccagttttcccttaatgagtgtttattatgtttaagctacagaactaattactgtgaaaagacataaaggaatgagaagaccaaaaccgtatcctcatgatactgacaaatcagttggactgagcacacatgaatcaactgaagaacacttctgccaagttcaagttgtgtaaaagtggaggatatgagtcttgtggggacacagagttgaggcatgagctattagtcagagccgtaaggctgcctgcaggagaagaactttggatggagttttgaaggaagtgaggaaaagatctgaattaacgtattaacacataaagcttgtcatctgaacaggactataagcatctcgagggtaagaacgtgccttttctttcttacacattcccagaagacccacattcctcattgggctctctgtaacagtatttactaagcacttgaataactggacatgggcaccatgttgctaagttgattaaaggttggtcttccactctgccactggccacagcacaaagtgaaaacagatgtcacaagcaccttgtagatctgtcccttttttcttctgatgttcaccctccttttgagctctttctttctccaacattgcttacaaaataatctttatgcatctgagagggagcaaatattcagtaactttctgcagctgtcctcactaaagaggagaatctgttgaatgccactggaaatgtaaggatctcttgtgacagtaacatctcaaggggaaactagtggttaaattgttaattctttgagtctgaaacttttttcatttgcagtgcagataagtgcctgatcttgcagtatcacgtttctgacttctttgttctggcttcattttttttttcccaaaatgccattttcatttgttcttagagttcagaacatgtcaaagagcttctttaagcagtaggtggttttacagagcccacagagaaggaaaactaaatatcatcccggatgcagtccactacgatcgtggaggagtcagattactctccgggctttgctgtgtctgcttgtgaaacaggaaagggagaactgaggcaatgagtcacctcacttgggcccaaagcaccacctacgttgaatatggagaaaatgtgaagcaagagtttctttttatacataatcaccatttgtacataatcaccattttctccatggttcttatccaattcagtgcatcttaaaggatggtttgtggaatcatgacatagcagaaaaatccaggtactatcagtcttgcctgtttctacctaactctttcatttaaactctcactagaatctataggaactgttagcatcaattttaataagttgtcaactaagtgattagtggtatttattggttatttttgacaaaataatggaatcatcaaattttgaagttgagaagtaaagtaaaaatttgtgccaaaccccaaatgtagacaaggtcatattataaacattaatgctgtcccaaactgccaatgcattgcgtagaactgaggttagcaggttaccattgatttcctctacttatgctttaagaggttggcattggtaagccgctacactttcttggtcaatgaggcagaaacccctttgcaaaactctcaactgatgaaaagattagctagaatgactctaggaactgttttctaaggatctgactcattgattcctttttttggtagggttctctgggccaagttagttcgagtatttatcatttaaattaggaaattaccatcaccatcatcatgtacattcataaatcaaagcaagattagagaaggaatatggtggatcacagagcaactcagaaagacgacagcaacaactaggaaatgaaacaccatggttgtatttcaggaaccctacccagcagataggaattaccatagctcctaaaattccatctgggtggttgatggagcctcaattaatctgacaccatagcccatgctcccctcttgctacctgctgaagttagcagggaaaagtcaaagagggtgctgtcagtggggtcaattcttagggatcatagtgaaccaccctccattgcactgactctttcccacaaaatgggctagagatagcagctctccttatgtatttaagaaagaatggtcaaaaaatacaattcacattttattctggtatataccattttgacagtgtttcacaatgtaggtaatatgaatgggagtatttaaacacaatcctgtttaatattcttagccagtacttattaaatgcctaccaagcctggcattgttctagagacctcaaaatacacctttaaaaacatattttattgacagttgtataaatgaagaaaacaagtctcagaaaattaaagtgacttgcacagatacacaagctagaaagtaataaaactgaattttgaacccaggtttgtcagactctaaagtccatgattttctgctccatgtggccaacccagttagaaaggttataaaaaatcttaacagtttttcagcccttctcacacttagctttaggattaaaagtattggtcatgatttgcaaaaaaaaaaaaagtagtgcacaatattccagctatattcaataaacatttgttgaatacaacgtatgtatatacaggtcattgttacaggtctgtgtataagtaaacacaatatggtccttagctttaagacctttcagtctaggggtagatatgcatgtgcatacaacttctgtttatttttgaatttcaactatgtgtcaggtgttaggctgagcacattatgaacattgtcttgatttattatttaaccttgtacgagccttgtaaggtagtggttttcgaaatatttttgccaaaatgtaaatagtaaaaaacaatatgtgaagcctttattccaactaggtaaaataaggaaggctttacaaaggagatgaatgacacttcagctgagccctaaagaatgaataggattctaatagaacagctgggggcaggcgtggtggctcacacctgtaatcccagcactttgggaggccgaggcaggcagatcaccttaggtcaggagttcgagaccagcctggccaccatgcaaaagcccgtctctactaaaaatacaaaaattagccaggcgtggtggcacatgcctgtaatcccagctacttggaggctgaggcaggagaatcacttgaacccacgaggttgaggtttcagtgagccgagatcgtgccactgcactctagcctgggcagggggagactccatctaaaaacaaaacaaaacaaaacagctggaagatgacatccctgggacagggacttccatgtcatgtgaaaagtaggagtaaatcaatggaggcagggaaatgtagggtgtatttaggtaagagcagctagtttggattggatagtgtacattagagacataccatgggtgagggggtggatgtggacagtgaacctaaacgctttgtggtagcaggtcacaggggccgtgcatacatgcttaaggagattggatgttacaggaaatgggaagctattaaagatttctaagcaagagaatgacaggtcaaatccgacatgatttagaaaaaacgtaggctcagtcagaagccatagtctaatgaccaatgcatcataattacttgctacactaattttcttctttagaagtcagcttttaagatatgtgtttataatacagatttatacagttttacatggttgaaacaaagaataataatatttattatgtaagattcaaatttcagtatcaacaaataaagtattcctgggcccagccgcacctattggttcacgtattgtctatacctgctttcctactacagtggcagagctgagtacctgccacagagaccgtctgcccaacaaagcctgaattatttactctccaacccttaagagaagaaggttgctgactcctgctctattgtgtctttctggccctcttaatccatttatataggtttcttccttttgtgtgtgaatggaaaatgaatttaagttcattagtagaagcaagacacctttagcttggcctccaggtattatttgttttccttctcatgagaattttgaatgttctatatctagattctcgaggctaaagaataatgaagcagaaaatgttttctccattactatatccccttcctatggggattctgaaggtgcggttttccctctaggtgagagaactacattcctttcctaggcagattccattttagttcacactcaggctgtcagatgcacagaacaatgtcacatgggcttcttaagacctcttaaaaatcacttccagtttgacttctgcccatactttactctgttagttttcctcagaaaggcttggcaatagcagaataatctttgattaccaacaatatatttaattttcctatttgataggctgatgccgcagaaaataaccaattgccttctgtgctttgtagctttgtgctccactgcatcatcactttcttgggtttaggggtctgtgggcatagcaaaaggtgtgacagcctgtccttgttagactgaagccagtctgaagtggcagggaggcaacaggatgccagccaaatgaaacatatgctccagatctttcatccagtccggagcctagtgtgacttggcttctgcccccttcatccttcctagggtccccctacacaaaatcctctaaataaggttgccagtaacctcttaactgccaaatccaggggacacttctcagtccccgtcctgatgtctcttctgaaatatctgacacatcagccgtgcctccttatttcacacttgccttccttggatgcctgaaggtaaacctgtcctgtgtttcttctcttgtcaagaagttccttgcacccgggaggctcttctttctctacctgccctctgcacgtcgctcgtctccagggttatatctgaggtcctctatttttcattccatgtgttcattctgagttagctctgtggtatctgtgtttcagtcactgcctgcattgactgactgtattcgtagcttatctgagtgccatcatacacccggtcatccttgacttgtcagtctccattttcaacatttgcaaagttctgccatttattactcctaaaggtgcctggagctatatgttttgagttttcttttcctacattcccactgccacattctttgtacaagtctttatcatctctcacttaaactatttgcaccagcctcctactagttttcctgccgcctctacttttctttgtccagcttacctccattatcactgcaagtgttttcttcagaacagacactttatcactctcctgccaaacattttcaatgactaccattcacccaaggaagtctgaacttcttatgttgattatagcattgggcctagtttctaatcttgcctcctactacccaccagttgaaatcttcacttccttaggacagaaagacccgtttttctgaaacttccattaggtctttcacatctgtgctctggttggtatagtctttacctttacttccatttggaccaatctcaacacatctcccaagacccagttcaaatacggtgcccccgccaacctctcttgaaattatttccttcctgtttgcctcatgggaatttgcacacacctgaggtaaaggacttttacccgtctactataattatttgtttacatgtttttcatgcatgaaactatgtctcatctatctttgtattttcaatacagagcatagtgtgtgtcttataaaaagtatccaaagaatgaatgtgtccaagccatgtgtctgcacctgtaccatgagctctctaggttctgttgtctggtgtgttacaaataaataatgctttcagcaccaaatacggcagccatcagcagaaatggcttatttccttttctcaatatttttttcgtactgaatctaggctaagtgtagatggctatagatagtcattcatgaagtcaaatgcaccagtgggattggaggatagtatttattttagaaaaaaagaaagaaggaaaagaggagagatgtccagtgtcactattagtgaaccacatatattatactttaatttcccttataaatatgaaaagagcttggtagaaagtaagatatataaagcatgtctacatgtgttttatgatgtgtatacatatatgtatgtagatacatacatatatttaaatgtgaccattatcacattactctgttatattttattatattcatcctcacaaaattcattgttaaagacagggaactgaggatttgttttcaagtcttgcttgtggtatttgcccgtgcttgcacaagagtaacaataatggcagaatcatttattagatgactgaaaagagcaggcacacatggaggtttaacatatggtcgctgtccttatggaattcaaaaatcagacaccaaaaaaggtaggtaacaatatagggcagtttgaggtatgccaattaatggcccacagttagtgagattttgttttttatctctctatagcctactattgcactttgcacacactggataaacatctgctgaatgagtggacaataaaacagaagcaaatttgtactaatttttcaattatgttttcttccttgtatgcattattgttgacaccagcttgttgggaataagagtaagaatttatcctttacagtttcatagatctcatttatcacctacaagaaaagaaaacttatttttgttttataaacttaaaatgtaaattaataaatatataatataaataataaagctatataaataatagatatatgtaatacacagaatttaaagctatataaagtctactacttagttgaagactttgtcagtcttgctgagacacattgagtgaaaatatatataaaaacctttaatgatgtgaggtgaatactcaagaaattttaatcatcttcttttcagtggtaacgaattacgctcatacaacaaagcctaggtttccagcaggagggaaaccatttgaagatgtggtgccctttagaaattgtttagaatcttttcagaaggaggtgtagtgtgactccaggtgcctctctagggttgttgaagtgagtgcaggtgacctctatgtacttgttcttcaagctgctttataataagcagcttgctaccctgatttacccgcagaaccaccttaagacttggcaagatatcttttttaaaaaaataaagtaatggataatcatagttcaaactcatttgtttttctgtatgtatacatacaggtaaacattttcacaagtacgcttaaaaatagtagaagagtttaaagatttgccccaatgggctcatctctcccttttccagtttggtgctccatctcagaaaaagagagtcacattttgagacagatgtagctctttctacagatttttccagagcaagaaaattgggatctcacacatctgcagtacttattttatcttctcatctccctttattcaaccagaaaggttccccgcccccccagtaatacccttttagaattatcatgtagcttgatgctatggccataatgggttttgtcttgttttgtttaatcacagatgtaaaaataaaaagaaatgcttatatttattagagttaatacaagtaattgtcccaaagtagtcccaaattaatttttactcccctattctcatatgagaaaatatactgacagtggctcagtacctgcttgctttgcttgtcttactggcaataataccagatgtattttatttaattgaatagctgtgttcctgagtgagtaaatgatactattctaaggtgatctatttacatacactagagcttgcagtttatgacaactgttagtttattatttcaaagactatactgtgttgcaaagaaatattttattcagattttcatatattcagttttgtctgtttgtttgtttgttttgagacaaagtctttctctgttgcccaggctggagtgcagtggtgtgatctcagctcactgcaacctccacctcacgggttcaagccattctcctgcctcagcctcccaagtagttgggattgcgggcatatgccaccgtgcccggctatttttttttttttttttttttttttttttttttttttttttagtaaagacaaggtttcaccaagttggccaggctggccttgaactccttacttcaggtgatccgcctgactcggccttccaaggggctgggattataggcgtaagccactgtgcccggccttgtctggttttttaatagtaggcctacgtatgccattagtcaactttctgtgagtttgaactaccaacttggtggatgtttttctttttttatttgctttttttctttgaattatttttactatcattagagaatgtgcaaggttacttagtagagaatgagctcatctctgcttcttcagctatttttagaatctgattttttttaaaagtggttggaggaaagaaatgaaactgcattcaactagactgaacttggtcaccattatcatggggattggtgaggttttctctttgttgatgtcttcagttttcaacaaaattgcttctttggaagtttttgctttttctcctaaactggttatataggaatgtagtaggtacaggtcattccattatataaatctgtgtttataaatgatttacttagctgttccagcctgttagttaaatatgtatttaaggcctgttttttcaaaaaaaaaatgtatatatagaaaaaaaaatagaagctcacagaatggatactgagttgctgaaaattagtcatttgaatttaaatcttttcaggagtttttgcattaggaatttacaccatatactcactctgaaaccatggcataaaaagtataattagtcacatctattaaaacagtgaaagaaaatatttggtaattttctattagccaataagttactttgcataaggcaattgtgaatactctttctcttcctaatcttaatatgtacacaactatacattcaatatttctttcaagaaaaccaaatcctacaaccccagaaagagattctaatttggttgttctccatttctctttatatcatttataaagcacgcaaaacaatttctggcctctgatttttgaaaaccataaaatcatttcaccacttaagcccaaactttctaaatcaaatttttactctaagaacaaatactttcaccatttataaacctttcaaattaaggttttgagtagagctttccagacagcctccggaaaccataccccatagcaacacatgtccctaaagcacattatattatgtggtgctctaccatagatgcccagtatttgccacagaaggaacagaacttgtcttaccccatgagtaggccaattggtcagtggaggagtgacaggtgagcagtcagtgaggtgctggaggagggtggatgtggggggtgtgaaggtttaggagtagaaaaaactcacactcggggctctgggttgctgggtgctttctttgcagccctggtttgtgaagtgatttatgggccatacatcaccttcctggttggctttgttgacaccttgtcacattcttgcttgggcttgaggaattcattgttcttgtttgaactgataagaacaaaaacaaaaatgaagaaagaaaaaagaaaggttttctcactgagaccttgggaaaagctaagggggtggaatgttgacgtggagcggcaggctgcactttcccaagcaatgcagccctgcgtctgctggctgctgcagcagcagggaagctttgcctttaggagttctggcagaagctttatttgccctgtggaagtagtttcctggcttggagctgttcctttttgctagaatggtactgtgcagagaggccttaggaggggtcaaggagagaggttttcctttgagaactgggagacataatggctgagaggagattccaatgggaggtaaaatgaccccggtcactgggagaatgtaaaacacacggtgacttgatgtgagctggtctctccaaagttcatcccgctgtacagcatgcattttgggcatggtgccatgctgacctttcccctttaatgtgtagtgccccatgcttcacttagtattttggcagcctgcacacagaggctagcatttgagcccagtgctttgaagagagcaaaaaagtttcagaatgagaactcttcaagtcactggttatacatagggtattatctcccacgtcaatggagcaatggatgacctgcctggttttttttttaggcctcttcccttttgtctttgcttcaaaaaaaaaattaatagattaaattatttgtcatccaagagaagtaaacaggtcagatcctatgttccatatcatgggattgtaaacgctcatatttccttttgtgaaaattttttctttaagagcagccaagcatgaacatactgcattcactaatattctctgtcatcatgctactgttgattgaaaggagaagaacctacttgcaccccagccaagggtgaggtgtcctggggagtgttcacacttttgtgttatactgttaacaagttcatgtgtaatgtaataataaatcattttacctggaagcgccattcacacatccccactatgaaccccattttgaactggagccatagaaaactgtttttaagcttcttaaaatggttctctgcaacaacgtttcttgtagaatgaggatgcataaacttgttataacatacttgactttccaagtggtccctgtaaacaagggatgcttgaagaactgccaagctaggtagccagagattgggattgaagagctgacattgttctaacactgaatgcaaatggaaatgacctaatacatgtgtaatagtaaagctaataaacgtgtaactgtatagcaattgcaggattaaaataagaagcaaattttggaaagcgcacactttttcttttgggtcatctaccttgctatgaagtgatattttgaataacatttaaatatctaaatatgtgtattgccattaatattgacatcaaagtttcaacacatatctgttttaaaaaatctacaagcccagtttccccagtttctttataactctgatgagcctgctagttctgcctttgcttttttcccaacttggaatctactctggtttccagaattaggtttattgacagtgtttcactgctctctgctggagaagcccaaagccaagccaggcatctaaggctctaatgacttgcaaggaatgcaggtgagatggctcagctgataaactcccggcctctgaaattaaactcaacacaagacttattcatactagtcgaagatcacagtttacaagctatgctgtacaggctagaaatgggtttctcagagagtagtataggtaagatagaaagtgtaatactgcctaagctccaatttcttgcttcgaatgttgtcctttgtaaagatatcctatataatgttgcacagaaactgtgcagtttctcaagtcaattttcatccttccatttttgacacataggtataaacttaattctggtatgtacatctgagacagtaatcaaccattcccctgaaagaaaaaaaataaagacttttttttatttttgagacagtgtctagctctgtcgcccaggcgggagtgcagtggcatgatcacggctcactgctgccttgatttcccaggctctggtggtcctcccttctcagcctcccaagtagctgggactacaggcatgtgccaccataccagctattttttttttttttttggtagtgatggggcttcgccatgttgcccaggctggtctcgaattcctgggctcaagcaatccacccaccttggcccccgcaaagtgctgggattacaggtgtgagccaccatgcctggcaataaagcacttttaactaaaatatatcaaatttgaaacaaactatatataaagtttttttcttctaaacttcatatttagtaagtgcatggccagaaaaaagagaacaagagtatgtaccaagtaagcaaaagtgtgttatgacatttttttcctgaaacttttctaggtaggaataaacattaatttacatcttcatttgcatgaacacaaaactctactataatctagatgctatacttctcaaatttaaaacaaaagtacaaaaacaaaaacagtaaacactttaggtgaatgttgtgttaaatgtctatattgagcgtatatgtacacatatatttatgcatatgtggatgtgtgtttatacatatattctatgtatatatccttgggtgggaacagggtgcaaagatctaagcataacatatctccacagggatttatgttcttttcagtctggtatcttttaacttaaaaacaactcgatgaatagaaatcataaaagccatccttacaacagcattaaagtgctattctattctgcagcattccaagtgaattattgctgtgctgtcaaagaaaacaaaaacatttgagaaggactgtttattttacagtggttgaccaaaagtatgcaagtggttataaaaaaatgtagacagctaacgatgggaggtgccacttgcacattctgaaatccattcacaaacctttgacactaactcttgatcactggagataatattagaagcaaagcatttttcacggggaaaatcctagcactttgaaagcatttcaggtcaaagcaaataaataaaacctctatccctcatcctgtatcactggcatctcctcactcacagaacctaatggcatgattgttttttcccaagaagagcaagaaaactttgcaaaaatatttctctcagaggttatggcaatgaaggatttttgtgccatgaaacacgtgttgccctttgtatttaaagattaaaataaaaactgctgttgacaatgttaatagattctttcattaaacaaatatttcattttagagctatatgggaaattagagacctcaaacacagtccctgtatattaaagataacaaaatgtatacttagggaagataaatgacttgcttaaggtcacacagcaggtagcatggaaggatgagttagaagtactagttcagtgtttgtatttgtatgttttgcctcagaatcagacaatgtacagttaagacctcatcgatatctcccggtaaatgcttatttaatgtttaagaattttcactggtaaagagattcttattccaggagtctaggtcttggggtttaggtttcttttacttaaaaaaaaaattcctctgataagtgaggattcatttaactttctggtggatcattaggtacctttcaagaaatgagaataatcataactggctctatttatcttagcatgggttgaaagatatgaaaagttccttgatatgactggcacgattctatcccataaaaccactcgtaaatatcagttgaaataatgcctgtagggaaaattttcaaatgtcctttctgtcaatgcagaaatgccagtgcagcttgttttctgggtggcatgtaagttgtagacaggcaccacattttagacatattatggtggtgcggtgaattgacaggcagtttaccaccatttccatgtattagattatgtgtacctctggctatcctgacactttgcccccaaagtggagatagtgaaagagaaggagagagggagaagaactcctcgcatctgtgcccctacctcagcagctcctcctccttgtctctgagggtctccagagtttgagagtttggtgtcatgttggcccaagagactgttgtccttttgacagctcggctgtttgtatctccagaatgaaacataatcagatttttttcagatgtagcatctgccttccctccaacatccttgggttaatcacgtgcttgctggccaggatatgtaaataagacttggctaaaaaaaacccttaaaggattatgaagcaatcttgcttaatagtagcagaacaaaacaaaacaaaaaaccactccaacaaatcctcctgtgtgctaccaagtaatggaaagatccagttatgactggaactgtcctggcctgagtattgtcctggacccagagggagcgaaggagggagggagggagggagggagaaagagagagagagaggggagaaatatgagaggaggagagaaattgctgaaggagagcttcactcactgactccgcacacattccctcccagtggttgctaatgaagagcccgtgctggtgaaggaagcctgctgatcccggaactggccttgcgcgcaagtggtgggatgacagacacattcccttccttgaactgcactcttttcccttgcactcagaggtggcccgagagagccccggtaggtcccggagtatgtttccatgctgcagaaggcatggagagattccaattgcgggggttcctccgtagcctttgcagctgaacgtctccatctcctgtccctgggcggtcagtcgctggcatggctctgtggagttttacctcccagttgtctatcaccaaagctgtccaccttgtccggaggggaatgagcgtggaaacccctggcggctgtactgacaaaagcaaccttagtcaatgacagagctgggcaggcggcgaggtcttgcgggctggcctttctgctgctggtaggaggatcatgtgctgctatttcggaggctcctgccagttggcccctgcccaccttttctgttcatactgaagcagccaggaactgagagaaagaggaagcctcggctgtgctccgggctgcgctgccagggttgcgtctgtagcaggtccagcagcaaaaacaaaacagggcagagcccagggaggccccagccacagcagctgagtgtggaaacaaagcagcccgcccgccctgggaagctgccgcaggctgtggaagggaacttctagagaggctgcatcctctccaagccgggaaactgaggcctagaagacatgtgacgtatctgagcagtgaccaagccaggagtagaaatgtctcctgagggcctgtccccactgctgtttggttttaatcgctcagctcttaatagtgtaaccctggacaagtgacttactctccccagcctccatctcatctgtaaaatggggatgagaaaatacctctaagggttgttgtgacaattaaatgagaaagcataaacaaagcacttggcacaatgcctggccacttaatgggccctcagtaaatgttggctagttatgtgaaccagaacttgagatggaagtgaagcagaaacgatagggagttgttcaaaaatacctgatctgctagggaaatattttttaaaacaaggctgcttttcacaaggaggggtaggcacacttgaattaagatcagattgattatatgtttttgttcagctttgatgttgaattgtttaatcaaatggcagactctgccccgcttccaggaagagctcaactccaactaggaggaagcaggtaatgtgagccatggcatcttccccgtttagatttcctgactctttgtttatcttctttgtcaatgtgcgtctgaaccttcccaacagagtttaaaatgttcaacttcaaagctaaattctgatggaaaacacttcctaagaggctgaaggcttactctaggggtgaaagaagaggaaaggcgatggatcacaccacatttgtggaaaatgttaatgctatgtgatcttgcctccttagacccagatagatgcaaaggataaggaactcggtttatagcaacagatactccaaaagtgctttgcatcctgttctgacactaactggttgtgaatcacttgttaaagataaggataacaacaataccatttcttgagcccttactgggtgtctggtattgtgcaaagtactgtctatatattacctcagtttccacaacaaccttatgaaatatttcttccttttgtgatgaggaaagtgagacttagagagaagttaaataacttgttcaagatcactcagctaataaatgctcctatgcacttagtcactgtgctatgtcctgcttaccccttaatgttgaccttaatcctaacttgaatttaggttaatgtctatgcactgcttttttttcacctgcaaatcaagggctgtactaacagttttgctaaggccacttctttgaaaattgtaaatatttccagaaagaggcacagtttacaataaacattcttgctttccaaataaattctcccctattaaaatcaatgtaccagttgttattttcatacctatgcattgtttaagatagagagttcaggacacaattgaaaactgggaaaaataatctcgtggttcggtttgttagtttgagacgcagtctcactctgtcgcccaggctagagtacggtggcccaatctcagctcactgcaacctccaacctcccaggttcaagcaattctcttgcctcagcctcccgggtaactgggattacaggcgcgcaccaccacgcccagctaatttttgtgtttttagtagagatgagattttgccatgttggccaggttggtcttgaactcctgacctcaagtgatccacccacctcggcctcccaaagtgctgggattacaggtgtgagccaccgtatctggctctcatattttttatatacagattgaatatccctaatttgaaaacctgaaatctgaaatcttccaaaatccaaaactttttgagcagttacatgatatttgaatgaactgctcataagaacattttggatttcagatttccagattagagatgctgaagaggtaagtataagacaaatattccaaaatctgaagaaaatcagaaatgcaaaacagttctggtctcaagcatttcagacactcagcctgtatttgcatgctcatggctgttgggaaaaattaacatattcaccaaattgtgcctggtcaattgataatgactgatcaatattaatgcacaagtatatctacttttgctgtcaagggcaaaatttaaactttacttgcactagtctttatctctaaggaaacttgtacatttatgcatgtaatttggtatcctcaaggtaaaaagtccaaatagcattatttactaagtgaaatttctctattaagatttttcatatcctaatggaattatgcttctaaattctcaatatttattagtattgttgaaattttgtgaattagattcatctggattaatatgtactagaatcattacctgtatgaacttggacgcgtttcttaatctatctgggccttagttgcctcagctgcaaattgggaatgaaaatggtatcatcatattataatggttgttgagaatattaaatgagctaattatgtaaagtgcttcaaattgcgcctggcacatagtgctatatgtgttaattaattgtattaatcacttgtgacttccaattgattctattttaattgatattctataatataatttgcttccttcatctctcatgtatacaaattaaatttgtatagaaagtcttctcttctaagaaattttcattcttgtacttcaccctctctttagctctgtagtaagtagtttctgtttatttattccttagaactttatctagagaagcttttgatattaagctgtgacatataacagatgaaattacagtcattgaatttattttctctgaattacagattattttaggtagaatttatcttccttttttttctggtgcccaagtcttagagaaacatgttttcagccctgatcatgataaatagtgggttttttaaatgacatcacgagatacatatttctcagatacaaaggattgttgttatgttcttttggccagaagacactcgtcttcctgggaaatgtagccacaaaatgctgggttttagttttattaatatccttgtagattaaaaacaaaatgttttccctctaagtttttgttcttttccatttggcaaacccggtgatttgccacatgagccaatgtgtgtctcatttgcttattttcttgtgcactagcagccctggtgatagcatctggaatgtgtgcagtccctgggaacaaataacatgttggaaaatggtttacttggtggcagcaggatcgctcatgcacctgacagcacatgccacgtatctcaagccatttgcctttggtaaaagtagttttaagataggctgcctctccccaaatttttgtccaaataataacaacaatgataagaaaagatttttataaccaatgactttgagagtcagattttcaaaattattttaatatttgagctgatgatatcaactatgccatgaaattttgttttgttttgagggaaattactcagttaaatggggaggaacccttagttccgggaactgcccacccctttcctggaaaacacatgaataagccacccccttgtttagcatataatcaagaaataactttaggtatccttagtccagcagcccaagctgctgctctgcctatggagtagccattcttgtattcctttactttcctaataaacttactttcacttacaaaaaaattactaggttaaactgaatcaagaaaaagatcagactttgaaaacttggtttacatatatattatatatgttggtttattttcaccattcttaaaaactgttcattgactaaatgatacacagatttaagaggttaagagactgagtggaatttagaccagactgttcttaagctgctttcaagctcacatttcacttaagggtagggactccctgtcacccttagtccctgtttcctcctcgcggggagcttctttctttttctctcttttttttttttttgagaccgagtctccctctatcgcccaggctggagtgcagtggcgcaatctctgctcactgcaacctctacctcccaggttcaagcgattctcctgcctcagcctcctgagtagctgggactacaggcgtcctccccatgcccggctaatatttgtagttttggtagagatggagtttcaccatattggccaggctggtctcgaactcctgaccatgtgatctgcccgtctcggcctcccaaagtgctgggattacaggcatgagacacaacgcccggcggggagcttcttttgattcatcattcttgcagggaattactgagaaggacgtgagctaaaagacaacacagaggtgttcgaggaaggaggtgtgaatccaaccaggccagaccattgacttccagagaaatttccagacaaagcttctcaacccaccagccaagacccaacccacagcggtcactttcactctatcttatcttgaacatactcttgctttttcaaggcacagtctatagaattccacattttctgttttattcattgccttcctcagtttcccttaataagtaagcaagacttgaactacaggttatgaaattcttgggattaatgactgagctaatttagaaagaaatgcatgttccccatggctcaaaaatatagaaagccaattacctaactcctatctatttgacaatttaaatgatgcgttttctataaagagttcattacacaaacgctgactccccccctcataaaatggatgatattttagtgaggcgtttcaaagacaaaagagtttgatgacttggtttaaggccagttcaatgaaggcaatgaaaaccttatcttggctattctttttcaagctggcattccaatgagtcaccatatggaagaggattaaggaaaatattttatacttaggctaggcacagtgcttcatccctgtaatcccagcactttgggaggctgagatgggtcgatcacctgaggtcaggagttcaaaaccagcctggcaacatggcaaaaccccgtctctactaaaaatatgaaaattagcctggtgtggtggcgtgtaccataatcccagtactttgggaggctgaggccggtggatcacttgaggtcaggagttcgagaccagcctggccaacacagtgaaactccatctctactaaaaatatacaaaaattggctgggcatggtggtgcgagcctgtagtcccagcaactcaggaggctgaggcaggagaatcacttgaacccaggaggcagagattgcagtgagccgagatcacgcctttgcactccatctcaaaaagaaaaaaaatttacagttaggatttgtaaaattttaaaaatcttaaagaacaatagttaaatcttaccttctataattaaaataattaaatattaaggattctttggagttgcgtcattaggagctttacagtaagatatcttactagccaatattagcctgccacaggcaaattaaaaaaaaaaaaaagcaatgacaacaacatttgagtttgttaatctaattgccccttccttgccatcactccaaggcattaatgtgtcttttagatgattgcattaagttttctattagaatttcctctccatctctctcatacacacacactcacacacacagacacacacaaaccccctagccattggtgttcctgaggttatgaatcccctttccatagcggtttgggaacataggatatagtttatgagttagggaggcacaaatatgttcttaaaaggaaaccttcaaaccgactgagtgcagtggcacacacctgtaatcccagcactttaggaggccgaggcgggtggatcacttgaggtcaggagtttgagaccagcctggccaacacggtgaaaccctgtctctactaaaaatataaaagttagccgggcgcagtggtgtgcgcctatgatcccagctactcggaggctgaggcacgagaattgcttgaacccggtaggtggaggttgcagctagccaagatggcgccactgcactccagcctgggcggcagagtgagactcagtcccccccaaaaaaagaaagaaaagaaaagaaaccttagaataaaactacctttgactcatagactcattcatccaataggaatagagtgcccgtggtgtgctctttttttttttttttttttttttttttgagacagagtctcactctgtcgcccaggctggagtgcagtggcgcgatctctgctcactgcaagctccgcctcccgggttcatgccattctcctgcctcagcctcctgagtagctgggactacaggcgcccgccaccacgcccggctaactttttgtatttttagtagagacggggtttcaccgtgttagccaggatggtctcgacctcctgacctcgtgatccgcccgcctcggccttccaaagtgctgggattacaggtgtgagccacggcgcccggccccgtggtgtgctaactcttatgacaatgatgacatagggacccagggaccaccctcccgttagagatgcaccatgctcagcccgtctaacttcgagcctgctctttccaccaataatcagctgccttctgtgtccacactaggaggaaggatatatgcttgatatcttgttttattatactgttgaatttcatcatcaccctactcttacccacaaaaaatacccaaagtcttaaatgtttcttaaaagaaatattagttgtgcccattttaatctcctgaactttatgacccttgtccaatgttcaactagacatttaagatttctttcatttggcttttggtaagactcatttttggaattaatacaggatcactgtttgttctcctcaagtcccagaaaagaaaaagggactttttcctacaaatcaaacttcagcataccacgagctgccagtgttatttgctatttgttccttgtcttttccaacaaagtgaccttagcactgaatcaggaatgcttagatgtagatgtgcacagaggaccctttgtagtaaatatattgtaaatacatatctaataggtaaatatacgtgtatatgtatatatacccacagatttttaaaaagtgaatattctagagagtttccattccaagaatgctcattgaaaacacagtacacaaaaggccaacaaggaataggatagaatattccagctttgcagaatggtgagtgaattgggctttgactttaaagaggtatgtaggtgaggagttgctgacaaacctgtttgaaagtggtttatgtcatgggaaagtacgtatcagggctgttgcgaggattatcttctttctttctcacagcaactcagtgcggtagactctgttatcatcctcatttcactgatgaacaaaccaaggcacaatgaggtaaaggcatctgctgtaggactcaatagctgatgaatgaaagagccaggcagggcagactggcttcagaattgtactgttttgcttcctatttctccctacatcctagccccactcacatggaaatcactctgaaaaattcttctgtcttattccctaaagacagtccagccatcttcctcctaattcttacccacttgtatttcttctataattgctacaaaatggtcctatacaacaacaacatcgtcaactcacagagtagaaaaaaagcaaagaaccttacaaattcctctgggctaattttatcagcaaaacactcagcaaaatgagagttgcccaagtcctgaaaatcattatgccacaaagttagtggttaccaagttcagcccactatttaagtatagtcatttaaataggccactatttaaaacattgtgttatcctcatatactcaactcaatagtacagagaccatgttttatgtctctttgcacgtccagcccttagcacagcacctgaggcatattcctcaacaatttatgcttgttggatgaatgatggactgaataaattaataggtgttagcttttagttttttcaaaatcatgcttacttattcattaatatattcttgtgatttgatcaatgcaaagaagagcaagatcatcatctagcattatcctgaatactatttaatatatttctataacgttgcctaaggtatatatcttttgttttgttgttttggaagctatactacacaattgactcaagcaagctacatataccatgaaaatcagcattgttctccctcacaacccccatgcacacgtactcagctttcagatagacctgaactccatgaaagggaagtccttcttggattaagctgagattgagaggactattttaccgcttcttcagtatattctttttttttttttttgagatggagtctcactctgtcacccaggctgaagtgcaggggcgcgatcttggctcactgcaacctctgcctcccagtacaagcgattctcctgcctcagcctcctgagtagctgggatccctggtgtgcatcaccgtgcccggctttttttgcattttttgtagagacggggtttcactgtgtcaccatgttggccaggctgatctcgaactcctgacctcaagtgatctgcctgcctcggcctcccaaagtgctgggattataggcatgagccatagcgcccagccgacttcttcaatatattcgtatatgtgaattgagccttccatttcttcctttacctcctctttcatccattggaaccagttgactttttaatgtaaagtatagaaactcagccgctctgaccctgttttgattccaaacccttgtacctaccagaccatttaggaagactgggataaataagcattataactccagggagctttctgatttcatgatccatttctgtttcttaggggccagacagtgctaggcttacaggagactcaaaatctgtagttaaccacagcaataaatgaacacaaaggaaatgcagatgtaagtaggggataaactttgagtggttccatcagtagtgattcatgatgttgaactacaataatattttcctccacacactctcccagttcccattgtgacactggagcagcatttagggaagacagttaggcttgggggtgcgttctgtggtcatggctgtggaagattggtcctacggctgttaatctggctgacaaatgtttcatcaacatgcattgttgaaagtgacatgatgcacagtgctggttaagagtcgcgtaaataataaaatgcccaagatgggagaagagcagttttcctggcttctccaagtttgagctgcagaatcagaagcagtagaatagagagagaagagacaggacactagcttgggttccagccccaactctgctgccctgtgctgcgtggctgcagcaagtgacttatctaataactgtgggtctcagtttcctcactcatagtattaatgatcatttctcaggagtattaaataagagcatgagtttaaagagcccagtcccgtgcccagcacaacggaggctaccctccaaaggtcagtccctttttctgtgtgtttcatcctctcttggcagcctgtttgctgcatctctcagctgacttttgtcccttcctgctcacttagtcaattcagagattacagtttgtacaataatgcgctgccttgtcttctcgctggtgaatctggaccggagtgctctgcctctgcgccgacactcactctgatggtcttggctggaggacagaggctgctggcaaaaacctaagagggaacataccgtggtagcagcatgaaagaatttggcaaggaggtgctcgtcacatgattgtgattcatactgtactctcaaaatgtggcaggagggctaggagagacttttaatgccagcacacagagcagagacactcattttcaaacatcacattctttttatagtacaggcatgcctcacagggaaaatattgaacttggcctgccagcaccacgagagtcgtcccaactgtgattttattgcttgagtcactccctgaatcagatactggctgcacggaggaagtcttctattagggatgctttgaaattgtgtttttaattaattaacaccaactctggacaggtttttcatttactcctagctgactcttttttgtcttttctttttttgcctgaaacttgttagacatttttgtaaggtctcagttggatcgcttttaagtatcctggtgaaagagtcatctgtgttgggtgaccaaagcgaggggacccttcaaagtagagtttgtcatctccgagagaatctgatccatgggaatggggtcgtcaggaaaacggtccctaaaagtctggcatagcactttttgatgccttcagccgtcctcaatccattcatcctgttgttaaaacttaaaactagagctggccagctgttgagaaaagtcctcagttttatttcaaccaaatgatgctgcctcctggggctggaagggggctgacttcaagcacaattataaatgtgtagctctttcaagcggcggaaacctacaaaatggccttgattcacagggcccctctggctcaaagactctctgcttcccgtgtgtcataaatctgtatctgcatcaaaaagtgtaaagacggcagtgtatggaagtccctcttcctctgcgagtgtgtctatgacagatttatactgatggctacactgcaccccggtcacaggctcctattatagtcatgccccactgactcagcccccatttcctgtggaaggggagacaaggtcctgcatgaaggagggtgaaattacagctcaactctcgaattgctgttagtacaggaggacctttaagggctgcagcaagacccattttgttcatagcaacatctactgtctcctcaccccagtgtggtcacagctaaaacctaaggcatttagtttcatgacaagatatgccatgacagggtactccagaattcaacaaggccaaatggatacatgcgaaaagaacaaaccacctcatttgttataatttttgtttcttcaaagtggttttctttttcttcctgagggtacaagtttcaaatgtggaaattttttaaggtagcatttgaatccacctctctattagtatttgcaaatggatgcagaacaggactggtttttgaaaccacctccttgttagagatttttcatcctttgcaaacattgtagggtttcagaggtagcggctggtgagaaccctcttgtgtttgactgcagccttcgaggtttagagctgtcctgcatttcagggggtgaatggctactggtaaagaggtcaaaatgagctttattccaagagttaagcaatgaagttgcaaagtttaattggtgtaattttgggagataaggatggaaagggaaggatgttaggatagtttgaatcctctaagaggagaaaaggcaaaactgatatttgactttcccactgtatttagagtatagccttcatggggtagctgtttcttcttgtgtttggtatggctcagagcacttgaaaatgtcactggctgaagaagagtgcttgtgatgatattttttaattcactttttttgtagactttagtactataaagaaatgatacatagaggggagtaaaaacttgtctagctaacaattggtattataatggttttgaatgcacagttctgattaaattttatacatttcttccgttggccaacttatcgtgagcctggttgtatgcctctggtgtttgtatgatattcactgcatttttttctaacgtgttaaggattctattttaaatagaaaatcagattgcagtttgaaaaacttagttttaaaactctaccatctgctagatttgtggaagaggatctggtaaatgaaaattgtgtgtgtatgtgtgtggtttattttataggcactgcatatttctttgatgatctattttccaagctcattcttatcttttagaagatgtttcaaggatttatgcatctggcaagatttcagagaactctatagtggtggagatgtacactccatttatagggaatcctgaatcagggtcattgagagcatttattttgttttgcgcttaaatttatttctgctctggacatttctttcaaatggatcatttttacatggtcaaatctaagcattttattcataagaactctaataataaagctttttcagtccagacataggtggaaatttgcaaaatgcatcaggaaagtatggcaattgcttttcaagccatcttgtatttgagaaagtattgcattcattagtgtttgcaaaactacctttaatggtgcaaaagtaaagctgacctctcccttttggtgcacagatgtataaactttatggaagtacaccccaaggtagagacttattggagtaactcttagaaagggcaaagttggccataaacagtgatgcaataaccccacaattatgtatgctcaattatttggaagggaagtctgggagaagtgttttatatgattacatgggcaaataagaagtgagtgtggagaagcacggtccaaaggtttgcatttgttgtgtatatcccaaatagcaccctaatacagctttataatgtaaatccaccggtaccagtaaaacagcatttaaaacaaattgtaaaatgaacaacatttgcaaagcaataaagaaaccacctttgcaatcactttactacagttttgaaaaatgttagtgaatagctctccaaagatgcaagtaaataatattttattagatttcagcctaggagaaaggggaggaaaaccttcaactagaattacatgattattgctttgctcctccctcaacccagcaaacattaaaatggaacataaagcaagtctataacaagatttatgaggaaaggtattacacttaggggcacattgtgcagaaaagtcattaaaattgtttgggccttaagaaggggaaaaaaaaaaccttttgagaaaaatgagaaactcagatgtatcaaaatgccttccttatgattacctgaggctttaggtttttaaaagcctttgtacctaaaggttctgattcattctctattgtggcaactttttcctaccagacaaaactgaaagattttgtttctctaggaaacatacttaaagaagtatagtagacctggcattccttttgcatgctctggtagaccccggctcttgtataataaaaacaatataggcatgttatatttgccatatgttagttagggggtttcagcaaacaaatacctccttgtgcacagaagtagatgaaagcaaagcttactgatgtctactatgccttaacttaccttctttgtcctacatagtctgcctagcagacttctttctggttggttgtatgcatatttggataatggtgatagctcagcatattctttatgctttgttccgctctgaggacagctagtacactcgattcagtattatatgctttcctatttccttgcctgatgcttctgtgttatgctaaatctcagtttattctgtcagtaaagttgaggagagtgagtgaggagtgcgtttgcatgtgtgtgttttcttatctgtaaagttttaactttggcttactgtttaaccaggaaactcagcaggacaaaggagatctaaataaaactatattcctgttgagaatctccaaggttatgcaatactataaaatggtggtttgagtagaagttctgtagttcatccttatcagactaatggttttggggtttttgaaaaggaatgtttcaaggaggtctttgaaaaccattttcttcaaatgttcattgcatctgagatcccatttttgtccctttatttgctccagaataccgcccaactgccaacaaagaagggcttgtgctcccaggaattttctgcattcctctctggagtaggcatttttctcagctacaaaggccctttggcgaattccctctaatcattggatttgccctgggctctgataggtgccattcatggacttggtctgctgtttgatggggctgaggcattaatgggatcttttcatgataaacaaaactgggtaacattaccagagggatcacaaagctgctgttgtagggggagtgtggtgctttctctctctttctctttctctctctctgctttttccttcttcctcctcttctccctgttctttttatgaacgcacatttgtgtgcgtgtgcagcatggccatttctagaagcagatcttctgacctttgctgctactcgtaagtcaatggccaatggcaaggcctttgttgaacataagatgattctatatactgatctgatctacagtagcttcacagcctgcggggaggtctgtgttttcttaattgattaaacgttggaagaatactgcatgaagaatctgattttgagatctttcttacatgctggcatttaattactgaaagtatctggtagttgagatgaatgagtctgggggaataaatacttaacacaagaattcaacttcatgtggctgctgtggtggtatatccctggctgtgttatcaatgccagactgaatggggtaactcgtcactgttgttgtatcctatttgcttctcaaaagaatgcaaaaatggttagttgaaacctgattcctgcaatagtgaagaagtgaaattagaattattttaggtgatgaacactatttttttaaagtttttatttttgtgggtatgtaggtgtgcatatttgtggtgtatgtgagagattttgatgcgggcatacaatgcttaataatcacatcagggtaaatgaggtattcatcacctcaagcatttatcctttgtgttgcaaacaattcagttacactcttagttattttttaatgtacacttaaattattattgaccatagtcaccctgtggcataacactgtttttttgatgaaaagaaactgacagtacaaactagagaacttgtgatcatattaacggcattatttttaagtttctgagaaaattaaggaaaaagtttcttattttaaatggaaatctctgatgtaatttggaaataaatagtacattaggcatcctgatagaggtaattctacttacttgccatgcattttcttatgttccatctgaatactggggcttaggcaaaaggacaaaaaggagtggtcagggagagcacagagtgagcaagcatgcagagcagcgatttaaaagtcaaaaggaatgttaggttaagggaggatgggtgaaaagcaatgcttattatttgtcctaaagcaagaagaaaggccgggcgtggtggctcacgcctgtaatcccagcactgtgggaggccaaggcaggcagatcacctgaggtcaggtgtttgagaccaccctggccaacgtggtaaaaccctgtctctactaaaattacaaaaattgactgggcatggtggcacgcccctgttgtaatcccagctacttgagaggctgaggcaggagaaatcacttgaacccgggatgtggaggttgcggtgagctgagatcgcgccattgcactccagcctggatgacaagagcaaaactccatctcaaaaaaaaaaaaaaaagttaaatgattcatccatcggaagggatagcacagtgccctcgtgtttccaccagccactgatgctaattcttcattttaattttgccttgacttcctggctaagtgtatgtattttaatatgagtttcagcctccaactaaataacaaacaggacaccaggcttctgtctagccaaggtgtcgtgatgctgtttaacagcccccaaatccctacctcaatacattttaaaatatccaggtgctgtaagtcggatgggaaaaagtttgaggagagaaagtcattaccttcggtagagcagcactttattcattttttttttcaggttttgctttttgattaatgctttttgttatcatctgttcagtataacatattgtaaatcataaactcagggttcagatctttcagagacttttgcaacttgaaaggtggagcttcccagcctcaaggaaatctgcagtggctagtgtttcccacagggccccattacccagtcctggaaaggtgctaacgaggcatctttttttttcccagtgaagaaaacatcatgcattttaaaatatcggtgttatctgatattcacatgtttcaaacatatggttatagtacatattcaacagcccttaagggcttaaatatcctttgtatgtactataatcctggtggtagccactatacaatgagcacctactatgtccagcgcatgattcacattatccttaatcctcctagcctccctgccaaatcatgttacgattattcccattttaaagatgaggaggccgggcgcagtggctcacgcctttaatcccagcactttgggaggccgaggcaggcaggtcacaaggtcaggagatcgagaccatcctggataacacagtgaaactccgtctctactaaaaatacaaaaaattagccgggcgtggtggcgggcgcctgtaatcccagctactcgagaggctgaggcaggagaatggcatgaacccgggaggctgagcttgcagtaagcggagatcgtgccacggcactccagcctgggcaacagagcgagactccgtctcaaaaaaaaaaaaaaaaaaaaaaaaaaaaagatgaggaaactggggcttagggaggttctggtgttaaaagacaatggagtcaatttccaacgatgcctagcaagtggcactgactgtgttcatcctattttgccttctggtcagtttataactcgtgcttccgaacagatgaaaacttaaaagtttagttgaatatccaaatgtttccaaatatccttatatttcatagcttgtagtttatgacacatttgggagcaagtcctttccaatgtttatttattctctatagtacctacatttaacttttttctcccataatgacttccgatcctacttctccctgattcagtattcactccattacttcactggctctcttccttattatctgtcacaggacacacgcactttggaaaaatctgccttgtgatatgataattgcaggatgttttctgaattgcagaaggctggagtagagggggatgagggtttgaatcaagtttatctctggatgagaggaattttggcctgggaaaggaactggaaacgttctgaccagctttccgaatgctggttaaggaaaagcctaactcactctagactgtgctctgcattctagacattttatcatggtctgcacccttcaggatcttatattctgaggaagaaagtgattatttcccaggttgtgttatttttatgaagataattgaagctcttttatctctggatagttttcattttaatttatagatatcccactgcatcttaggaaagctgatatttttagttccaaactactggatcacattttacctgctggcacttttgctacctgagtagtttcctgacacttggggtttttctactattcaagttagacactaaggcaactatgcagggaatttaagcaaataataaaatcaaaagaggagggaaacctttcgtctcaatcatctgaatattttgtacttttaaaatctttacggatagggtaatattttaatacttataacgacttcattattttagattatcttgtatatgtaatttacattactcttctaactgctgtaagcaaattaggtcatgtttactctgtagtcagtgaaaacgatttgttcgaattgaggtctccttggattatttcagtcatagctacatctctattagagagaaaggccactaattatcagcctctctgcattctctaggagggccttaatgcactctaaatttgtacatgaagattttgttaagaaaatactagatcttacatgactaaatggcacgctactattccaaggagcttgtttttagttttacttctcccctggactccttttcagggtgttttcaagcaaggtagaatctgttcctaggtcacagcatagctgaatgccagagagcagaacttaaccagacctaaatcttgaacctggttcaggtagaaaccagacaagtgtcattaagttttcctcttagtagccacagcaagctcacagcagcctctagccaaggaccaagtatatcaaaggagactgaccagcactgtggactgcagtgaatgcatagagcggggtatggagaccacagggacaattttattttttcttgttctctaaaagaccactaggaacaaaatgagcccaatttttgtagtacaagcgctggtaattactgaacactcactcaattcggttaataaagctaaatatacccaaacaggccattgttttgaagggagattttgtggtgtgctggaggcacgttggagccaactgttacatttttagaaagtttgagagctggttgttaaacatagcccttactaaaaattaacatatataaatgtataattaaataaattatgtttaaaaacaggcaatgtgtaaagctcatcatttccaagttattcttctggactttactattatttatgctcttgatgttatttatgtttgttgtatctatgtggagaaatactccacatattatgtgtggtatgccacctcccatttctttccagctctgtgtttagtgatgacacgttggcagctgaaattgaccatggtaggagcatttacaccacagaaattggcaaatgctacaagcaggacttgacaggttgttttgattattaactagactttaaaaaattattgagaacattttaataatgcaggttaaacaataatttcggcagcctttacattataaatagcataaaacatttaaggaaatattctttggatattcaaaaactatcatccggtttaacaaagaagtcactcacattattgatgaatgagtaaacctttgacttcactgtttcactttggttttacttattgatataaagaaaaatatcaaccaatgttcatgttgaaactgcacttatttgttaatgacatgagctgtttctttgctgaaatgaatagtcaccaagcgtttatttgttgtctgattttgtgacactgttgttggtgatagaattacaaaaactgatactgaattttgcaagaaatagcaagtgaaacaaattacaggtgtatggaatttgaaaacagagtattacatattttattatcacttgtcaattatttactaaacattccttaaatcactaattttataatacacttatgaatatgtatatatgcacacattgttttttctcccagagatcctgacgttaaacatttactagataatggaagacaatggatgccttatgacatgaatctataaatcccccacaattttctgttgagtcctatttttagatccttgttattcgaaggacacaagcagaacttttcaaacaaaataaaacacacacacacaaacctaagaaacacgatctccaccaacttaatattctgaagtatgtgaaaacgaagtgttttatgtgagaaccataggaatgtttttcaaatataataaaaatggatggtgttgattaacttactttgtaaagactttccttagtttattctctgagaaacgactatgtagcaaactttgtcctgggctctgcaccaatataaggaggacttggttcctgtttcccaggttgagcttaaatgtttgctgtaatatggatcatcctacttttaagagttttttttttctttccaaataaatagctaaagagccattttcagtttcttaagagaactgacgtgaatttgtgaagaccgttgatcatcttaatttgtcttccatagatagtaataaacaaacaatatcgaacacctgttatgtgctacattctataccaggcacattcctcaaaactaatcttttgaaaatctctgtgagctcaattataatatcttcattttacacaaaaatgagacattatactggtaataaatgatgaagatgagatttgagttcaggtttttctgactcaaaaattctctgtcttttctgaaaaaatgttttaccccaagagcccttgaaaaagaaaacaaccaaaaattatattcctttaaattactggacacacactgagcctggggaaatgctttcatcaagtgtgagaataaaactaagtgacagctggatggccagatccattttctgcaatagatagcagagtctgagaaaacagctgcccagaaatgaggaaatggaacagacagtatgttttggtatctttttacattcagaagaaagtagagaactatattctgatgtcattagtcatctctgatacaaccaaatttttgacctgctgatactacaggatttaattgtgaaactcacggtgtggcctaagataattccaacttcctcactctcctcttgtcccatacaaaatatcaatgtactaattagtacttaccagtactaattcaaaattttatatctaaattttgtagagtgagatagttatataaaccaagtagtagtattagaaagaaaataaagcaagctgaagtaggatctaaaagaagaaagagaatacattattcgtatatattggtctaaatgttgccctagtttgtttgtttgtttgttttggtttgtttgtttttttaaagaaacaagcaccaggatatgagatgtcactgggaataccatttcccttcagctgctttatatttcattgtctcttggtttagaatgtgtttatatacacataaatatattctccaccaaatatacaatttggaactaatggctttgctgattgaaaagactgaaacttgtgtcacttcactaaagcatttcctaaaaacaaatgccataaagttaaatgtatatatggccaatgtatgctagaaaataaagggacatgtaggattttaaatcaattgatttttcagccatcagtttgagtaacataaattgcagactattaggaaactttggagaaatgcataggctcacagtaaaaggatctgagtggggaaaaaattaccttctagggaaagccaaaaagactgtagtcacaagagcagaatgaacatactgagacatcgccggggaggtgggggcagagcaagggtctctggtaaacaggagccactgtgagaaggatccaaggtaaaaggttcgagaaatcacagtgagtatttttttttaggttaaatgttagcaaaatgcttctgacaggcgtgtcaaacactgtatccgtggacctacagaggctgtttgtgttccaagagtagtgcttcttcattctgaggaagaatagggatttgatcacagaatttctgaactcagagttatgccacgtcttttggctttttgattggtgagaagtaaggcttctgtgaataactagcagataacagataacatccatttttgttgctggaatgaaataagacccaacactggcaaatttacattcatgataacggcctagagccacttgatttcctagtggagataaagaggtaatgttttatttgggggaagtggggttatatttgtcagtatatagtagtaaataacaaaaccaaacacatcgcgtagcgatccatgagcagtaatgataatatcttgaatttgtacagtaatttgtaaagcactagttaatcagagagaactttaaatcattagcttcattttccagaggccctgggccagggacgtctgacagatctgttcaacgtcatagaattaactcatgggttgagaggctgggcctagaatctgggcatactgcttccacccagtgtgttccttggctcgttgagtgaccaaagcaccgcagtcacccagtctacctctagattatagactcatcaaacaattgaagctgcagagcaattcatttttaaatgacttctaatatgaagcactacacaattatcagtatgcccttaccacatagaactgggacctatcttgtttttccacagtagaaagcattcagaatcaagacagtgcaagccaccttctccagttccttagcaattgttctttaactgatttttttgctgcaactttacaactaaagaattactgttttataaatgaataaaacaaggtgcaagagaatggttctgatatgcacaactggttgatttgatgattctgaatgatgtgtttattaattgattcaaataattgtttttgacattttgaggattaaatttctggctagtttgatgatactaattacttattttaaaactcttaaacatcctacatatatataactctacagccaagtcagcttttggttaggtaaattatagagtgaaactgtatagagtgaaaatttttttcactttgggaggccgaggtgggcagatcacctgaggtcaggagttcaaaagcagcctggccaacatggtgaaaccccatctctactaaaaatacaaaatttagctgggcatggtggtgggtgcctgtaatcccagctacttgggaggctgaggcacgagaattgcttgaacctgagaggcagaggttgcagtgagtcaagatcgcgccactgcactccagcctggacaacagagcaagactccatctcaaaaaaaaaaaagtttattttaattgcagataaatagaaagtcatttatatcagtctttgaaatgcatgtcctaatttttatttcttagaggtgtggctttctgattattttgggagtaggttataatgaattgactttatcacacacacacacacacacacacataatagaaaataaggataaatactaaaatgggcatttttctgtataattaacaatattgatatagtcagttaaaccaaatgaaattgccgtttttgtaggtaaaaaaattgaatattgtctatttctcatgctttattctgcttaattttgtttacgtgtttatcaagcttcttgtatgggattccattgtattttgaaaccaagctctcttccagaagaaaaagaaaatggaaaaaaaaattaccaatattcaaatattttgattgttcattattacagttttataggttgaggaatagaaagaaaaagcagaagacaaataaaatacctcatgtccaaacctgtgtgtggacactaactccacagcacagacatgtcatcactcaactccacttcttctgagaatagcgacacagtgtgcatgacaatgcctgccctgtatatgcacagtactctttgcacgcttctacttacataaggaatatttttctttaaaaaatactttccttaaaaacacatatattcttaaactaatacattctctttagaaattttagatgactcataaaagctgaaggaataaaataaaattgttgaatcttactactcagaagaaatcagagttaatattttagtgtaaattttttatctatgaagtaaacaattttaaaagctaaatatagagtctcatttagaaaatatgtattataccttgtgtaattttgtattctttacacttcacatgatattgtttcccaagtcattaaatattcttctaagtaaccagattagatcagcaatagttcacttaaaacagcgaacaagctgcattaaaaaccagccagagccttaccaaagagctgatgctatgaataccaatcatagcttagttgctgttccatatgttaatttaatttgacagagtaagagtctttgaagtcctaattctcttttgcatccaataaaccagtttttatagtgcgtgaacttttagacatcagcctgcagctaaactcatgtcgggaagttgccatgaggtcacacataacaatggcttggaggggcgatcctttggaagtcttgtgggagaggtgaggggactgtcaggggtcacttggggggtcagtgcctccgatgatagcatcttatgggcatacagatttgttgccattttatgtgagctcttgaaggttgatttctacagaaatgggtccacagtagcccagcaacattcattaataagtgtgtaggtacatctttgtgtttattcatgggctctgtagctttagaaggaaaaagctaagcacaagtgtcttgctagtatgttgtttcacttcccatacttcagcaagaaggtgactctctagtcttccctatcatcagcatttagaatccgggtggtgagttagttcaactcatagaatactcttggggatatttttgtttgatgctgattagggctggtggtacccactagaagggtagagggggaaagaaacagggcattagagaagaagatcataaagaaaaaggttaaaaataacaaattatgctaaacattaagttctgtagagtaaggattttaagtttttttattattctttgtttagattgtacgttctttgagggcagaaaccatgcttataagatattacaagtctagaagctgatgttattgtctaatagttattctggaggttcaacgtcaaatatagtgtcctaattgctacaaacattaaagatcaagaccctgtggaaatgggtttcttttccaattactgatcacctccagtgtgccaggacctgtgcaaggctagcatttgactccaaaggtgtatgggcattccctgtacctgaaaacgagtgggagccaagcatgtgaactgttaacttcaattaaaaggggttgctgggtgcggtggctcacacctgtaatcccagcactttgggaggccgaggcaggcggatcacgaggtcaggagttcgagaccagcctggccaacatggtgaaaacccatctctactaaaaacaaacaaacaaaaaatacaaaaatgagccaggtgtggtgatgcatgcctgtaatcccagctactcaggaagctgaggcaggagaatagcttgaaccagggaggcagaggttgcagcgaaccaagatcatgccactacactccagcctggacaacagagtgagagattccgtctcaaaaaaaaaaaaaaaaaaaaggtggggggtaaagtgctctgatagtcatatgctgagagttctgggcctctcagcgtttgtgcaaagttaggggatcactcaacaatcaattaactagcataaaagagcaattcagagaggagtctatgcccctctttggagggacctaggaggcctattctttggggagttcttcatcaatgacagcgatttgagaatagggaaccgaaagatagggtggccacttacaaggcacacaagccaacgtttagggaaattggtgattaacaggaaattattggacaagtgcttaatttttcaagtaaggatgtttctaggtaacaatcctgttgtggccgcatggttctgggaagtggtagacatgggattaagcagctgcactggatagtaatgatgtaattgggtttccaacataatttccagtccttctactgcttctgggtggtttcaacgactgtgtgacctaagtttcattttggcagtccatttcagctgtaccattgcttttcaaccattacaaaggtagcttgactctctttttacacttaattactcaaatctttgtcctttaaataaaattgagatatccgtagagtctgccaattaagcatttagaggaaaccacacactctttgtggagaaaagaaggccaaattagacaatcaagtgtaccaagaatttgcctaaatttggtataattttgttgaagattaatttattttcatggtgagttatggtattgcatgaaaagcacactttactttacttgtacctgactgtcaaacagccattacatgcgaagggcagcctgtatacaggctgggtttccccttcctgcttgggaacaggtacggggaactgttggcatgagttgttctccttagctcggcatatctcacacacatattgtagttctattctccagtctgtctgttctactcagtgtgatttcttactcatacattccaacatctctagatttttcctaatctcttcaaagtctcattcagttgtcttccagatatttcccttcacatcctttcttttttttcctttgcctttctctttgttattaccctttctacattttcaaaatgagtttcatatgtctccagttgttgctgggaagtagaattagatggtcctctcttcgttcatccacagccattttagtgcacagtgttaaaattatttgtttatgcatctatttcttccttgaaggaactttcatccttaatgtcttccttggcatctaatggggacttaatagatgcctatgtttttaaccattgtaattttagtaagaacgtttattctgctttcctgatagtcaattcacaaacagacttttgcaacccaactcccatatagactgaggagtttctgcaatgtggtcaactacagcaaaaggctttttttgttacaaaactctaatcttcatctactttggcccgacctgaattccactataattacctttacaacatatatcctaccatcatcttaaaaaggcttacttctgaacacatccgctggcagaagatttgttttgctttcttttctaggaaattgtagcttagcaaactatgagactgtctgactttaatttttcttactttctaactgttgatctaatttttttaaagtaaatagattacctttaatttgcttattatgctcaataatcacacattagcaatgtaataattttaataacagaaagtacatctaaatctctactgtttgtatgtaagtcccatacctgggagccacaatactttcaaaagtgcacatcaaagtaattgttttgtctggcgccagcacaaatttctgctgggaactgccccatttaatataaattatattacctgtggaatttaaaaggatataaggtgtagtgtgccctgcaggcaggaaatttaaactatggattgccttcttttttttttaatctctgatttattcctgtaatgtggaatatttagcatccctaatttccatttaatctttttacaggcatattttgaatttttcagtcatagggaagacaaagttagaaatgctattattctctcaggctaacttgagaatgaaaaatatctaaagctaagggtgaagtgggaaagagatgtcattatctgaaggagtctatttagaaaccaaccaaccaacaaagaaaaaaaagggatgatgaagaaaaacagggaactttgacctaatttaaccaaaaaccatcaagcctcaaacctgatgtctttgcctcttttttgcctatatagatgtgaatgtaggagtagcacatccacgggcatgaatatggagatataacctcatctctgtaaatccattgaacatagttttataccctgcttagaggaccaagatgttacattttaagcctgtaggagtaaacacatgcaaacccagctgttcaggtggagacctctggcttccacattcacaccctcggtgacctatttggctcacgtagtcctctcttaggagatggctgcatgcacatcgtcttggatgttgaatgtacagaatactttcactaggaccagtaaaaagggcaaataaagctaacagcacaaaagaggatatattgaaaagaggtagagaggaaggaaggagagagagcatacactagagaagaaaactagaggagctaaagaccaaagcaatgaagacgaggctcctgtccacctcccctctttgtgttccaggtggttcttacactcatttttactcagccacagctgaaaacatgctcctttctctgcccttagtcaggggaagaggcctctgctcagtctcttaattcagtcattgcctaaccattctcatgaaacaggtccccatcaccaagagcagataccttctccaggtctttttcttttttgttcaataatccaagtattctctcaaagactaatattgcagtcatgaacaatagtcactgctgaccgaggtactgcattaaatcttttatatctcacttaaaaatctttacaccgtactcactcctcacacctaccacatagattctgttgtcccaatgttatagattattgagtaagatgttctgtatctttagccatgaatatgaacgcatgtagttgataattctacataagattttgctgtttttcctttgctcctgcatgcatttctctctgttcggtgtctgtggtccctgagttttcatgacatcttctggtaggaacttggggtactaggtcctcagacactttttacagttttctcctttttttctttttaaaacatcttattagttcttggagtactgtccaactgaaactgaaatgcacatatccatagttttcttttggtttcttatatgtgtccttttgacttataaaaaaaagggggctaaataccctttgttccaagcgttgactgaattcaaaggcgcaaattcaactcaagtttttgaactgtatagaccagttagtagtagcaattagtagtcactgaatgccagtggttaagagaggtggtgtttagcttccttccaccccattctctattcacctttatcctttcagcactagagcccccacagattctgcagcaatgggcaagatctttgagaggaacaatattaagaaataagccttcagatatgcagaggacattttctaagcttaaaagctgatatcgaacaatagaactatttatttcaaaacgacactccatgtatccaactcaattggtatactttgatgacttacattagcatttaaagtacaagcaaattttagaagatgcctctagactcaagtgttggaggtagggagcagctggtctttgttgttagaaaaacagatattcaaagtttgggataacagatgaaccatctctaccacttgactttaaagttagtttttagataagaagatagcttaataatgggctggttgttgagaggatcagccttctaaaaaccttaatatgctttcagtcttccctggaaacaggtgatagggtaattagcatccacatcctctactcaacagagcagcttctctgctggcacattgcttggcaggactccagggaaagctgtgtgatgacagcaagattaagatccaggaagcaaagccgggtcatatgctctaagttgtccattccttctattctcttagcatgttcgattccacaaacacggcttattccaaaagccaatcctcctaatgagcattcggtcattagaattttcatcaataccaaacggaattacatttggggccccttttggtctttcttgtcatacctgagatgatgagatcctttattctctaagtgccccttatgcacacacagaaccagagcatccgtgtagaaataagaacttaccatggtaaatgatcagtattgttgaatctccaagatgtggggttcaccacatttaactgtatgtttattaacaattccattctaaaaattatgttacaagcatggccaaacagaaatgaaactatgatagtggcatctctatactaaaagtctactctctatggatctggccatatctacacttatagataatacgttgtatggaagttctagtgtcagagcttcaggctggtgatccctgatttagatactgtattaactatatctttccactagtctttctgtttatgttctctttacaatccccaaacacccaatagtttgcaacccttaccatacttcacagaatgattcttcaggtaaatgataaatattaaatttttaaatttatgcatattattttggtaagctaatcaaattttttatgttaaagtgaacttgatatatttttatattctgtcatttatttctccattaagtgcacagctttaaaaattttcagtgctgcaaaaataggccaaaaagtgtgacctcatctattttaaatttaaataaatgaatgaatatgcaaatgaaagaaagaatgtcccctgggagcactcttcatggtgggcctcagcaaaataaagaacaaaagcttctagaccttgcttcctgctcctgctctgtctagaacccttctgaaaatcatttcctccaatctgtagagtgtcaggggagtcttagatacttgggtcctttgcattgtcctgttcatgctgaattatcagttttatttagcagttataagtgattcacattgaagttaaaggaacaacctgaggaggtattgttcacagacagccaacactcagaatgtgattgaaagcataggttttgattctggaaagaatcctggatttggaatctattcctggatttaacgtcatgccatagctccatcagctatttactggatgagtccctcttcctctctggcccacagttttcacaagtctaaaatgtggattctcataggatgatcatgccaaatggggcattttagtttctaaaatgagaacgttattcatctatataaatataaagttaaaatagaaactgttttagggttgacaaaaactctcaaagcagtcctttagcacttctgtgcccctgctctgaggcaggaccactcttaaattcttccattcagataaaaaatctctattgtttgaaaacaccttcagaggagatgtggtaggaatttgcttcacaagcacagttacactagacgttattaaaacaaaaaggttttaattaattacttataatcatgagtctcttgttttctgtgtagttctccacacaacagttcttctgttcctccattccttccaccattttgtgctattttttccttctgccattttgtaccattctgcggcagtttgcctctccttccttttctctggtcaactccttcagtggtcttccccattttaaacaaacttcacttctccgcttttctccggggtcagtcatcttgacttctgcacaggaagaagatcccccagtcttcctcagccactgagtccaataagtgcaatccttctggtaaggaaacttgccttcttgttgcagttgaagcccattttctaatcttatttcttcagagcccatttcaaaacagctggttaccatcctttaggttagtccttcctagacagtacttcaaaaacattatatcacttttcagtcatttttatcaagcatgagttatagaacttcctttatccttttctcataaggtgtattattcagccttttaataagcagcagggtgtaattgaaagaatatggactgtgtagttagacctaggtttgaatctgggccgtgttactcactagctgtttgaccccactcagagctcatgacttctctgaacgtaagttccctcatctgtcaggtggggttcatgggacctgtctctcagggtccccatcacagctgatgtgtgtagtgttcctgatgtgtcaccagtgctctaagaagtgttggttacccttgctcttccctttcgttatactctcctctacatcagttcactatttcctggcacttatggagcctagggttgaacacaatgttgagaatttgaaataattgtctttattcatccccctgcaacatgctttttaaaaaatgttttggagaggatgtggagaaacaggaacacttttacactgttggtgggactataaactagttcaaccattgtggaagtcagtgtggcgattcctcagggatctagaactagaaataccatttgacccagccatcccattactggctatatacccaaatgactatgaatcatgctgctataaagacacatgcacacgtatgtttattgcggcattattcacaatagcaaagacttggaaccaacccaaatgtccaacaatgttagactggattaagaaaatgtggcacatatacaccatggaatactatgcagccataaaaaatgatgagttcacgtcctttgtagggacaaggatgaaattggaaatcatcattctcagtaaactatcgcaagaacaaaaaaccaaacaccgcatattctcactcataggtgggaattgaacaatgagatcacatggacacaggaaggggaatatcacactctggggactgttgtggggtggggggaggggggagggatagcattgggagagatacctaatgctagatgacgagttagtgggtgcagcgcaccagcacggcacatgtatacatatgtaactaacctgcacaatgtgcacatgtaccctaaaacttaaagtataattaaaaaaaaatgttttggttgtttgttgttgttattgttgttgtttttgagacggagtcttgtttttgttgctcaggctggagtgcagtggtacaatctcggctcattgcaacctccacctcccaggttcaagcaattctcctgcctcaggctcctgagtagttgggattacaggcacccaccaccacacccagctaatttttgtatttttagtagagacagggtttcaccatgttggccaggctggtctcgaactcctgacctcaggtgagccacccaccttggcctctcaaagtgctgggaatacaggcgtgagccatcgtgcctggtctaaaaaatgtctattagtgttccatcactagatctcttctgaggtattcatgccatatgccccatcctgatgtcatatccacaggacaatctactaccaagaaccagctccaagaagaaaacatctctgggaaacagtaccaaaaggagtcactgaattgtcattggaggagtccaggatagctcttcatgttattttcaccttgaggaattgtccattacatctatgagccttatgtgtggctttctccgatatagaaacctatcaggtgtcttttagatcatttcaaaacactggcttattctttcttatgtttccaactgaagtctgcatcccaagatgtagtttcactgctaccccatatggcacccttgtacgaatttgaaaaaagtactcactctaggcacatgcagagccatgcctgcggggacagcttagagagtagagggtgggctgaactccagttactctcgtacagggatccacctttttgcagaaatcacagtgtggctatggtgtggtttgatttcataaaacagatgcttaaaaagtattcactgtctctgtctcttcagtgccatgtaatatcacatgactttcctttctcattccattggtattttcctgtgtcttttatcctctgtgcagtttgtcagtaacatttcattcccagcttcagatgggctgccatgacttctgccagttccagctatttctttggatgcacctttgaatacctaccttgacttacatttttttgttttgtggagttactctttgggtttaaattttggacatttgggtattaacccaaatagattttgcttaaaatgtccacattctattaacagattcttagtaatagcaaattggcaaaatcaagatagttaattcatattaacgttgcttccccctcttctctaccacgcctctagagatgacttaactgagcatccaaatgacctaacccagggtactggagggaaagggggaatgggtgaccatcagtcttaaataatctacacactaataaccttcctaggaggtgagagtccagtcgttctaagaggagtaccgtgctgtcatccttgccagaaaagaagatccttttatactaggcccacaactttgaacaagtcccccacagaacagtaagggagtgcagtggaccattacattttccagggctcaaccaaattggttctggtgatcaatgaagctgcaagtctgaggcagctggttccatgttcagtaactgataggtattcttacattcatctcaaggaggtagaagaatactttaatataaaaaagtgtgtaaaaagggatgaagattaagaagtggaaaacttgaagataagccagaggcaaaatttcctgacagcatgatgtactggactgcagataggtcttttgatggatatgcttgaaattccattgttacatttatcttgtctgcatttttctgcatttatttctaatgtgtctgctaggccagtacctctctgggaacataatataaaaacaactattaagtaaatagaaaagcttaaacaatacgcatataactccagcttgaagcattttttaatgctttataaatcactagaaaacacgtgacaggaactattcctgatcagtcttaggatgtgcaggatgccccaagaagcttttcctgtttactacttttttgagtgtatgaatatatgttttttgactttgagatagttaatatccagaagagttctttggctatggaaatagccttgaaggcttgggtctgggaaaataatagagagaaagagttactagggcttagtagaagaattgagggaaggatgcagggaaaagcggacaataaatagaaagaggaagctggtgaaggtagactttggcagctggggcagcggcacttgggccgcttatgtgaggtagcccgcagaggcacctttgggtggagagagaataaaatctggttttgacacgtttgttttagatggcaatgaaatgtctagcctatatattttgtagacactgagaaataagggactgaaaagaggaagaggtgtcagggctgaagatggaaatctggggctcatctgagtataggtggtaattgaatccttatggctgcactaagggaataagtagagaaggaaaagatgggctaggagcccctggctgaaccccaggggcactaagtggtaatgcatggagggagggggagaagttaaaagaaggaagaaaaagcagacagaaatatctgaggagtcccagggcctaaggtccctgccactgaggccgtgagaatgttgagaaggcagcacagatccctggaacgggattgccgctaagaagttaagtaagaagccatggtgtttgacagcttccataaaagcaaatgacaaaagctaggactgcagagaggtgaaaccagggcctaatctggatctggtctggattgtttcctccatgctctctagcacagagctttataagacagtgttggtttaacgaatgagggagggaatgagggaatgactgaatcaagcaagtaagcagatatagaaacatgggcgttttcataaagcagagtactcaacagtgcctgtgagcatcactgacaggccaaacacataaaacaggcagaagggagaaaaggaattgagaaaaagaaggacaaggaagagacagaagggggaaggaaagagcagtaagaactgaaaaaggctggagtttcctggagtgtgcagttgtggagccctagatctgtgggtttggcccttactttgctcgtatctctagttgtttctttgacattcatcttgtgtctgtgatgaaactttaagtttcttagtaaagacaagaactactattgtgtatctctttagtacctaatacaattctacaagcatttactttattcttgataacaggtggagagaaagaaagcaggttttcagtaatttataaaagtgaagaattatctagaaatgtagtcagtgaaaacatccagttttgataagtcaaactaaaacatccattcttcactcagagtaggcttttaaacttggattttctaagtaatttactcaaagccctctctctcaaagaccctcttgtgaaatgcccttgtgaagtgcttgtgaaatggccttttgagttagctccacaaaatgtccttcctaatcttagcaaaatgaagaaatgggtcaaaatgatttgaaatatgcttctctgtctcttccttcacctctttttggtttcattttcgtaagagtacctgtcagcatttgcagaagaattaaaggcagtgtcgttctggagggaaatcacatgttcctttaattttgtgatggaaggacttataaagagaagtggagcttggttagaaaggggagatgtgcacataggaaatgtaagcagggctggtgagaaaacttggtggtggcgtttaattaattttgaaactgggaaatagttctacagttaatctgtaagtttttttatgttgaatgcttggaaaatttcaacttttttattttcagacactttgtatgcagtgatgacataaataagaaaaatggccttgaaaacatcaaaaatgtaattttcaccttcttatgctttaaaaacacctgaatgcacttttctcaaacttttaagaaaagaaacaaaactcagattttggtaaagatcaagatgaatggtgttgacaaatttcaggaggctggagagtctgaaaatagtcttatggatgacatctgtatgtaactttttaatgctctaccacagatgctcccataagggcaacagagaaatagctggaaaaggtaacaatgttacttattttattaaatacgtaagaattgtttgcatccatttcctggcagtatttcctatttttaggagtgaggtgaatgatgttgtagagctggagataccagtgggctgactacaattttcaaagcaccttgagatgtaaaaaaatgtttctgtaggagggaaggggtacggttctgataaatctctcagcaggatgaaaaagaaaagggaggtctagacagtcttgtttcatctaatagaattttcccacagaagatgggcaaacatcagataagaacatttatcagacctcacacattttacagccatatccctttgggaacattgcgcagcatagacttgctaagtcctgaaaatggaagacagaaagcactataaaaaatatggactggcgccctgaaaaaccagtctttattactcaccctaacatatacatttggcattttggtgtacttgttaaatgatacataaaaccgtatcactaatgaaaatacagcagtagtccatgagctcttggctcaaaagaaagcaaaagtaaattaagcaaaatatctactttaaaaaaaaaatggtagtagtcccattggacccactttcctattctgctcttgcctgattttcataacagtgggtgaatgcagagatgctttagtagtaagtgcaggtgatgccagggcagatttttgccaatgaaataagaatttaagaaaaatgttaaattcatgtaatgttatttcaaaggctaatccaataattcttaaacatttatgtaaatctgccattttctcactctggaagacagataaagagaaccacgtgagaagatatagcatgttctattacttgccattaaattgataagaattacaatgtctgtgaatccatcaataccactgaaggacatgcagtggaatcaaataggtggcagaatagctatatgaatcacataatataacaaatcttttcaccagatggtgttcagatttgctgtttatttgtggcttatttaatattatcctgcttttcctcaatccacaaaggattcaaagcttcttacaaagaacaccttgggcctcaggcaaccagtttttaatgacgaaagatggactctgaagtccatgacatttagtaatttgtcacttttcttgtgcacaaagttgaattctggctccgggaagctgatgtttgggagaaaatcatttagttgtggatgaagtgagccaatacatagctggtagtcccaatatgacttgtttgtttcctaatttgagtttacatagtaactcttttaaagaaacaaaaccattttttagtggtgggggagttctttgtgaaaatagccgtgaagtgagagatgagtccggggtagaagctggaaaaggagttaacttgcagtctgaggatgtgcacaggaaacgcttgcctctagatagtaatacagtttcaggagagatctccaaacctgagtgaactatttcctggattcttaagtttagagactgtgaatctgggggcttgccaagtcctcaaaaacatcaagggcctactaaaatataatagaaaatctagaataaaaaaagagaaaaagacaaggaacatgtagatttgtttagaatgcgtattttaggtgcaattctcctattaccaactgatatggtttgcctgtgtccccacccaaatgtcaactcgaattgtatctcccagaattcccatgtgttaggggagggactcagcaggaggtaactgaatcatgggggccagtctttcccatgctattctcgtgatagtgaataagtctcacaagatctgatgggtttatcaggggtttccacttttgcttcttcctcattttctcttgccactgccatgtaagaagtgccgttcgcctcccgctatgattctggggcctcccaagccatgtggaactgtaagtccaattaaacctctttttcttcccagtctcaggtatgtctttatcagcagcgtgaaaacagactaactaatacagtaaattggtaccaggagagtggggcattgctgaaaagctacctgaaaatgtggaagcgactttggaactgggcaacaagcagagattggaacagtttgaagggctcacaagaagacaggaaaatgtgggaatgtttggaacttcctagagacttgttgaatagctttgcccaaagtgctgatagtgatatggacaataaaatccaggttgaggtgttctcagatggagatgaggaccttgttgggaactggcacaaaggtgacttttgttatatttttagcaaagagactggtggcattttgccactgccctagagatttgtggaactttgaacttgagagagatgatttagagtatcttgcagaagaaatttctaagcagcaaagcattcaagaggtgacttgggtactgttaaaggcattcagtttttgtttttgtttttgttttttgagacggagtcttgctctgtcacccaggctggagtgcagtggcaggatctcggctcactgcaagctccgcctcccgggttcacgccattctcctgcctcagcctgggactacaggtgcccgtcaccatgcctggctaatttttttatttttagtagagacggggtttcaccatgttagccacgatggtctcgatctcctgacctcatgacccgcccgccttggcctcccaaagtgctgggattacaggcgtgagccactgcgcccggcaggcattaagttttataagggaagcagagcataaaagtttggaagatttgcagcctgactatgtgatagaaaagaaaaaaatctcattttctgaggagaaattcaagccagctgcagaaatttgcataagtagcaaggagcctaatgttaatccccaagaccatgggggaaatgtctccagaccatgtcagagaccttcacggcagcccctcccatcacaggcctggagatccaggagaaaaagtggttttgtgggccaggcccagggtccccatgctgtgtgcagcctacggacttggtgccctgtgtcccagcagctccagctgtggctgcaaggaaccaacgtacagcttgggctgtggctttggcgagtggaaaacccaagccttggcagcttccaagtggtgttgaatctgtgggtgcacggaagtcaagaattgaggtttgccaacctccacctagatttcagaagatgtatgaaaacacctggatgcccaggcagaagtttgctgcaggggaatggctctcgtgaagaacctctggtagggccatggggaagggaaatgtggggttggagcccccacacagagtcccaactgggacactgcctagtggagctgtgagaagagggtcaccatcccccaggccccagaatggtagatctactgacagctttcactatgtgtctggaaaagccacagacactcaacaccagcccatgaaagcagctgggagggaggctgtacccagcaaagccacaggggcggagctgcctaagaccgtaggaaccaacctcttacatcagtatgacctggatgtgagacctggagtcaaaggagatcgctttggagctttaaaatgtgactgccccacaggatttcggacttccatgggccctgtaacccctttattttggccaatttctcccatttggaatggctgtatttacccaatacctgtacccccattgtatctaggaagtaactagcttgcttttaattttacaggctcatacacagaagggacttgccttgtctcagattagactttggactgtgaatttttgggttaatgctgaaatgagctaagactttgggggactgttgggaaggcatgattggttttgaaatgtgtagatatgagatttggaggggccaggggcagtatgatatggtttggctgtgtccccacccaatgtcaactcaaattgtagctcctagaatttccatgtgttgtgagaaggacccaggggagataattgaatcatgggggccggtctttcctgtgctattctcatgatagtgaataagtcttatgagatctgataggtttttcaggagtttccgcttttgcctcttcctcattttctcttgccaccaccatgtaagaagtgtctttcgcctaccaccatgattctgaggcctccccagccatgtggaactgtaagtccaactaaacatttttcttcccagtcttgggtatgtctttatcagcagcatgaaaatggactaatacaccaaccttgggaaacttcattgcctgaccatttccctagtttcttcaattggaaacgaggggaagctgctcatccccaccaattgttgtgccccaaagaagggcagcgtggtcctcctgctaatttagttggtaaacttgggcccaatcaagtaaaaaaaagaagaaaaaaaaatccctatggctattcttaaagaagacccctcaagaaataaaagaacatggttctgggtcctttcccactcccaaaggagagcagctccatttttatgatttatataaaatgatgttctgaagactgggggttaggggagagaatgaggaagtggaatgtttctttgatgaaggaacactcaccacccactaggggcttccctgtgttacattcagactattgtcagttcctgggctttcagggactaagctggtacagtagtgagctccccttgccagctacagcactggaccagtccaacaaaatatattttgaggctgaagatcaaacaacttagtgaataatggaagctcctgtaggctcctgtaccctgtgggaacctagaagagtatggtaggacagcaacataagagccattttctggcttcaaatgggagctctagggctctgattggagatgccagactttatcacccgtaagaaagtcattctcgccgggtgcggcagctcatgcctgtaatcccagcactttgggaggcagaggcgagtggatcacctggggtcgggagctcgagaccagcctgaccgacatggagaaaccccgtctctactaaaaaatacaaaattagctgggtgtggtggcacatgcctgtaatcccagctactcgggggctgaggtaagagaatcgcttgcacctggcggggcggaggttgcagtgagccaagagcacgccattgcactccagcctgggcaacaagagcaaaaccccatctcaaaaaaacaaaacaaaacaaaagaacaaacaaaaaaaccaggaaagtcattctctgacccacccccagcccaccttgggaaggatactatttaatagtgacttaaattcctcttagggtagggaaggtccatcttgtcttggcttattcagggcagtggaagctttacccacttcctactcttcttcatgttattgaagcccagttaaaatgaaccaacttagaatataaaattattttaatatttcttcatctgacttctaatcccattgttctttttgctgtatctgaagatagtcccaacttctcaaatatgttattaatttctgggctgtaaaatgaatatggaagagggactcaaattttgtaaatgctgtggggttacaaatcaccaattgtcctctgcctctgtgttgcctcagcctaccgcaagacctccctacacacacacacacacagacacacacatccctgaagtcactctaaatatcagtaattatgaagttggccaggcacagtggctcacgcctgtaatcccagcactttgggagactgaggcaggtggatggcttgaggtcaagagatcgagaccatcctggccaacatggtgaaaacccatctctactaaaaacgcaaaaattagctgggcgttgtggggcgtgcctgtagtcccacctactcaggaggctgagacaggagaatcacttgaacccaggaggcaccggttgcagtgagccgagatcctgccactgcactccagcctggcagtagagcaagactccgtctccaaaaaaacaaaaaaagtaattgtgaagtctttggcaacttcctgaggccttccaactctctcccagcctttcagaacaggtcttcctattttcttccatccctcttctgccgttctgtcatatttctagagtggggctggcaataaaactatcagagaagagagaaaccatatgttctgaggtaaaatttaacagaataaagaaatttccagcccttgaaaatgcccagaagcttccaagcagaccctccttaaaagtttccatctactgtcttttattaaaccctggtattcctcaaatgtgaaattcctttctgaattgttaaaatatttttataaataaaaaaactcaattaattttgagtagctcaaaagtatcttttctacaatttctaaagtaaagatgctacattttaggttataagtttttgccaccaggtgtgactctaactattcttcatatcttttgttcgctcaaacgtgtcccaaatttgaaaaaaattgacttttggacaatttctaataagcatttgggtggtcctgagcaggaggaacttctagtttgtgaagtagctaaggaaaacatcttaggcaatttttagttccaagaacttagcctgaccaagtaacctgacttgcagcttaggcgtttaattaggagcaatttggacaccagagttccgattctgctcttggtgccatctttttctttggggaagtgttctgcttacagcctatattttgtgaacatcgtttcctgtatatctttgtgtctaatacggcacttcaaacatagtaggcatttggaaattgctccctgaactgaattaaatgcaaggttaattcatggttgtacatgatcagagttggagtaaaaaatgaaataaaatgaaaagcactatcaattaatcaggttaagtcatgtcaagcgatcattaagttttcgatgatcttgcagatctttgagagaatgcggatctcgggcattttcagttgtgtgcactgacacgtgaatgtgtgtgtgccctcacataagttcttacatagcagaaggaaggaagttgtgaaaggggagaaaatagagctattgactgcagagccataaagctgtttttagaatgactgcttctgttgtattggggaacgcttcctttgagagggggtatattatgcatcctctttccattaagtctatttttggaagaaattacagaagataatatattaccagctcccagggatctcttatcaacatagcctctgttctcataacacacctgcttagagcaaaataaattattctgtcctcaggaatgccaaccccagacaatcaaaatcttcactaaatccctgtatttattagggaagctcggatttttgaaaagtgttaactccgcccctaaaagcagtaagcgagagataacaacagtggagtcttgtggttgagcattcaatcagcttcaacaggggcaaagtctaggaattgttttcaaaacagtgtggggcttcctactcagggggaggatttatctgcatttggcaattactccagttaccttggaacaagaaatttacttctcagtagttttgcaaattaagtgtttaacttcgtctctatagaattaatgcctcggaggtggggagagggaggcagaggagaggctttcaaggccagttcacaagtttgacacttaaagtgatagtagcaagtttttctctaactgcaagagtgtgaagttctgtttccacctaattgcagtttgcatcctgcaagtgtattgatttagacattaaaacaacttaaatgtttagcagtaaaaagttgtttaatcattaaaccactaccattttctttcgccctttaaacctgctttcaatcagcaaatgctgatttggatgctggtttacagtctcattaaccatgaagatcacaaaggaaaggttgtggcagcagtgggaagctctgaagcaccctcattgtcacaggaaacattcagtgagacattcagctgtctcacaacacacacagctctgagagaggtttgggtgacagaaatgcagcctccagttccagaagcagcacgctgttcattccaggaaaggaaaaaaaaagtgcttttctgcgtgaccatgttgatcactgttaccatgcagtaatcaggggtctttttgccacttaagtgtaatgggaggagggtatatcattggagactcctaggtgaatggcgtggatgttactcttttgcaaagcaaggaggagttgcagtgtttcatggccttctttcaacacacgggagttttatcactcattttaaacgcacaacttaacaccattttcaaactgagttccagccctggattgtttttttacaaaatggcccctttcccctcatagtgggatggccatgggtgcccattaattgctacacttataggaactgaatttattcccttcatggtagaaaaaccaagcctattttctgaaacttaatcctgtgagctaccatccacggccataccaggctccaggaagggatcacaactttctgaagagatgaattgctgctttaacaaaggctacgtgtgccttttgattccatattctgcctccactagatgtttggttttgctgccaaatataaaaaccacactggaaaagacagttcttcacttttaagtggctgtgtgatagaaaattggtaattagttcagttttgaggaagacagggacaaactcttctttacgttttataaaatcacaaattatcacagtgatctccatttgagatggagaaatggaaacctagcaagttccagagacttgcccaagatcttgtagctaattattagaagcaggaaatgggttagaaaccagaaccctgatttacagctaattgtattttcggctatccaaatatctttactggattaatacaaacttctcttgtcctcaggtaatacaaatacctgtcctcatagaaaataaaggcttattggtctgtctctttctctctgtctctctctctctttgtatctgtgtgtgtgtgtgtgtgtgtatatatattttttatatatgtatgtatatataaaatatgtatgtatatatgtatgtatatacatacatatttctgtcacccaaaatatgtatgtgagtatatatatatatatatgtatgtatgtatatatgtgtatatattatatattttataaagatatatattcaatcatacattgcttaacaataggggtacattctgagaaatgcatctttaggcaatttcattgttgtgttagcatcaaagagtgtatttacacaaacctagatagtacagcctactgcacatctaggctaaatggtgcatcccattgctcctaagctacaaacctgtacagcatgttactgtactgaaactgtaggcaattgtaacacaatagtaagtatttgtgtatcaaaacatatctaaacatagaaaaggtacagtaaaaatacagcataaaagattttaaaatggtacacctgtatagggcacttaccatggatggaaattgccagactggaagttgtggttgctctgggtgagtcagtgagtgagtggtgagtgaatgtgacagcctagaacattactgtacactatgcagactttgtaaacacagtacacttgggctacactaaatttataaaaaatatttttctttcttcaataataaattaaccttagcttactgtaacttttttactttataacctttaaatttttttaacttttttactctttgtaataaaacttcacttaaaacacaaacacattatgtagctgtacagaaatatttttctttatatctttataagcttttctctattttgaaaattttaattttttttaattttcaaactttttggctaacaactaagacatagcacacacatttgcctaggcacacatagggtgtggatgatcaaaatgtcagtaggcaataggaatttttcaactccattataatcttctgggaccaccaccatatatgcagttcattgttgagtgaaacgtcattatgtggtgcatggctgtatttatatccgtataaagattacacatatataaaggatgcaaagacaaagagtacatatatatttatatatgtagtgtactgtatatatgcatgtatgtatgtatgtatgtatgtatcttactttgggatttccttttttctaaccttcttaccattttaagaattggtctatgcacagcaaacttttagaatcgcaattaaaatattcagagaagtggccaagtttttgtataggtgtttggatactgtgcagacaagttctacatttctctgttctcaaaactccttcctacataaatactgaggactgttctctggccaaagtttgtcaaaccatttctctgagtaacaagacttcctcatgttttccatactctatagttcagtgttgcagccttcccatacttgatttttaaagcggagttttgttttgtttgttcttagtgcattatgactataaaatgtaaaaacctttcctctttgaagataaaaggaagtaatcctaattttaaacacttacttgttttaaaaaattgaaaaaaaagtatcgacttgatatgtctaaagagacctatgtatatatgtattagatatttatatacatacatatgtatgtatatatgtaatatatatcatatatatattttagaaatctgcaaatttaaaaagggagtgtttagattgcagaagacctatccctaaaccccgaatcccagaattcttaagctagaagggcacttgagaggtgatctcatctataaagagatgtatatttaaggagctaatttacacaggtagatgacaaaaccttacaccaactcttcaagcacaggaagcaccttacacgaaacactttggtgaatgctcatttctactcaattttaaactaaattcaactgaaaatacctcattttaaagaggatattcagttgactcactggggaaaaacaattggataaactggttgtttgcccttaccgagataaaatcactgataagttgaatgcatttttgtaatgtgtcaagacagatggctttaatagtcacacatattaagtatgggatatgtggcgaggaatagaggtttttatatacagaagtaagaactgtagaggggggaaaccatgaaagatagaaaaagatgagaagaaagaggacagagatgatacactcaagaaaagctgcctatttcagagtagaatatattgtaagccccagtatagttgaatgcttacaagaggagaagcttttagcaactcctttgtttcttaatgtatatattatatctgaacagaatgcttctttcctgtgagctagacagtaggaagtaatctatcttcaaccttgtttggtgtgtaaataaaactttagaaagggtctattgaactttggacaggcaagctccatgagctctccctcactctttgaggcaggttaaagggtacggccatgaccaccaccttaatccttcagggactatttacaaaagattgaaaaatgtgcccagggcccgtacctgcccctctgtggaactagcccaactcaagtgggctggcaggcaagcctggctttcatggggacagaagagagagtttgcggggagcttggcatttttcaacacatgctttttggcttctcctactgaatttgtaatttccatgatatttggtgggaaaatggacaccggcctcttttgctttttgtctgctgctttgcagctattgggattctgcgccttgggataatgaagcaggctgtcatttcctccccctaaataatgcattacaaagtggaaatgcaaatttcctgtgcaagctctaagtagcaggtggtatttccttaatatattgtttttgacctttggggaaattggtattacgagctgactttggaaaattaaaatagcatcaaggtcctacattttaaataaaacaatcgatatcttaatttttaaaatcagactagattacgataccaggaaaagacatacatattttgcttttatgtgttaaagttttgtaattcagggaggacaagaaaagggatatggtgcagctgaactttctaattcactaagacaggaaaaaaggaaggaaaaaatgtatatttttaagtttcaatttaaacctttgctgttaactaaatgctttgatatgatcagtcatacaaagagttaaattaagcatggagctgttcagatggcaaatctgcgttgagctgaaggtaaaagacatctgtatttttcattcatttgctcagcagcactaaatttcaagcttgttttttgttcagcatcaaagaaaaggttgttttatggttattggattttttttaacccacatatttcatgaaagggactcaagtcactgggtctttatattcttttaagttatttttctgcccacagccattctgcaagccatcttgttgaagagggaaaacataatttcattctttttctcttcctttgaagaaaaaaatttaagagatttaaataccattcacattttggaacttccttctttaccccctcccgaaaccatcatctcacaactatgtaaagcaatcaaatgttgaaagacttaagagattttcacacacataaatatcctttatatacttataactgctctacttatcaagggcaacaagaatggaacccaggagctaagtttatagatgtttgtgtgtgtgtgtgtgtgtgtgtgtgtgtgtgtgtgtgtttgtgtgcgtatcaatatatccagatgtgtccaaatgtacacggtatttttagcatacaaattgctgattaggcatctatgtccctttctcctctaaaacctctaagtgcatggatctattagtggatgggcgccagaacgacacagtcaatgcaggactgaaatatttaccaaacccaagaaatgaaggtttgtttgaatagtttaaacttgacaggaggctgagacaagaggatcacttaagcctaggagttcgaggctacaggcagctctatgatcatgcccctgcactccagcctgggcgatagagcaagaccctgtctctcaaaaaaataaaataaatttgagtagtgtaagctatgtaaacttggataatccggttaccttcattctttaatttttccatagcatatatttggcttcaatgtccaggttttcgagcacgagaaatctgcattttcattctaagaagtataaaacaagatagttatacttcatgtaaggttcacattaattgtcattgcacctcttcttcccagaaggaagagggaagtgagagctggagtcaaaactgggtactgtaaatgctcatctaatcttggaatctcaggggatattaattttccagatagttgagttattgccttcaaattttaacttcaaattttgttaatgtggttgtatatgcaaattcagccaatgtgcatgatatgtgtgtctcaaactacatttatgaattcactgtaattttatgtttctcttgataatgtttgattgttaacataagcatcactagacttgtcaagtggcaaagatcatattctttcattctttcttcctttctcatttcttgaatgctggctatatgccaggaactatgtacccaccctggtgcttggtgtatagaaggcactcaatgaatgtatgttgaataaatgaaaaaaataaatgaataaacaagttcaatggatagttaaaaggatagtttcaattctataaaccttaatttgggtgtaggaccagtcacagtaccatgacagatagagctatttggtgataaatagtgtggaatgtatttaccaccaggcagtaatgccctgtccctccttgaatagtactacagatatgagagtgcttttttaaatttttaatcattggccactttctctagaaattggagggaaactgtgcagcaacaggactctctgggcattgtgacaggtctactgtctacaaaatttgtgttcaaggcaaaatctaaagcagccatctttcaaaaggatgtcctcactttataaaaaacaattattgcaatgactatagccaatgaggttgttcttgccactgccattcaaaacatcagtgattttggcatcttgggcacataccacagacaccaacttgttttttctttcccacacctctgtcctatatatgctaagtttattcttgggctgtgacagaggagcattccttatcactttgagaagttcagctaggatatttaggggatgaactgcattcttacgaattctttatcatgattacactcctatctagtataatttgaagataaagtagggcctttggaggtagactagcataggtttgaaatgtttccttcattcattatcagctgccaagagtaacctggggacgattccgtgcttcgtaaacatggtctcttcatatacatgctgatatacaggaaagacctttgcagaactccatgaaagtttgttttttattattgtactaaaaattacatatacctgaccagacacaaaactaagctgtaagttttctttaaacctccttaatattttgtcctttaagcataagcgatgttgcaaagcacccctttaatttatcctgtgtaaacaatcactatagtctgcaaaatagattgcatttcttatgaaatccactttgtaataacattttgtatacagaatgatgcattcagtgaatgaggtaattaatgctaaaggataaaaagattatttaaaaaatttaccaaactataccttgcttcctcagtagctatgcataggtaagtctgttattctgaaattatggttgactgaaagaataaatataaaagatagtgggaggtatccatcaaaaatgtctttatctttttaaacactggtatgcactctataaggagtaagcaacagtgacaatttttccctaatcactaaatgattattaaccatttgtaagaagagttaacctgtccttaatttgtttgaacccatagggccatgaacaaacaccataatagagtgaagaaagcaatgccaacgtagaccaattttatcactaatatagaactgccctgggacagagtatgcccagatatgagttctcagaaaaagccacagaactcttctgtaaactcctatatcaactatatcctaccttctcttctgcctcagcttgcagtagcagaaaaagtttacatgtgtttgtatattcactgaacagtagccctcaaagaatagggaattctcacatcttttcaaaaagagccacttaaagaaaatacattctaagtgctttaattcagatttaaatggctacattgcgagatattattccatataattggagtaattgtgaatttatacagattttcaacagtggcactgtgcaaccattgataaaatacaggggctggggggataaaaccagtattgcctggatccagtgacattttcccatgctcactttttccagttgtgtagcaatgaccatattctctaataacatcagcatacttttatgctttggtctttttccttttcattaggagaatactggaattcatgctgtagaatggttccttttataccccagcccacttgttcaacgacattcctgtgattttactatctaatatgttgtggctataaccagagaatgcaaaatctgtcttcctgagagccttggcctctatgttttctaccaaatcatacctccattttctctataaaggctgttggtacacccacaaatgtcatctgtttgtgatgagcagaactgaggcacttttgttctgatgcttacatttgttcacatgaatagaagttcctcacttgaaagtgatttgcacataggttgaggaactgtgaatgaaatcactcaacctagaggctggcattcttcatgctgctggctgttgatttcttcatcttctccctgaagaccctgcatgagtggtgagtatccataaaggcaccaggagacccagacacctctgtggcagccaagcaggtgttaccctgcaggacttaagagggatcttaagagcaagagaaggaaggagtgacttctctcaccagtggtcagagcagaaggtgcagagcagcaagttgcaggtgctggcagtgatggcttctgaactgaagagcaaccaaaccctcccatgtaaccctgtcaccacagctcaaagggaggttttcttgccccccagtagaagggaactgacagcgcctgtatggctttgcatcctgaagatactgtagttgttgcgtctgttggggaagcatcaagaaaattagattgttccaacattcaagctcttccatattagctttgtgttccatttgatgtcaaacaataggttgaaaaattagcttaattctaagcttatatgtatatagggaattttatcaattattagcaccattataacttgttaaacagtgaacttatagttgaatgtgatctattagatggctgcttaacatttgctcgagaataatctattagtcatctaagcacaaagcagctatttgaaaatttgttgagtaaatgacatctctttgacagaaatatctgcataattgcagtgtgttatacatgctcgttatagcctaactacacgtctgtttgaatttgggtttttctttttttttttctgtctgcataacacacatgcagacatcatagtgtgaatacttactgttatgatcttggagaaaagtgtatctgtcaactctttaacagcctaagcatactaaaggtagtttgtaagcaacacataactttgaacatggaaaaattaagtttgcttttaatgaaattctaattttgtaacttgctgagagttatttttagagagtggtaactgttgaagaaaaagaagctttttttttctttcaaatcctgaaatgtaattggtagtcattaattaaattttataaaatagatgttcctttcaaaagcaatctcaaacaatagtacattttaaagtctggatctctttcccagcagcccagggtgttttgaagataggagaacaagggaagtactttaagctgtaaagtcttgcagggtagcagttaagtgcttaaggcactgcattcttgatgcagcgtcctgttacagtaatattatgaaaaaaagctacagggaattctcatacatgtctaatacatatagctttaatgttcacatggctggacccattcacaaatggaatctgtgggtcagatgtagtttgcaagccactattattaagctgttttccttttactattaagtaatgttgttccttgttaatattatgaatgcgtgtgttctttgctctctctgtaaatcttttgttccattcattttttttttttttggccttacaagaatgtggggggaggatatccctatccacaaatcaagtactttaaatagccaggctagagctgaatgaaggaaatcagtctagataacatctttgtgaaatgtatgcctatgaactctgcgtcacacaatacaaaggaaattgccattgtcctgcacaagttaggtgaacaaagcacataaaaaatcctgttctggttgccatacatattcctgtgcagctgaaactagaattccaaacgccacagaaacggccaggcttaagtgactaacttgcaaatcagagagtgcaggttttacattgataatacagagagacctgtaatcattcatcacagtggtactacatttattgatactgagcactgcaaatcataaacaataaggattacatgaccactgctgctacggtgactactactgccatcaccgccaccctccctagtgctattgaataatgcttattaagttctttcagccagcaactgtgctatgtactttagtgtcattcatcatatttaatcaccccagcaacccaatgaggaatccactttatagaattaaggaaattgaagtttaaattgctaccaggtcacacagcttacgcatacctggtctcatacttgatctcagaggtctttctggccccaaagccctgttcttcccccactatcttgaacttcctttccctgtatgtgaagggaatggaactcaccaggtaccaagatgtcacctcctaacccttacaaagcccagtgagttatttggaggagaatttttcccaaggccaaaaagctgcccgtgtaatactccaaagtaacttccatatcctggaaagagcaactacaatcaaagatagcaccttacaaacatccttcttttatttaaaaaaattaatttttttttaaaagctaccaccaccaacagttcttcccaagatcagagatacctgcacatctggcaataagcccagacataccaaactgtgtattatctagagccagggacttgaataccactgcatctgcagagagacaagcatctcatttcaatagacaacttgttcctagagtgggatactcccctgctgaactgacagggagccggaagagcggcattgaacaaagagaatagttatgactgggcagcagacggccccaagcacaaccccaggttctgctcttcttcaacttaaccaagcagaactgcagttgactcccattaaaagtcagtagacatttagtcggcttccagaatgtgggcagaagctcatgttagttatttactacccatctctggaattccttttggacatgaccaatgagttacagctggtctttaggcagtatggcacactcattaactagctgtcaggaacagctacaccctttggtccacaaatctggatttgccagaggaaaattccaaacagaccaggaaagcaaaaaccactgacaccatctccataataactgtaaaactgaaacatacacgttctacaaagagggctgttcttctacctcctcaggaacaatttgacaaaggcaaacactttatgcactagccctggacaaacaatgcaaagaaaaatcttgtgcagctgatttcagggtcaagagggcgcttcttaccaaccctcaaagacaaaccagcacagagaatagtaaaatgtgcaaagccaaaccagttgctactctctatccattccccaatttcctttgttcacagaaagtgaccctctccatggccctggggtaaatctgatttgttcatggtggtgatgctggtcccattccccttgcaaagcaggtctggcctgttaaaaagggccatgaaatctgcagggactgtcggaagagactctcctgctggaccttgacatttctggaagtgccactatgaatggacactgcaaatggctgtacccattttttgactctgaaggaaatagactgagaataaatgtcaactggaagagcagaaagaaagaatctgaagctccgacatttcttgacctactgaatttaccaactttaaatgtgcatcatctccaggctttttgttatgttaagtaaataatatccttattattaaatcagtttgagttggggttcactgttatacccaaaagcatacagtaggaattatctttggtgggctatttgagactcatcagaattctttatctacagtcttacaaattggttggatttccattacctccttacatacactgatcagcaggaaatacagggagatcaaattatatttaatatgtcttttaaaatacactcattttcttctatccacttttggaactccaaaaaagtaactctctcatgctaacaactcccttattagagaaaagaattgtaggtgtgtaagcattgttttcccatgacaacgtttttttttaattatttatttatttagagacagggtctcactttgtcacccaggctggagtgcagtggcacgattacagctcatggcagcctcgacctccccaggctcaggtgatcctactacctcagcctcctgagtagttgagactactactatcaaatgggtagcatgtaccatcacacccggctgatttttgtacttttttttagagatagagtttgccatgttgcccatgccggcctcgaactcctaggttcaagccatcctctcacctcatcctcccaagcaagtcactgggccccccaaatctaagagtcatgtccaggaatcagcatttctaacaagcactcttttatgagatatatggaaggtatgactcagcgcttgaggaagaagagctacaagaggaagaggacttcttccaggcaatgagaggcttagaaattagttggaaaccttttttgaatatttacttcttccagaagactagaaacatagtagggactgagtgagtcaggtagatggccaatttccctgctttgggaagattctccctgaaattttccattggtgttatgctctgctcaatgtttgtaaacacagcttctctgatactggagcatgaagcagtgtgtcggtagctttgactagtaatgtgtcttaatgtaaatatgtataaatattatatgtacacacacacatgcacacatacaagctttttttttttctttttgagaccgagtctcgctctgtcacccaggctagagcacagtggcgtgatctcggctcactgcaacctccacttcccagagtcaagctattcttttgcctcagcctcctgagcagctgtgaatacaggcacccaccaccacacctggctaatttttgtacttttagtagagatggggtttcaccatgttggccaggctggtcttgaactcctgacctcaggtgatccccctgccttggcctcccaaagtgctgggattataggtgtgagacaccacgcccggccacatacaagctttaaatgaagtcttttaaatgacttcctctgtatttatgtatcataagtaaaaaataatgtcatggatggtaacattctacagaaatgaacacatgcacgggagcaccagccagggaacacagagaccatactggacaagggattaaaggcaagagacgtggagatttcttcagtagaaagccatgtggatgggaaggggagagatgtgattatgtagatgggcctacatcattatgggaaagactcgtatggcatctgtatggggaacaagcatttttattcttctccatattttggtcacagacaataacacataatacatgagattgtaaagtccagaggtacaggaactgtgcctgtatattttctatatcatagataccacagaatttatagctaacatttgtaacataatcaaatattatagcaggtgataaacaagagagaaaaaaaaacaaaaataagtcattaacatttatcacggatattttagccttcatagccttaactgaatttcttttctatagagttttcaagaggaataatagaaataaaagattaaagaaagtatagatagatagatatagctataaataagaatagcaggataggatttctacttttatagaaatctagtgagaaacaagatgctctttatatttctaaaacatcttgaactttttgatgagaaaacttttttcagagcaaagctgttactataaaaatagtattctagtgctgatttgtcctttaaatatattagaaacattcttttgaactaagatcttttaaattgttatattaaaatgcagtttttctccttatttggtcatttttcttcttagtgaaatcatagtccaaggaagctagatttttattatgtttttaaaaacagatgctatttttatagataaaagaggatggttgcctataacactgattttcttcgtaaaaaaaataagaagcacagaatatgctgaataattgcccaaaatacttttctggggcagtgtagaatagtgagaagggaaaaagatgtggagctatacaacctgggtgggtgttatagtttcattatatgctggccttgcaatgttttgcaagtcaattactgtcttttggatttagcttctgcatgcatgaatctgaatggctatacttctgtacatggttgttgtaagggttaaaatcagtcagtgcacttttaaatcacgttacaaactatgtgtcactgttatgtgacacatacaaattatgcattatcatcatatgatcgatatcaacaaaatgaaaactcgtgtcatctcatcttgaaatgaaagaatgtttgattccatgaatgtgatcgtgaagccgagttcagagagacatttctggaatattctatacaatgctaaacaaagataagcagtttttaagttaacggaatgctgaacccagaatcatccattttagggaagttgagctgagtaaggtagttcaagacagttgcctgaagctccacttaggtttgagatggagtagattcggaagacaagacgaatgaagtatttgattttctaaaaaagggaatggagacattttaatttacagcttctgaggaaaggtcatcaatccagagaagaccgtgaaggaaggtccaggaagaaggtatcctctggaaaggccagggtgtcagggccactgtggaagtgtgggcatgtagcagaaagaactcacttcacaactgtttaaaaacgttaaggatataagctaatgttcgggaatagttaatgtttctcggagtgaatattaagcttcctccaagaaaaacaactcaactcctaaagtcagccctaaactagtgccaagaaaatagtgctaaattaggcttctaggagagatatgactcagttaagtatcatagagcactcaacccataaactatccatttgtagtccttgagaacataagagattacaaataaatgtactgactctttccttaaggaaaagaaatgcctaaaatcatgattcagctttttaaattcagtttccatgtgtaactgttatagctgctgggaaatacttgatagtcaaatcattttgtaaaaccatttccaaatgtttagtctaagattgggcaaatgttcttggaaccaaataaattttctgagtattgattctaaatctctttagtcagaatgaaagtactaagaactgttttaaaaatcatatttttctgtaagcttatgggcaagcatacaagaaaagatatacatgttacatgtcaaattgtgtgtatctagttcaagtcctgatccgatttcatataatctctatctgaataattggccaaatgtcaagaagatgcatatcttaaagggactttcaagtatattgccaacgtgattggagtattaacaacaaatttggatattaattcttggtaatctccaatagcatctaatttcatttccattatttcatagatgcctccttttcatctaatattgagcattaattagtctttatttggctggagttaacattagctaaagtttgaacttaggctatagcatctgtgcatacatgtttgatttgtgaaaacccagcagcatggcagttcaaatatttattcattttcctgtgctggctcttaagcacatgtgcatatgcaaagtgacctagctttgtgaatggtcatacacagagaaaaagaaatacatatagaataaataatttgggccttaaaaaatatgtatatatgtgtgtgtgtgtatacatatatatgtatagcgttccttttttgaaaacttgtagcataaggaaataggactgaaacattcattattttctatgaagtaacattaatctcacaattttcactccactttttgactaagggtggatttttcccctaaaatcttagagaatcataaaaaatgagatgaaaagtcaacttctgagactgtgtattcctttaccccacctgtgtgcgactgtttacttcagactgctttatgttcctcagagcacaaccatctcctgtaaaacaaaaatgcctattaaactgctataactcgggagcacaccggagcatccccttaacactaaccatggtttgacaacactatccccaaaccacatcttttgctttctaatttgttaagcttaactgtaatctttaactttccaaagtgaaggcaaagaaattttcttaatgtatttctttgtgatagggaaaaagtgatacttttcttctacttcgtcttcaaatttcttctggaattttttttcagtgaccttatctctactttttcattttccctattataaagaaaatagtcatctcttctttcatacatttatcttttccatatttgatgagcacgcctccccgcacttaagaaaacattgtaggaaaaaaatattaatctaaaattgtacattgtactctaatatctgtttttcatttgtctcccccattagactctaggcttcttgaaagatttcttctttgttttctacacccagttcctgcctgtcatatagttcaaatatcaattagtattcgatgagccaatgaaccacttcatcaggtcagaatccagaaggatacattttgaaactaatcatgacactgtgatttttaaagggcttcccattgatcttttcactccattccaaaggtgtctgaaaggcaccagagggaaggcaaaaactccaaagtatcagccccccagtctgttctcatgagagctgctatggctcattgccacacatacgcagtctgatgttaatcaacactaactagagcagcttgtggctattctcatccttgagcagatgaaacaaggccagcagcagtgagggcactttgctataataatccaataaatacttttgaaatgatgcttacttttgtcttttgcattaaagtctaagcgcaaagccaagtagaatagaaaataaagaacacttcccctcttccacaataccaagcagaaattccagagattttgccaaaactcccccatagatttatcgcttcttaggagactttgtacagagaactacaaaatctcctttgcaccataagggccagatgttactgttgaattgtaaccacccatagctacatgtgtacacacatttcacagtcatctctaaatgcacacaggaggcacaatgaatggaagttaagacctaacctaggctttttctaggttcagagaaaaccctgactagctactcctggtagatggtttctcctctttaccaaagcctcccatcactagggggcaggttcattcccaacttaggaagcactaaaacagaaaagctttcaaccccagaaaagtggtacctagaggtgtgatttgtatagctagctgtagctgagtctcatcctcacaatgttgcatcaacatttgatctgaaataaatccttcaaacttcagatatatcatattcctatctaattatcaaaatacattccttaggtacattaaaactttttgatcacttactattgtagaatacctcaaactgaactcccctatatctgatcaatacctgagttgaccattaattttaaatttaattcaaagtgacagttttcattctagaccttccttggatagccacagagatgtgttatgtacaaattatttcagtcatccagtttcaatgaagaggtagagttcaggtggatttggagtgggtatgagaatctagccagatggccacaaagacagtcctggtgctctggaagaacaaccacagcataagcaagaaactggaacaccacacctggtataggccaatccctcttttcaccacaatctggcagtctttggtaaaataagtgtaaggggaaggatccaggctggagaggagtgagcagaaaaattgagtacaggatctcagaaggtacaaaaagctacgcagaaggtacaaaaatctgttgcctaatacagcctaatgacaagtcacaaaaattaccttactgaattagaaagaccttatcttgattgtatgggattaaaccatatgaaattgctgataattgattggttctgacctacaaaaatgccagttcagctagctcaacctgatagtatgagtcacacggggtgaatgctatgaagacgctctgcctccacctatcctggtgatacaggtctgcaggagggtttgcatctagaaatcagagatttttgttttttaagagtcagagtcttgctatgttgcccatattggaatgcagtgactactcacaggtgcgatcatagcacactgcagcctcgaacttctggactcgagtcctcttgcctcagtctcccaagtagctgggactaaaagcatgtgccaacatgcttagccctaagatttttttttttttacttaacctcccctggagctccagtttttcgttgaggggcctcaggggcatcctgggagggcagagatggattggagtggaggccacgtgaatgagtctcagaaataccattttgtctgctttctgttgtagggttccacataagatctaacataaaaggtgtgggggaggttcttatgctttaaaaaaaaaaaaaatgattcaaagcctccaaagcctgaagttcattttttgaaaagtgacccaaacacaaatcttgacattctggaatattgaagttttaaaactaaatccggagggccatgaacaagtatgtcgatcacataatttcgtgaaaggcaaattcttgataatggtcatcctccttcagccaggtaaatgtcaaattcaaagaaaatatattcaggacagcactgtgaaatttctgaggataagagcatatttcacagcacataaatgaaagtggatctcggtgaatgttctatacagagagaaaggttgtgttttgaacctttaaataactttggacaaagggtgaagaaggatattgttcacaccacaagtcaaaagccactcccatcaatgtgcccaaccacacaagtcgaggctgctgctggccttgatggttcatggccatttggagtgtttgcagagagattggatgattacttgtctagaatttgagctgtgtctacttattcaatattttggaacattttttctataaataaccggtcaattttgtctagaaatcagtgaagtgattaagtaataggtctatgtatttattgaaatgttgtctatatggtagggatatattcatctgtcagttcaggcagataaaactggctacacttgtgtggatacaaacatgatcataaacctcactagttcaatgagctggcttacatctaaaggactcttttggaagttgaaaaacaaatatcttttgcgtaaacatttttaatatgacaccatatttaacttaaaattttaaataacagatgatcctgtgagatgctattttgtgaggtgtgaaaggcccccaaaatgtaactctcattgaggaatttttatagaaattagggtttttacattctttattagtaaatagctagaagatctgtcttatactatattgctatgagaatggaaaacaatctacatgaaaaaagattatgctatggcacagaagtacctattggttgaacaatggtcatatgattttaaaacaaaatcatatgattttaaaacaaagtgggcaaaatcacctactactgcctggcaagaagcaaaggatctaattatattaaaattctgctgcttacattaaacccagagactcatctgcacagacagccatgtgaagggcttctttctttctaaggtcaacttgagaccctttacataataatcatgtttgctttaccatacattgtgcctaatttttttttaaaaattaagtttgtaagctcaattcaagcctctttttatttaatgtttagattagtactaaaatgaactactaatgtctgggtcctttgttagcaaggattttctttcaatacctaccagaaggagtggcttagctgtctgagtatcagctttaaaatacctagacttcctggaaccatagattgtattcttaggagggctgaggaacttcttaattattctgaaataggtggaatggcagaccatttcctacacaagtgtctctctacaaaatcttaaaaatccaaatactctgtggattttaaaaattcagtaactttttttcttccatttggagaaatgttcatttgctgtatgacctcagaaatccaaaaatatgtcctttccttttgcttatcttctacagtttcttagcatgttgtaccctaagctatttgtatatactttaacaatgatatttatttgcttaagcattatactttcaattgtggctgagctagtccattctaagggctagactgcagagaactactcactgaaatccatgtggttagaaagagcccttttaagcttcacgtggtatgttcaactcatggggtctttgaattctcaccacttttttttttttttgaggcagagtcttgctccgtcacccaggcgggagtgcaatggtgtgatcatagcttactgcagccataacctcctaggctcaagcaatcctcccacctcagtctcccgagtagctgggagtacaggcatgcgccactatacctggctaattatttttaatagagatgaagtcttgctaggttgcccaagctggtctcgaactcgtgagctcaaacaatcctctcaaagtgctgagattaccggcatgagccaccacacccggccacagtttcgttttaacatctgttaatccaaaaaatttcttcaaagtcctttggtgattttgtcaatgctgctattgatgttttgttctgggaggaagctctctttcaccccattgtattttagaagtttcaatgcaaccatggaatgaggattttcattacaagctttttgaaaggtgcaatagtctcaacataatgaactcaaaatctcagtgcattgaagggtttgcatgccaagttgaccaagtgcctaaactgtataaactccctatgtgcacacttagaattggatcatcagatttgtctaaacaacttgaaaggctttgctatctgttcactgaacagtcattatgatgtacacacctttaagagggactcagcccctccacaactgataatgaaggaagaatctccaagtgaggtgaggcagctggactttgcaggtctgactcttgtcccctgcgattcacttttcatcagcaacctggaggaatcagaactaggccctgctgaacaatctggagatgaaaatcaaagccgggaagtacagcttctcctggattggatctcgatttgacttttttcttttttctttttttcaaggaacagactgggtttcttcagagcattatatcagggattaagagaatcagtagactcgggttgttttggttttagaaaaagatctcagacgattatttaaattccctatgccttggtttccctgtgagaaaatgaaaacagtaaggcctggaccctcccagtaacaaaggggcagatgttaaaaatataaaggattctagctttcatataggaaatgcatgtgcaaaatattactcatttattaaggtgcatgaaaatttactgttaacaacacagaagactaatatgtatcattgatgttattcaggtcttataaaactctagtggccagtcgtgtttttaatgccaagaaccccgaggagcaactggtttctaagaatcaacacttagttctgagccgagagatgccccaaggaagataagagacttacagtttgtttggcgtccaaaaagctttccagacagcagtttgtttcctttccctttttatgaatggtggtagtattatgcttcagtctgcgttttctaccaaagccattcataaaaataaaaacaaaacaaaataacaacaacaaaaactttctcggcacagtctggagccattgggtgccagaggctgggaaaacatcctggcagccataaccccaaccaacattgaaagtattcaagggtctgtttgtttggtggtctgaaaagtatgaagtgctgtgtctgagggtagctggtagaagttccgtgacacggactaggccgggagccagggctggcagagattcagacattgtctttcccctcattgaagtgtcaggacctaattcatggaaaattgggtgagctggcagctctttcagaggatttcattgagctgcagtgtgcaggagtcacatgaatgcgggagcctctgccaaaaaaggagggggatttctgagcagtaggaaccagtcagcctgcaagaatgtatgtggatttgaaacggtttgggagtaaacatgtgtacaggtgtaatcaacagggaaaaatgggaggaagatgagtgctctcttcttccaaatgaccctttggaaatgaatcctctattagcccacgcttttgtgtcctaagaggcaagaagtcctcatcgttcttggttcgattttccctggagaaaacatcatctcaaaacttgggcttttgtgatgacgtcatctttactgtgatttaaagtcaaatggaagaacgtcttttcctttgagcaaaagtaccttgccatttattttatttttattctgtccatctaaaaaaaaaaagctctaatgatttttatatggaatttttaatgtaccagcaataaaccactgtaccactgagaggaactctgagaggaaggggctctcagaatgaatgaacaggggctagtgaatagtgaacgtatcctaagtgctgttatttgggagaactggtgcaagaaagcatgtcgctatccacatcagagtacctcaggtgtactcacaaatctcagcgatgtgtagatagaataatacatgcctatattcagacatgagagtgaggactggaagcaaataatccatcgaaaagctcaggcttcaaatccatcttttataatgccaaagaaataagaagtattctctaatactcgattggaaagttaggcaggcagaaaaacattccctcggatgtttcactcaaaagaggagagttttgctctacacatacaatagatacagatataacacaatataacacaatattcttcccatgataccacgaagaaactgaacaaactcacagaattatttgcaaatcataagggacttgaatgcaaaacattaaaagaactcttacaactttgttatgaagagatagcaaattttttttaaatgggcaaaggatttaaataaacatttcttcccaggagacatataaatggccaataagcacatgaaaagatgctcaacatcattagttgtgagagaagttcaaattgaaacagcaatgatgtttaacttcacatccacttggatgtctacaagcaaaaagacaggcaataacaagcattggcatgtatacggagcaattggaactccagattcattgctggtgggacggactgcaaaatggtacagctgctttagaaagctgtctggcagctcctcaaaaagtgaaacaaagaattacaatatgaaccagcgattccactcccaggtacatacccaagaatgaaaacatgttcgcacgaaaacgtgtatataaatgttcatagtagcattattcataatagccaaagggtggaaacaccccagatgtccaccaactaatgaatggataggtaaaatgtggtatacccatacaagggaaaattatttagcatgaaaaggaatgaactgctgatgctaccacatggatgaccctagaaaaccctaggccagtgaaagaagccacacacaaaagactctacatatatagtatgattccacttacatgaaatgtcaggataggtaaattcatagagacagaaagtagattcatggtcacttaggcatgggaggtggctagggacgtggagggtagtggggagtaaccactaatgggtacaagatttcttttagaggagatgaaagtgttctaaattagactgtggtgatggttgcacaaccctctgaatatactaaaatatactttaaatgagtgaattatgtggtatgtaaattatgtctcagtgaaggtgttttaaaaaaataaaatattaacaaattaggtaccttcactcctcagttttgtgatatataggctaaaaacaaagtgaatcaaacagttaagtttctttcaagctagttggcttgtatgccagaatttaattgggaattggaattgttttcactgagataacctatgttgtatttccttaatatagagagatcatgaatagacatttttgttttttttgagatagggtgttgctctgtcacccaggctggagtgcagtggcatgatcacggctcactgcagccttgacctttcttggcccaggtgatccttccatttaggcctctgagtagctgggactacagttgcaacgccaccacaccctgttaatttttgtatgtttgtagagagagggtttcaccatgttgcccagcctggtctacaactcctgggctcaagccatccgtccgcctctgcctcccaaagcgctgggattataagcgtgagccaccatgcctggccaagtataaacacttttaacattggatataccagttgaactttatactttcctctttcctttgcagacaagtatctgtatttaaaatatgtacacctaattttttctataatgtatattttcttttaaaatatatctttttcttttcctccttagccacaacaagttgttcagaagaagcctgctcaggtaagacatagtcattaatttttttctcccaattaatataaaaagtgaaatatgtactgaaaaatgtccccaaactaaaccttatttcgcattttcttacttttggttatcgtcctgcagtattcctgaaaatgtgttgtagccttcaaagttaggaatatatagtctgcaatcgtaccatgaaaacctcccaaaatgtaaggtcttaagtgtacaaagcaaatataaattcttttaaaaataaaactattttattacattgcctcatatgtaaaacaaatatttaatcttatcctatattttaccaattcttaaacatcaaattttgtccttccaactgactgtctatattctgttgacaccagacttatatttaatgattcatgactggaaacatatttcttcattgaacaatttcataatatttgatgatcccaaaacactccaaagaatgctagaatacttggaaattaagttatactaacgtgcagactgatgcattcttagatcttatttaaataactgaatcacagtctctgaagtttttggcaacatcaaattggaaaatagctctacgtctcttgccccatattcctggagcaccttgtcctcactataatctgtacatagaaacattaaaaaaacatatttattgaggaagcatatcttgaagaaaacaaaactgaagtataaattaaccaggattgctaataatgtgagccagtattaaagtataagaacgtcctgctgttctcttcccttctgtatgtaaatagtcattggagatccaggtggtatcatgctgaacctgctaaaataagtagtaagcagtgtcatgagctatcaaattaagtagaactctttcatgtaattttaagtatccatgaaatttttttccctagaagtctttacaaatctaccttgcatcctgttttcttaggtcaatgttgccttgcctgggaaggaccacccgggcaatcttatatatctactgttctctaaaaatgccacttagaagagaattgaaacttccaaacacatgaaaggatccaaggaaagtgtcttcaaacaattacatatgagctttaagtggaataaaaacagagttaccatgaaaaaaatcattttcattgctgctcccatacctaaaagctaagagtgggagaggggtgctaaaaaaaacccagtgtttgtgcgtctttaagcaatatttaaaaatatatacatataaacaaaaacttgacattttcattaggagaacccaaatatatttagcctctcatcctttaactgtacaaaaatcaagagaaagtaaattgataattctgtgcatttgagtcaaaggatgaggcagagttcacatttgcatcacaggctgtgaactatagattaatcactttatgtggtttgttaatattgattcagcccttgtgcttagtgtcatagggaagatgagtcaaacaaagaaaaacagtcactgcatctgagaaatgtatttatatgtatatgcctgtgtcctatccagtggtatgctggaaccagcccttgtgagcaaatagtgaacatctcttctgaattctgtgttcagtgatgtcaagtaggtagcttgaaatccactatggtgggagtatttacaccatggaaagtgacaaatactacaaatcaggacttttttttttcctgaggagcaagtagttaaacatttacctccccagcatggccccacccttcagcgattctgtttatttggtctggagatccatcatattttttatgaactccctaagtgagtttaatatgcaactagagatgaagacactccatgaaaacacatgagaagatgtctgaacatttgttgagcaaatgaccacagaatgtcaatgtgtatgggacacacgggggatacagatgaatgagtggaatgcctcaggttatcaaggggatgataagactggaattttcttgttttgtttgattttgttgttgttgagttgcagaagggaaaactgaaacataaattaagggaaagaaattacagatgagatgaatggcatatagaaaggtagagaggcaagaacaaatacatcataggtggagattattaatatggctagaactgattgcaagttggacattaatacatcaagaaataatataagtgaaatcacagttgtttttcccaagagaattcagaatctcaaagaagccacaagtggattgagttgatcttcaaggatcaatctggctatcttacagaccctgttccagatttgccctttataggagagttcagactcagaattataaaaaagaacatgagctcattgggctacctaatttatattgtgtaatgacacagtgatgaattatataaacatgaaaactacgtgaaagttcgtggaggataatgtaaattttacactacattcaaaagaatctcttccttttccatctgtttctttcaaaataccctcccagatggctttcccatgaggcaatctggattaactcagcctcatatccttccttcaacagcactttgaggggttacattcagaatcgcttttgaggtggtaaaaattttagcacaactaaatattttacatctaaagaaaagggctcagcagtgtgtaaacagacctacgtttttctttctggccccatcactgggctaattaatttctctttgctctatttatccatctaggaaatgggataataataatgccttttcccttactcccaagaacattacaagagatgcataattatataaattccaggtagcattattacattctgacttatttttgactgttaagtttttcatttccagagatttatagtctcaaaaattctagaatcctgatttattccaaagtacttcctctttgacgtcaagtgttttcattgaatgttttttaaggcaggaattttttagctggaggaaattttctagtaattgctccatcctactgttagggctaaagcattcagaatcatcttcctagcatttatgtcacacgtatacagaattacaaaggctctgtggtgaagtatcctcatactgcccaatgctgaagtctcctcagaacttcaagaatggcccttgttgaacctggggtacaaagcagcagagtttattctgaggagacaaattcagaattatgataaatctcagcacctgcatacgcacttgtgtttgtgtatacaagtacatgcatctagagagaaatgaaaagtgaaggaccaccctgttgcaggggtttgtgtttgcgaaatccaccaggtgtcatcagctgcaaacatcaagtgtgtcccataatcctaatgggagagttaatagtctcttaaaaatctaaaggggaaaatctgtaatatgtacgttaacttttttctaaaattccaaaaccaatgaaaacagcttacaaaataactctactatatttccacttcaagtgataaacaataaattgaaatcagctaattacaaataaatagaaatgaggctgggtgcagtggctcacacctgtaatcccaacactttgggaggtcaggagttcgagaccagcctggccaacatggtgaagccccatctctactaaatacacaaaaattagccgggcgtggcggcggccatctataatcccagctactcgggaggctgaggcaggagaatcacttgaacctggttggcgggggagggttgccgtgagcagagattgtgccactgcaccccagcctgggtgacagcgagactccatctcaaaagaaagaaagaaagaaatagaaagcagctcgttttttagcaatttgagcagttgaattctcagtcatatgaattacattcttcagtaggaaatggtggtaggtttttctttttctttttttaaaaaaagaaacaccataaaagtaccagattattattattattagagggtgctttgttactcaagtttttactttgataaaaataagtgtctctccaactgagatgtctaaaaaagtttcgctagtttatcaggtatttgatcgtttattgctatttcccttttaaggctttaatctgagacttgaagggactccctaaatgtaattcagacatttttctctcacctttcttctacccaaagggaaaacaggtttttaaaatcctaacagctctccaccctttcaatccactttccccattgttgtacagccctggcaaacgatgcctctggcaattaggacaggtataaacctgctccttttcaatttcccaatgagagaattgcaaagttttcagtttctaaaagactggaaacaaagctttctgtttcaaaaaaagagtttttacttgcaagtaacatcttctgtgggtggtgtgcacccgggcaaagaaatctcagtaagccttgattatcacgggatttcttccccctcaaaataaaatgttgaatgtttttacagagacttcaagggcagttttaaggatgtttatatttcagacaacctaaacattgtttggagcaaaatgagagatttcattttgggacaagcaagttgatgaattgcagtcagcatctcgttctcaaagaaggcatttttactgggggcttttagtctagacatacaaagagggaaggaggaaaggggaaagcattctcactctaacactcgtcttttacatggtaccttggccagtgcagtaaatagttcataataaatcagacttacaaatactcactcgtctactcactcaaggagcataatgatttatactgcctaagtcacaaagattaccgatgtatttattttcttgcttatgcactttcaagctagtaaaacatcttgtgggccagtaaatgtttagtaccaactggcaaaacatgaagaatcatatcaaaggttgccctaagttgcacggttttgttgtataggaaatactttttgacttaacctctgacctctgacatcaccaaggtcaagggaaaaggagagagcaaagtagaaaccaaggtttaacccttaataaagtagctcaaggacatagaagcacagggaaattggagggcagaggaagcgtatcaaaatgattattaactgtaaacagatgaagtaattagcttagctaacagttgtaatacaggaatattggcaggatgaagtcagcggttcttggcaggaaatgttttatagagatgacaacttctaacagaagtgaaagaacatcaatcaatttagggcaacttataaaactccaaaaagcaaaatttagtgtttctggacttgacaaatttgctgtgagagttttttttttaagtatgactgtttctgtgtggggaagtctgtggattaggctcaaaacaaaatggcagtggctgcctgcatttcctcttcatattgcagaattttcctctacattttgatgtgtactggataaaaaccaattgtttactcaatatataatctttcttcttactctccaaacttgctgacccaaattaatgtggaacaaatagcaactggctttaaaacctggtctttctaagaaaatccttaatggttgcatagaaatatgttgcattgcctcagacacttacattcaggaaatgtttgctggacactcagatgtctacagagaaattgttaacttactgttattgatatttttataatcttactcaaaagtcataactcaggataatgaaaaatgtttggtgcaataatgattaaaatccacaaatattctgttccctggccgcaaatacaacacctatgcaaaattttacacatctacaaaacaaagggaaaaggtttttcctagtctatgccattaataagcacatctggaatataacccttaagcagtctttaatcataatttaaagctactttgcataaaaataagaacattccacaacagctgtggaaacattgaaataaattttcttcttctgggccgggcacggtggctcatgcctgttatcccagcactttgggaggcccaggcagaagtattccttgagcccaggagtttgagaccagcctgagcaacatagtgagaccccatctctatttaaaaaaaaaaaaaattaccttcttttgaatactttgtttatgcaaaaatccttttgctttctttagctatttttttaaatgcagtgttcctgcagtaagaattgaacctggcatggaaaactgatcaaaccggtagtcctcagaaatcatcactcctgaaacttgcaattagtttatacctaaaatgatttccctatttgaaaaatgtgcctaccatttccagattttaaaaaaatggccctttatcccagaaaggagaaattcattgtatcccagagaccagcattacttctgttgcagtattttcagtgatggaactctgttgaggctacagacaagaaaagcaggagagcattttaggaatctaagattttttattttactttcctctggggaccttctttaatagtttttttctttcttaagaacctatccttgaatcataggtaaagaaataatcacagaatgagtaactgacattaataatcacagcttcacactatagtcttactggatttttacgtttttcagggtttccccaagtggtggtcacatttcttacacaactctgcagtgtagatagacatgtatagtcattactgggctgacacggtgggactgagacctgctagtgccgtggttggcatctatgattagtgaggtccaagatcaaccttctttacattaaacatgccctagcaagaccttcaacccaactttattaagctgatgctaacgcacacaaagaagtcctaacaattctatgtttttatatacataatgcaaaaataaagacaagatcaggtacaattgctgtcaatatctcaacttattgtctccttttgaaaaacataattcccgcctagcatttccaccagaatcccttgctcttgccaggttatattgtttatatatgttccatttaacatgttttttaaaaatctgctgtagagttttcctagttggaggaaataatcactttccattaagttaaacagtcccgataaattttaaatgaaaatatctgacagagaaatagaaaaactcagccttgtggtcttgccggtcacttagctacagatggaacttgaaaaactggttcctggtcattgctgctgaagagagccctttatttctgttgtgacaggactgactcaagatactcatgaacgtggaaaactcctaaatgtgtcattctgagttcctgagaagttgaacatacacagatgacaaaaaagaatgccatttagccataactaccctttctagattaccaagtatttgtaggtttattggcaagatagcttaaattacgtatgtatttctggcctgcaacatcatgtaatagaagagttgcagaattctttgcagttaagaaaaaaaaaaaaagataaggacttattaaagctgacatggactgtgatttttgcactccgtaccacacacaaaggagggcatcgtggtgacaccacccctgtgtttgtatttcttggttccatttagaattcactggcctcttctactgcagacctgctgtttagtctgcatctggaaattaaacccagagcttcagctcttagcattaaatattgaactttcttccagcacacaccctcatccatgcctgtatagtaagtctgattaaactcaagacattttaaaattccatcagccttaggagttaagtttggatattgggctgtcttcctcctcctttttaatctattagaagaagtgtacccaaaggtatatataccacatgcatcatgttgaaccaaattaaaagaacagtgatatgtgcaaactatatttctgggttttagtggagtttttttccaaacttagctaaaacaatgagttacatttatcaaattccttttttcatgaacaaaagaaaaactaaggcaaagtaagtgcacttttccagtagttataataaaaatatagttttccaactctgcccacccctgttccccactcatcagttttctgccaagaaacctcacatgtttcggcccggtacctcacttgtctttgtaaagtagctgcatgatggctgggagcttttcggtgtttagaggccttagtggctggtgctcataaaaatgtcaccgtgcacttgcactttgaaaagtcctttcatctgaacattcctgaagccccattccaacaggtaagccttcttgaccaaagagtggctgtttagccttcccaccctgccactagaccctaatgagatgtgtgcaactcttggctacagttttcatctccttattacttcaaggctcctcttgggagctacacaagctcaaaggtcctttgaccattaggtgacaaatgagaagcaattttttaaaaacatgtcaaggtaaaagctattgtctataacacacggccatgtctttttttctttttttttctttttatttgagacggagtcttgctctgtcgcccaggctggagtgcagtggcaccatctcggctcactgcaagctctgcttcctgggttcacagcattctcctgccgcagcctcccaagtagctgggacttcaggtgcccgccaccacgcctggctaattttttgtatttttagtagagatggggtttcaccgtgttagccaggatggtctcgatctcctgacctcgtgatccgcctgcctaggcctcccaaagtgctgggattacaggcgtaagccaccatacctggccccatccatgtcttttaagttattaaagatgatcgaagctcaggggtccctaccaactcctcagttacagaaacaggactctttggggatgtcggagccagctgcttattctccatgtcacctgtttctgttccctctttgcaccacagaagcaccctgtgttaagtctggccgaaccatgacacttaggagagctgagaatgggttttccaacctcattcctgacagggaggatttttcttctcttcattgaatgcacacttgtcgtacagaatccgcacatgtaaccaaagaccaagtcactgggaaggtgagagctgaggtttgcagaggtgggaaaagccacctgccccaccacatcaaccctttgggaaccattccttcctttgaagggtggccagccagggctatgccaagaagagagagctctccactaactagacatttgagaaaaccatcattctgagcatgtgagagccacattgcctccaaacctttaatgaagtgagacttccaccctctgacatcctagtcatgttcccagtactaactgatagttactagtagaattctaaggtcagcagaaagatacattaataaaacaactatccacattgtcttatccacattgtcttaaggacagttaaggaaacaatatgacctaccaccattttcatctgaattgtgtctaaagggttggaattcaggagtttcagcagctcacatcaagcaaagtttctgggaatgttttgaaaagctgatcacattccatctagtacaaggtctttgttaagttcatggcctgaaaattctgtttccttccggatttgaaagtaccttggtttccggatagtatagaaaaatcaaacagttagaaattgaataattacagcacaatccaggaggtttgccagcttgactgagttctatcaattttttaaccgtaagaaggaataaaatatacttgctggcttttatgccgtggtctgtttcagagtagtcacctaagtccacacctcatgtcagaatgagaagtgaatcatctggggacaaacgaggtgtgtatctgcctaacagcttagtgactttctggaatttaaatattaagtgaaaggacagggtcacagggcagctgatctttggctcgtctctctttcgtctgcccatggctttgatcatgctacatcctcctttgtggccagggctccacagagaatctcagggtcatggcctgttgcctagtcaagaggtataaacctgctgcttaaatatgtgaagcccacagtttgggggttgggagttaaaggggaggtagcctcatacgttccacttttcccacaaaacccaaagcagactaaacaaaaccggtgtgaaatctcatgacttgatgctgccgtggttatatttttcaagctgtaatccattcatttgtatgtgtgtttattcccaggatttacagctcgctcagtcttcggggggaaagagaatatttgaaaccttttgcaaagggtttgaagtatgcagtggcctgtgattaaagcccaggatagagtgtgtgtgtgtgtgtgtgtatgtgtgtgtgtgtgcattcatgtgaatgtgtgagtgcccattcttgtggggtttttttctcccatttgctgcttttacgcaaaagcatcacacatggtagcatttaggagccccttcacagctgaagtgtttcaaacactaatgaatggaagtttggtcatataatgcagacaagctttaaggcatgctttactgaatggtgtactgtagtgacctgggaaaggaagagaggtataaattgtgtcggttagccacccagacaaaatgaagccatgtggaaaatcaaatctattaaagtatgaagactgttataagctgttttaagctggccattcttaaaggggctcggtctgctgcaggagtaaatgtttacctcttcccccagatctttttcacatgccgtcttatgagacaatgtgcagcatttgataaaaatcatcctctcactaacgacgcttttatcggaaatgtttattgtctccgctttaccacccatgtcctgaaaggtactgcacatttgttaaataagcaaaaggaaagagaactttgcggctcaagccggctcgcagaaaccccaacaaattccagagccataaggaatcagaaaaaggaaaagggaaggaggagttagatttatatgaagagggggccttgcaaaaacatatatattagattttctctgcttggctagcccaccatcaaatgtttggtcgatgcggattagtattgagattgagcagttaacgccgaacttgggtcactgtctcaaaatgtgctttaataaatacaagggggaggaaatggatttgggaaggctcgttgtcagctctgcccctgctctcacactgcctctgcacagtggtgtaggggtcacacacaggtgttggcaccagtaccaacccgacccaaatcctggtcccacacaccctgtaattttgggcacattacttgtctgtgccttggttttctcagatgtaaaacaggaatattaacagaaggtgcctaagcatctggtaagcactctaaaaataccagctattattaccagtatctggagggtgggttcatttataccttaagaaaggatccccctaactctatttttcttgtgtgccggtttttaaaactgatgaatggcatgctgtcgggaaaaatttatccattcctactttttttctaattggtgagtaagcgtgcattgccctgacattctctggacagcaaacaattgaatttgctgaccagccgccatgatgtcaagccttaagtcaacagtggctaatgaccgctctgggaaaaaacaacaccttgattcctcaattacggtttaagaagccctgggaatgagggctcgccagtcatcgtcatcctcttttgaggcaagcataatgtgctgtggaaacaggttacctctgcactgttggcaagagcagcccacacagtataacgattgagcgtcatggctgtgccctttgtgtgttccaggaggaaactgaagagacatcctcacaagagtctgccgaagaggactagggggcgccaacgttcgatttctacctcagcagcagttggatcttttgaagggagaagacactgcagtgaccacttattctgtattgccatggtctttccactttcatctggggtggggtggggtggggtgggggaggggggggtggggtggggagaaatcacataaccttaaaaaggactatattaatcaccttctttgtaatcccttcacagtcccaggtttagtgaaaaactgctgtaaacacaggggacacagcttaacaatgcaacttttaattactgttttcttttttcttaacctactaatagtttgttgatctgataagcaagagtgggcgggtgagaaaaaccgaattgggtttagtcaatcactgcactgcatgcaaacaagaaacgtgtcacacttgtgacgtcgggcattcatataggaagaacgcggtgtgtaacactgtgtacacctcaaataccaccccaacccactccctgtagtgaatcctctgtttagaacaccaaagataaggactagatactactttctctttttcgtataatcttgtagacacttacttgatgatttttaactttttatttctaaatgagacgaaatgctgatgtatcctttcattcagctaacaaactagaaaaggttatgttcatttttcaaaaagggaagtaagcaaacaaatattgccaactcttctatttatggatatcacacatatcagcaggagtaataaatttactcacagcacttgttttcaggacaacacttcattttcaggaaatctacttcctacagagccaaaatgccatttagcaataaataacacttgtcagcctcagagcatttaaggaaactagacaagtaaaattatcctctttgtaatttaatgaaaaggtacaacagaataatgcatgatgaactcacctaattatgaggtgggaggagcgaaatctaaatttcttttgctatagttatacatcaatttaaaaagcaaaaaaaaaaaaggggggggcaatctctctctgtgtctttctctctctctcttcctctccctctctcttttcattgtgtatcagtttccatgaaagacctgaataccacttacctcaaattaagcatatgtgttacttcaagtaatacgttttgacataagatggttgaccaaggtgcttttcttcggcttgagttcaccatctcttcattcaaactgcacttttagccagagatgcaatatatccccactactcaatactacctctgaatgttacaacgaatttacagtctagtacttattacatgctgctatacacaagcaatgcaagaaaaaaacttactgggtaggtgattctaatcatctgcagttctttttgtacacttaattacagttaaagaagcaatctccttactgtgtttcagcatgactatgtatttttctatgtttttttaattaaaaatttttaaaatacttgtttcagcttctctgctagatttctacattaacttgaaaattttttaaccaagtcgctcctaggttcttaaggataattttcctcaatcacactacacatcacacaagatttgactgtaatatttaaatattaccctccaagtctgtacctcaaatgaattctttaaggagatggactaattgacttgcaaagacctacctccagacttcaaaaggaatgaacttgttacttgcagcattcatttgttttttcaatgtttgaaatagttcaaactgcagctaaccctagtcaaaactatttttgtaaaagacatttgatagaaaggaacacgtttttacatacttttgcaaaataagtaaataataaataaaataaaagccaaccttcaaagaaacttgaagctttgtaggtgagatgcaacaagccctgcttttgcataatgcaatcaaaaatatgtgtttttaagattagttgaatataagaaaatgcttgacaaatattttcatgtattttacacaaatgtgatttttgtaatatgtctcaaccagatttattttaaacgcttcttatgtagagtttttatgcctttctctcctagtgagtgtgctgactttttaacatggtattatcaactgggccaggaggtagtttctcatgacggcttttgtcagtatggcttttagtactgaagccaaatgaaactcaaaaccatctctcttccagctgcttcagggaggtagtttcaaaggccacatacctctctgagactggcagatcgctcactgttgtgaatcaccaaaggagctatggagagaattaaaactcaacattactgttaactgtgcgttaaataagcaaataaacagtggctcataaaaataaaagtcgcattccatatctttggatgggccttttagaaacctcattggccagctcataaaatggaagcaattgctcatgttggccaaacatggtgcaccgagtgatttccatctctggtaaagttacacttttatttcctgtatgttgtacaatcaaaacacactactacctcttaagtcccagtatacctcatttttcatactgaaaaaaaaagcttgtggccaatggaacagtaagaacatcataaaatttttatatatatagtttatttttgtgggagataaattttataggactgttctttgctgttgttggtcgcagctacataagactggacatttaacttttctaccatttctgcaagttaggtatgtttgcaggagaaaagtatcaagacgtttaactgcagttgactttctccctgttcctttgagtgtcttctaactttattctttgttctttatgtagaattgctgtctatgattgtactttgaatcgcttgcttgttgaaaatatttctctagtgtattatcactgtctgttctgcacaataaacataacagcctctgtgatccccatgtgttttgattcctgctctttgttacagttccattaaatgagtaataaagtttggtcaaaacagatcaa

SEQ ID NO: 359 - DNA, 159962 bp, Homo sapiens
ggggcgcggcctaacggcggcggcggcggcggcgacggcgacagcagcggtggtggtgtctggttagctcggcggctgcagatctcgcggcgacgcctgcgagggacccgggccgcgggtcgaggcgggcggcgcctgcgagggacccgtgtcgcgggtagaggcgggcggcgcgcggcggcggcgctcggcgatggtaggcgtccctggagcggccgccttccagcgtaagtggggcgtgaatgcgggcggccgaggggggcgtgtgagggcctgcggctccgcaggcgcggtgattccgagtgccccgggcgcgaggccgggagtggaaactgaggcccgaagcggggcggcggatccaaggtcacgcagcggggcgggccttcccgggctcctgaggccaccccgtcgcttcctgcgccgcccgaagagctcggggctcacggtgtgagggaaattgtggggcccgcggcctcggaacttaggccgggccggcgtccatgggacttgccggcgggcaagaatcattttgttgtcccagcgctggggccacgaagtccggctcctggggaaatactacacccgcccgatgttgagggttggaggagatgagaatggcccctcggagggcctgtttgagcgcaggctcagtagttggctacctgggttcacatccaggcttccccatttaggtagtgaccttggctctcccggtgcctcagttcccccatctgcaaaatggggatgtggagcgggttccctccctcccccagggttcttgggttttgtgaggccagtaaaacgcttgacaccgaccgtggcacacacacaattgtgaaaactgtcattattgtaatcgtcctttattaatctgatccagtgtgcaccgcactcggaaaagtccgaaattaggctctagccgtgttaagattttgttttgttgtctgttagtcctgctccatgatctaattgttattcttacttccatttagccattccagtatttatctagtgttcctccttgatgtgtgagatccttgggggaggggtggcttctctgaataagaacaataaaattttaattgtttttcattattgtaattataatagccaacatttttttgagcaccagacattttgcattctattcacttaatatttattaaatcatatagtaagtttaaaaataccattccaggccctgggaatacaataaacaagatagaccgaactggggttttgagtttagttaggagagggagagacatagtaaatgaggaaacagataaacatgttttgcatgtttttttaattgtttaatcttgatgacatcctaagtaagacattatttgaggatgcccattttgcagaggatgaaactgagtaacagaaggtactctgagtactagtctcagagctgatgtccttaaacacgtgaaagggaggctttacgcttctttttttttgcacccattaaatgttggattgaagatagaaaaagtagatacacccagcttgcagttactgcttttgatggtttgatccattcctcatgaaatttccaactaaagaggcggatagtgattactcttttaggcttgcaaaggtacagcatctctgtaaaatgaaaggcttttttttttttgagacggaatcttgctctgtcgcccagactggagtgcaggggtgtgatcttggctcactgcaacctccgtctcctgggttcaagctattctcctgtctcagcctccggagtagctgggactacaggcatatgccaccacgctcggccaattattttattttattttattattttttttgagacggagttttgttcttgttgcccaggctggagtgcagtagtacaatatcggctcactgcaacctccccccgccccaggttcaagcgattctcctgcatcagcctccagagtagctgcgattacaggcgcctgccaccacacctgactaattttttgcatttttagtagagacggttttaccatgttggccaggctggtcgtgaactcctgaactcaggggatccatctgcctcagcctctcaaagtgctgggattagaggcatgagccactgcgcccggccttaatttttatatttttagtagagacagggtttcaccatattggtcaggctggtctcgaacccctgacctcaggtaattcacccacctcagcctcccaaagtgctgggattacgagcgtgagtcaccaagcctgaccagaaaggactttttatttgaaaaaattggggggctcttctgcctatgaagtagtcttcctttgtttctttacttccataataaacttgctttcacttaaaaaaaaaagattgtgtccaaatttcttttgtgtagtatttagtttaaaatatgcccaaaagcacaacttttgcttctgttacgtaactacatttttgttttcttttttcctttttttgagacagtctctctctgtcacccagactggagtgcagtggcgtcatcatggcccacagcagcctcaacctcctgggttcaagtgattctcctgcctcagccacttgagtagctgggactccaggcgccaccacacccagctaatttttttattttttgtagagatggggtcttgctttgttgcccatgctagtccggaagtcctgggcttgagtaatcctccttcctcagccatccaaattgctgggattaaagtcatgagccactttgcctggccttttttagtgtttctaagagaattctgtattacattcctagacagtacacttggtgtagtactcagcctcctgaggagctgggattacaggtgctcaccaccatgcctggctaatttttttttgtattttttgtagagacggggtttaaccatgttttggctgggctcctgacctcaagtgatctgcccgcctcagcctcccaaagttctgggattacaagtgtgagcctctgcacccgcccttgattgaagttttggttttttttttttttttttttttttgagacggagtttcactcttgttgctcaggctggcgtgcaatggcatgatctcggctcactgcaacctccgcctcctgggttcaagcagttctcctgcctcagcttcccaagtagctggtattacaggtgcgtgccaacacgtccggctaatttttgtatttatagtagagatggggtttcactacattggccaggctggtctcgaacgcctgaccgcaggtgatctgcccgcctcggcttcccaaaatgctgggattacaggcatgagtaactgcacctggccttgattgaagtttttaactggcatgctgggaaagagaatataggagttcagtcttaaaatcggtgcttcaacccctgagccagagtccttggggaagtagtctagaactgtggcctcacatgtttgttttttctttttttaaaactgaggtggggtcttgctctgttgcccaggttctgctgcccagtgagcatagcttctgcagcctcttatctctggggctcaagtcagcctcccacctcagcctccctagtagctgtgactacaggcatgtattgccatgcctggctaattgtttaaaaagttttgtagacatggggtttcactgtgtttctcaggctggtcttgaactgctgggctgcagcgatcctcctgcctcagcttcccggtattgggagtagaggcatgagccaccatacctggccacctaaaatgtttttagtgttcattccatcagtaaatagggttgagtatgcacacacattctatgaatgttttattttttgtttttttatggttttttttgagacgaagttttgctcttgttgccccagctggagtgcagtggtgcgatctcggctcactgcatcgtccatctcctgaattcaagtgattgtcctgcctcagcctcccaagtactgggatttcaggtgtatggcaccacccctggtaattttgtgttttcagcagtgatagggtttcaccatgttggtcaggctggtctcaaactcctgacctaaagtgatccacccgccttggcatcccaaaatgttaggattacaggcgtgagctaccgcgcctggcctgaatgtttgttttaaatggcgattatagtgtgactgtactatgtattaggcatatatatgtgtatatatatatatatatatatatatatatattttttttttttttttttttttttttgagacagagtctcgctctgttgcccaggctggagtgcagtggcacgatctcagctcactgcaagctccacctcctgggttcacgccattctcctgcctcagcctcccgagtagctgggactacaggtgcccgccgccacgcctggctaattttttgtatttttggtagaggcggggtttcaccctgttagccaggatggtctcgatctgctgacctcgtgatccgcccgcctcggcctcccaaagtgctgggattacaggcatgagccaccgcgcccggccactgtattaggtgtattgttttgttttattttgttttgagatggagttttgctcttgttgcccaggctggagtgcaatggcgatcttggctcaccacaacctccgcctcccaggttcaagcgattctcctgcctcagccttccaaatagctgggattacaggcatgcaccaccacacccagctaattttgtatttttagtggagatggggtttcaccatgttggtcaggctggtctcaaactcctgacctcaggtgatccgcccgtctcagcctcccaaagtgttgggattacaggcatgagccaccacgcctgtcctaggtatgttttataacatacaaaaatagacattttacagaaggataaggtaaaataaatggaagtagcagttccaacgttgtctttctacacccagtggtgaattttaacaatacctcctggggtggagatcattgatcttgtagtagtaccttctcaatccattaggtctattgctctgatgaaatctagtttattcggtagaagtaaaatgtaatggctgggtatggtggctcgcgcctgtaatcccaccatttggaaggtcgaggtgggcggatcatctgaggtcaggagttttgagaccagcatggccaacatggtgaaaccccatctctactaaaaatacaaaaagaagctggctgtggtagcgggggcctgtagtaccagctgaggcaggagaattgcttgaagccaggaggcagaggtggccgtgagctgagatcccaccattgcactccagcctgggcaacaagagggaaactctatctcaaaaaaaaaaaaaaaaaaaggccgggcacgatggctcatccctgtaatcccagcactttgggaggctgaggtgggcggatcacgaggtcaggagttcaagaccagcctggccaacattgtgaaaccccgtccctaccaaaaaacgtacaaaaaaaatcagctgggcgtggtggcgggttcctgtagtcccagctacttgggaggctgaggcaggagaattgcttgaaagaaactgcggaggttgcagtgtgctgagatcgtgccactgcactccagcctgggcaacacagcaagactctgtctcaaaaaaagaaaaaaatgtaatggttaagatttaaattctaaagttttgaaatttaattctggagttgtgctgaggttaaaatcctgggaaccaatcctaacaagttttgagacttcaggctcattacttaaccttcttgtgcagttcattttcctcatctgaaaaatggagataaaatttctaccccatttgcaggtttattatgatggttaatatatgttaatatatgtaaagtacttaaaaccgtgcttgacacattctgttctggtggttgttagtggctgagggtataccatctgacttagggtctcagtctaggaggggccgtgcacaagtcaacaggtaatgataaagtgttttaagtgctttaagcgtaaggcttttgggaaggcaggggagacataactaattattccttgagattccaggtaaggtccagctaaaggggtgacattaaaccaggctttaaaggagaagggaggcttttcccaggagaaggaagggtgaagtctactggctgaaggtagttgagggcttggtgagtagtttatcagatctggacctacagggaacctgattgaagcttatataccttgttaatagtgaattctggctggagttgttcctggcaggggccagatggcaaagaagcctgttacagaacttttcacaccaccacagccctttccttctctctctggcacatacctcattctgccttcttagttatctaagaatataagcttctaaattataaactccttgagggttttgacaatgtttgcatttttgtaattttattttgcctagcaaggtaagtaggaagttcattagtgtcgagaaaggtatataatcattggaccttcaaggaagtctaaacagttaaaagtggaatggtaaatgaccatatttactagtgaaaaacttggttacaaatgttttgtagtagataggacctgtgcattactatttaaaaggggtaagaatgatcatcttcagtatccctttccttatctggcacttatccattgggattacagaagagatcggaaagtgcatcagaaaggcttgtctgacgttgaataggtaccttttgtttgctcttctaggtctgctttccatcctttttcaccctatcctgtgccctgggaagctgacttacctatatggactacatcaatgagcttccttcccctttgaggttatgaaatttattttcctactcccgtctcatgggttgtgcccttagctgactctgtcccttgactgaaggtcactgcttctctaaatgtggtcctctcggccgggtgcggtggctcatgcctgtaatcccagtactttgggaggctgaggccggcagatcacctgaggtcgggagtttgagaccagcctgaccaaaatggagaaaccatgtctctactaaaaatacaaaattagctgggcatggtggtgcatgcctgtagttccagctactcaggaggctgaggcaggagaattgcttgaacccgggaggcggaggttatggtgagcagagatcacgccattgcactccagcctgggtgacaagagcgaaaccctgtctccaaaaaaaaaaaaaaaaaaaaaaaagaatgtggtcctttctgtgtgacatcctccatgtaggtttggaaagtttttgttccctttggttgttgggcctagagatctagagatgctctcattagtcccagggtattacagctatcccttgtgcctatcttgtaccctgctcacatatttctttctagttccattattaaaccctccttgaattaaccttactggagtatgccatgtttcctgctgggaccatgactgtgtttgaagcttgtatactttttttttttttttttttttgagaaggggtctcactctgtcgctaggctacagtgcggtagtgtgatctgggctcactacaatctctgcctcccgggttccagcgattctcctgcctccgcctcccgagtagcagggactacaggcacacgccaccacgcccagctaatttttgtatttttagtagagatggggtttcaccatgttggccaggctagtctcgatcacttgacctcgtgatctgcccgccttggcctcccaaagtgctgggattacaggcgtgagccaccacacccagcttatttttattttttttatagagacaggatgtttctatgtttcccatgctggtctctaattactgggttccaatgattctcctgccttggactcccaaaatgctaggattgcagatgtgagccattgagtccagcccttctttgacttttgagtaagtttatcctagtttggaaccagttagttttctttttatcttactgtatttttaaaatttttgtttgttaattttgaaaccaggttatgagaccaacttttgtatttttggtagagacagggtttcttcatgttgcccaggctggtctagaactcctaggctcaagtgatccacctgccttggcctcccaacgtgctggcattaacaggcatgaaccactgtgcctggcccagttaattttctttcttttttttttttttttgagatggagtttcccttttgttgcccaggctggagtgcagtggcactggagtgcagttgctcactgcaacctccgcctcccagggtcaagccattgtcctgcctcagcttcccaagtcgctgggtttacaggcatgcgccaccacacctggctaatttttgtatttttagtggagatgggggtttcatcatgttggccaggctggtctcgaactcctgacctcaggtcatctgcccacctcggcctcccaaagtgctgggattataggcgtgagctaccgcgcccaacctgacctagttttcttatatacagaatcaaaaaatcagcagagaggttgggcgtgatggtggtgccactcagctgtagtcccagttactcggaaggctgaggtaggaggatcgcttgagcccaggtgttggaagctgcagtgatagtgccactgcactccagcctgggtgacagagagaccctgtctcaaaataataaaaaataataatggccaggcacagtggctcatacctgtaaccccagcactttgggaggccgaggcgggcggatcacctgaggtcaggagttcgagaccagcctggccaacatggcaaaaccccgtctcttctaaaaatacaaaaattagccaggtatggtggtgggtgcctatcatctcagctactcaggaggctgaggcaggagaattgcttgaacccagggggcggaaggttgcagtgagctgagatcacgctgcttcattccagcctgggcgaaagagtgaaactccgtctaaaaagaaaaaaaaaaaaaataagcagagagattgagtttaagcttgttctcaagtgttaaatgttgtataggttatgtgaatccagagttttaggcaggaagaatggtttaaatgatagtgcttaatgaatgattgcagccctgggatcaaaatgagttaattcactaagttcagggtaatgaaaataggaggaagaggtggggaagtaagatttctcacctgccaattttgttctcattccttagagtattgttttgaatctcatagaaagtgaccattcttttgtaaagatttacttcaaatccctgaaagcttggaggctaatgaagaagaatcactctggttattgtttaggctttagtaagattaccaaggaagggatctcataatgctgtagtaatagtttacatgtgcgacatgagctagtgtttgtacatgtgacagaccttgtttctggattttattaaggctggttaagtagctttttgcctctgtctctggtttctgtctctggccccttgaggctatctgaaattttaggagttggggtaccataacttgaacttttgaaatgagtcaataagcagatacgtcagccgagtatgactttaagtctagttgaattcttttaagaaaaagtcttggctagattttctgctgggcattttttatgtacatcaatcatctcatttaattatagatcaaacttgggagagagtatctctgttttactgataaggaaatcctgggcgacagagtgagactccatctcagaaaaaagaaaaaaagaaatgagttagagaatttaattgtccaaggtcacacagttaataagtagtagattcactcttcctaactagtttaatcttggtgtcaagttcattcattatgcattgagtgtccaaacacccatttattttttattttttattttttttaaagacagtctctgtcgctcaggctgagtgcagtggtgtgatcttggctcactgcaacctccaccaccgaggttcaagcagttctgtgcctcagcctcctgagcaactgggactacaggcgcccgtcaccacacccggctaatttttgtatttttagtaaagacggggtttcaccatcttggccaggctggtcttgaactcctgacttgtgatctgcccgcctctgcctcccaaagtggtgggattatagacgtgagccactgcgcccagccaaaaacccacttttttttaaccctctatcgcatggcttctttttgctagactaggggtttttagacatgtgttctacaggagcccagagcttcctgaagataattgatttcccataatctttcttcaactttctttccctaacaactcttcttatttaaaaaaaaaagtccaggccaggcgcggtggctcacgtctgtaattcaagcactttggggaggctgaggctgatggatcagctgaggttgggagctcaagaccagcctgaccaacatggagaaaccccgtctctaataaaaatacaaaattattcagccatggtggcgcatgcctgtaatcacagctacttgggaggctgaggtgggagaatcacttgaacctgggaggcagaggttgtagtgagccaagatcctgccactacactccagcctgggcgacagagcaagactctgtctcaaaaaaataaataaaaatttaaaaatttaaaaaagtccaaataattggggtatgatttaaagatagctatatgagaccttgttcaggggtatcctaagttggccttagagatgaattaaaaaaataaaaaggcaacagaaactgtcagcagtctttaacaattcatcccatatgtttcctgatcttagcagtgaagcagatgatggcagtgaacatcaaaagcccaagaaatgtccatgctaattttgcatggctctatgaggagctgtcaaatatggatcatcaaatatagtatatagactatgcaatgaagctttactttgcaatgtggctctttaagatttgattttacccttctattttgtgttgtaattaaatgcagaaatcaaagtataaattcagaataacccagagcttggtatccttctgtctgaatttatagctttggagttggctagacctttcagtcaaattagctgatggtgacaaatatgtaatgtgacctctgtagcagctccagtgaaatgttaatatcaggcatagcacagctcccttgatacactattttggccttttcctctcttacaaatgtttcccttatttctttgttaatttagccatctccatgcagaggtcgtgcctgcttttaatttttcgaagccacatgagaacagacatttaaacaacacagatttattcattttggccttgtatccctagagctacactaactttatgtctgggactaaaggtggaagtagctgagattagggaaatgcagaatggtgagggagaagtgccgggagaggtgatggttttagctcctgcattccccagccaattgctgaaattcagctccccattaattttcccttgataagttggtctggctaagtagttgaaactatattcttagccttccttttttttttttttttttttttttttttgagagggagtctcactttgtcgccaggctggagtgcagtggtgcgatctcggctcactgcaacctccgactccctggttcaagtgattctcctgctgcagcctcctgagtacctgggattacaggcacatgccaccacacccagctaatttttgtatttttagtagagacagggtttcaccatgttggcctggatggtctggatctcctgacctcaggtgattcgcctgagtcagcgtcacaaagtgctgggattacaggcatgagccactgcgcctggcctaattacaaaatttacttaattttttattttgtagagatgaggtctcactttgttgcccaggctgatctcaaactcctgggctcaagttattctcccacctcaagctccgaaagtactgggatcacaggcgcaagccaccttatgtggcactagccgggattatagacaagcgtcagctaatttttgttgttgtttctgtcagtccttccttgcttattagttaatattcttctgcagagcattttcttatctttgtgtatatatattaatatggatttatggattcttattttaatactctgttactgtcattatttgttgtgttcacattgttccagatttggccagggagatccccttcaagctggcttttgtgtcattttgacacattcccacattttttaactgctttttttgacacaccaaaaaggtgttgtaggcttagtttctgctcttcattttttttttcttttttttcgtgtgtgtgacggagtctcgctctgtcgcccaggctggagtgcagtggcccgatctcggctcactgcaagctccgcctcccgggttcacgccattctgcctcagccttccgagtagctgggaccacaggcgcccgccaacacacccggctaattttttgtatttttagtagagacggggtttcaccgtgttagccaggatggtctggatctcctgaccttgtgatctgcctgcctcgacctcccaaagtgctgggattacaggcgtgagccaccgtgcccggcctagtttctgctcttcttaccctcttcttggaatcggccatttctccaaactgtttctctcctaattcctttcagtggagaaaattatttagaaatcaagatttggaggccgggcgcggtggctcacgcctgtaatcccagcactttgggaggccgaggggggcggatcacgaggtcaggagatcgagaccatcctggctaacacggcgaaaccccatctctactaaaaaatacagaaaattagccgggcttggtggcgggcatctgtagtcccagctactccggaggctgaggcaggagaatggcgtgaacccgggaggcggagcttgcagtgagctgagatcgcgccactgcgctccagcttgggtgacagagcgagactctgtctcaaaaaaaaaaaaaaaaaaaaaaaaagatttggatgctgtgtgtgctcattcctattggaatattgttttttagaacttcttaatggacagagctaggaaatatatacacacacatacatatacacatatcaaaaaatatgtatctaaatttctttctttctttcttttttttttttttttttgagatggagtctcgcccagtcgcccaggctggaatgcagtggcgcaatctcagctcactgcaacctctgcctcccgggttcaagcgattctcctgcctcagcctcccgactagctgggattacaggcgcccgccatcaggcccagctaatttttgtatttttagtagagacggggtttcaccatgttgaccaggctggtatcgaactcctgacctcgtgatccgcccgcctcggcctcccaaagtgctgggattgcaggcgtgagccaccgcacctggccattttgtgtgtatttttaggaaaaaaattattgtataaaactagatagcagtgaaatatattcattttgtatggtttatttatttatctttttttcttggtgcttctgtcttggcagagtctcagaataacttgaaatctttttaaattttttgtgacagggtcttactatgttgccccggctggcctcgaactcctggcccaagcgaatctcctgcctcgatctcgcaaagtactgggattcaggcatatgccactatgcgtggccaagatgtaatttatatacaatcaaatttactttttttttttttgtcagtgggtagagaaaaaaacttgctctttttcatggcatagttctattagttttgtattattagtatgcagttgtaatcatcaaaccagatagagataattttcattcttcctgtaagttttctcacacccctttcttttcacctcgctcttggaagctactagtttatactggtttttgtcactcacagttttatgggggtttttgtttgcttgtttctctactttttcttttctataatgtcatatacatggaatcatacagtatgtaacctttgtgtctgatgtgtttcacttaccataatgcttttgagattcatccacgttgtgtcatgtatctataggttgttcctttttattgttgagtaacatgttatgttcaccagctgatggacatttgaactgtttcccattttgatgattatgaataaagctttaaatattcatatacggttctgcatgtggacatatgtttttctctctcttggataaatacctaggcatgggattgctgggttctatgataatttcatatttaactttttttttttttttttttttttaagatggagtcttgctctgtcacttaggctggaatgcagtggcatggctcacggcagcctccgcctcctgagtttaagcaaattctcctgcctcagtctgccgagtagctgggattacaggtgtgcaccgccacgcttggctaatttttgtatttttagtagagatggggtttcaccatgttggccagactgtctcgaaatcctgacctcaggtgatccacccaccttggcctccaaaagtgctgggattaaaggtgtgagccaccacgcccggcctatacttaacttttttggaaactgccaaaatgttttccaaaatggctataccataccattttgcatttccactactaatgtatgacagtttcacttgcttgttggtatttttgttttgttttgttttagaattaattgttaaggaagcactatatctgggtgaaatcaattttggtcatctcatttctacaatgaaaggaatactctctgttacttgttttagaatgtagggtcccttgctatttatattcttttggggttagtgcagttcttatttacacatcatttgcagaaataatggtaactaccatttgtgtatcagaacaattttcacatatctaatttttatagcaattaaggtaggtagaagtgtcttcatcctcttaacttgtataaggagattggttcgggtaatcaggtgatttactcactgtcacacggctagaatgtgagagtgtggctttttggatttggagctgtgaggggacattctgtctctcttttaagtagaggtgtaatagaggaagatatgggtgtcatcccagtcctttcttttacctcaaattcataagcagtgcagtcttgaacaattcatatttgaattttgagttaatttcatcttttcacctgtctacctgaaaaggtgagaatcagttgagggactgttaaaggatgttttgaacactgtatgttacctcatgattaattttatagtactctccatttgtagtggtttccatagttgtttatgggaacaagtttgcagaaaaaaaatggttgaatagaaatagaaggggtcggccgggtgcagtggctcacgcctgtaatcccagcacttagggaggccgaggcgggtgaatcactggaggtcaggagttcgagaccagcctcaacatggagaaacccccatctctgctgaaaatacaaaattagccaggcgtggtggtgcatgcctgtaatcccagctgctcaggaggctgaggcaggagaattacttgaacctgggaggcggaggttgcagtgagccgagatcgcgccattgcactccagcctgggcaacaagagcgaaactcttgtttcaaaaaaaaaaagaaagaaatggaaggggtcaggtgtggtggcttaggcttgtaatcctaacactttgggaggctgaggcacatggatcacttgatatcaggagttcaagaccagcctggccagcatggggaaaccctgtctctactataagtatgaaaattagccagactggtggcgcacgcctgtaatcctagctattagggaggctgaggcaggagaattgcttgaacccagaaggtggaagttgcagtgagctgaaatcgtgccactgcactccaacctaggggacagagtaagactgtctcaaaaaaaataaaaataaaaaaagaaaagaaatagaaggggctgggtatggtggctcaagcctataatcccagcattttgagaggccacagtgggaaaattgcttgagtccaggagtttgagaccacactgggccaacacagaccctgtctctacaagataataataatagtcataataatataaattaatacaaaaaagaagagaagcaatttaatacaagagctgaatagcaaaatggccagtactactacaatacacacagagacacaggtcccctcttttttcatatttactttgttttatgtaatacataaatacattgaaaaaaattaatacagataaaataaaaatccacttcctacactaagtgaaaccattaacaactgtattatggagctgttagatgcagggattgcgctaagtgccatagggctgccaaggtaggtaagattcggtcccggtcctcagtgattttctagttttccttctgtgccctaacagtttttggatagctcttgtaataaaaacttttaaacagatgttttaagtttagatagtgattaaccatcttttcctcttgtaattgatgccatcgagtgagagttctgttgggaaatagtgaaacaaggattctggttcaatcaatggaggcagggaatttcggaggaaggagatgggatgccatccatgccccagagccactgagcacttagctgcagctgtggagagcaacacttggctagctatgagttttctgtaggtctctaaatagttcatgctaattttgtggatgttggactctgaggaatggtgtgttcaatggggagaatgtccaaaaaaactgtaactggtaagtagccatttggaatactgaaatcaatttctgattatgtgaatgtcccttttttgtaaattattttagcttacttgccagttcagtttcttggtgttaccctgttagttaaattcaatatgtcatttatttaagggcctgatatttgtattctattagaaggacaaacagctaattatactagaaggtggactataatgaattgtcattacagtgactaaaagttattgattttctaggatattcttgatttcagatatttactttgacaaacgtttattgaattccttgtatcagatcctgggggatataaagagttctgaggtcctggaggactatgtagtccagtaagggagattgatagcttcagtaccaaatgctaagcagtgttaatggcaagtaacatcctaccaaggatgggcatctgacctaatgtgtaagtatgcatgtgtgagtgtgtttcaaaaaaggcttcttagagaaaatgatatctgttttgagccaatctgtttttccttacaacataaaaaaataatttttggactggctatgtatttagctaatttaacatttgaaacgaacaaagaatacttattgaagtttctctcacctctgcaccagccagtcttttccccttcctggaagcagctagcattaccatttttttctggaccctttcgatacattcctgtaggccatataatgtcggtaggtaaagaacttcctcattttgcattgtatttcattgtatgactgcaccatactttttcccccctactgctgatggacatttacctttcaatcctttgctgttgcaaacaatgctgcataaccttgtagcaattgtcttttcatagatctgtagagtaaattcctagaagtagaactgctggggttaaggggtttgcctgtttgtgtaattttgatagatgttgccagaataccctctggagaggtatatcagcttttatactcctaccagcaaagcatgacccaagtgaagaatgggtaggagatgggtgaagttgaggctgggtcaggtttatgagtgtgagggggactgaaagtagttatgtattattgaagtgtgaagtgctgggtaaagaatagcaggagatgagagtaggaagcagacgggtcaggtccctttgcctttgtgctgtttttgtttgtttgatagcctcttactctggcccaggctagagtgcagtggcgcaatctcagcccactgcaacctccgcctcccgggtttaagtgattctcctgcctcagcctcccaagtagctggtattacaggtgtgcgccaccacacctggctaatttttgtgtttttggtagagatggagtttcaccatgttgctcaggctggtgtcaaactcctgggctcaagtgatctgcctaccccggcctgccaaagtgctgggagaacaggtgtgagctactgcaccccgcctgcctttgtttttatgcttgtatttttttgtttgtttgtttttttagcttttaagttgagggctacatgtgcagatttgttacataggtaaacttgtgtcatgggcgtttgttgtacagattacttcctcacccaggtattagcctagtacctgttatttttcctgatcctctccctcctcccaccctccactttcccataggctccagtgtgttttgttcccctcttatatgtctatgtgttctcatcatttagctcccacttgtaagtgaaaacatgcggtatttgcttttcttttcccatgttagtttgctaaggataatggcttccagttccatccatgtccctgctgcaaaggacatgatcttcttttttatggctgcatttataagacaagaggggtttatttaaacttctgctatcagaagtaggaaattgggatcccattagggcttaacttaattggtttgatttcagctttttagcttggaggctgctgaagagttaatttattgtatgagagtttggccgtgtgtggagcacaaacttacttgttttaaagaaaggatttctttgtacatttattcatttgccagatcagtcgtttacatgtgaaccctcttcacagttagttatagggaaaacaagcagataattcatgccagttaaatattacaatatgtcagacttggctgggtgtggtggctcacacctgtaatcccagcactttggaaggctgaggtgggcagatcatctgatgtcaggagtttgagaccagcctggccaacatggtgaaatcccttatttactaaaattacaaaaattatctgggtgtggtggcacacacctgtagtcctagctacttgggaggctgaggtaggagaaacacttgaactctggaggtggaggttgcaatgagtcaagattgcaccactgcactccagcctaggcgacacagcgagactccctctcaaaaaataaaaaataaaaagaacacgacacactgattcagatcccaagattaagggggaaaacaaggcttcagattttattaaacttatcctaaataatgatgtttttaaaaggaaacctttggggaaataatctgtcggtaacagatgtctaaatttttccttatttgaaaaggtcctggctgggcacggtggctcacacctgtaatcccagcaatttgggaggccgaggtgggtggatcatttgaggtcaggagtttgagaccagcctggcccaatgtgatgaaacctcgtctctaccaaaaatacaaaaattagctgagcatagtggtgggctcctgtaatcccagctacttgggaggctagggcaagagaatctcttgaacgtgggaggcggagcttgcagtgaactgagatcacaacactgcagtccagcctgggagatagagtaaaactctttttttttttttttaaatacaagttctagggtacatgtgcacaatgtgcagttttgttacataggtatacatgtgccatgttggtttgctgcacccattaactcgtcatttacattaggtatttctcctaatgctatcctgccccctgccccccaccccaccacaggcctcggggtgtgatgttgcctgccctgtgtccaagtgttctcattgttcaattcccacctgtgagtgagaacatgcggtgtttggttttctgtccttgtgatagtttgctcagaatgatggtttccagctgcgtccatgtccctgcaaaggacatgaactcattgttttttatggctgcatagtattccatggtgtatatgtgccactttttctttttttcttgtttttttttttttggagacagagtctcgctctgtcgcccagactggagtgcagtggcgctatcttggctcactgcaagctccacctcccgggttcatgccattctcctgcctcagcctcccgagtagctgggactacaggtgccctccaccacgcccggctaattttttttgtatttttagtagagacggggtttcagttgttagccaggatggtctcaatctgctgacctcgtgatccgcccgcctcggcctctggaagtgctgggattacaggcgtgagccaccacgcccggccacattttcttaatctagtctatcattgatggacatttgggttggttccgagtctttgctattgtgaatagtgccgcaataaacatacttgtgcatatgtctttatagtagcatgatttatgatcctttgggtatatgcccagtaatgggatcgctgggtcaaatggtatttctagttctagatccttgaggaatcaccacactgtcttccacaatggttgaactagtttacactcccacccacagtgtaaaagcattcctatttctccacatcctctccagcatctgttgtttactgaccttttaatgatcgctattctaactggtgtgagatggtatctcattgtggttttgttttgcatttctctgatgaccagtgttgatgagcattttttatgtgtctgttggctgcataaatgtcttcttttgagaagtgtctgttcatatccttcacccacgttttgatggggttgtttgtttttttcttgtaaatttgtttaagttctttgtagattctggatattaaccctttgtcagatggatagattgcaaaaattttctcccattctgtaggttgcctgttcactctgatggtagtttcttttgctgtgcagaagctctttagtttaattagatcccatttgtcaattttggcttttgttgccattgcttttggtgttttagtcatgaagtccttgcccatacctgtgtcctgaatggtattgcctaggttttcttctagggtttttatggttttacgtctaatatttaagtagttagtccatcttgaattaatttttgtataaggtgtaagaaagggatccggtttcagttttctacatatggctagccggttttcccagcaccatttattaaatagggaatcctttccgcatttcttgtttttgtcgggtttgtcaaagatcagatggttgtagatgtgtggttttatttctgaggcctctgttctgttccattagtttatatatctgttttggtaccagtaccatgctatttgagcaaaactcttaaaaaaatggtttatgtaaagagaaaagtaacagaaaaaaggctgtcttccaaaaggattacaggtgtgagccatcatgcctggccataaactttttattaaatagacaaaatgcataaatcataaatgtacagctcagtgaattttcacaaagtgatcatacctgtgtagctactatgtagatcaagaaataaagcattagggcatggtggtgcatgcctgtagtcccagctactcaggaggctgaggcaggaagatcacttgagcccaggagttctgaggatgcagtgagccatgatcatgccactgcactccagcttgggctacagagcaagaccctgtctcaagaagaagaaggctgggcacagtggcttacgcctgtaatcccagcactttggaaggccaaggcagggagatcacttgaggtcaggagtttgagaccagccaggccaacatgtgaaaccctgcctctactaaaaatacaaagattagctgggcgtggtggcatgcgcctgtaggcccagctacgtgggaggctgaggtaggagaatcgcttgaacccgggagggggaggttgcagtgagctgagatctacgccactgcactccaggccagcgacagagcgagactctgtcttcaaaaaacaaaaattagccgggcatggcggtgtgcaggcggtgtgcacctgttaatcccagcctctcgggaggctgaggcaggagaaccacttgaacctgggaggcaaatgttgcagtgaaccaagatggggctactgcactccagcctgggcgacagagcgagactccctctcaacaaaaaaaaagtaaaagaaaacattaacagcaaccacttcagaagcctaccttcttacttgccagtcactgtccctccttctccaaggggtaaccactatcctgacctctatcaccattcattagttttgctttattctttttgaactttatataaagagtcatataatgtgcattcttccatatctggcttcttttgctcaacagtaatgatacatgatcttgtgttagtaataatagtccattctcaaatttctgtctagggttttgccacagtaatataccacagtcggtccattctgctgttgaggtatattctgattgtttctagttttggactattaggaataacgctgcagggaacattcttctgtgtatgtgggtgcacgtatgtatgtctttttttttttttttttggagacggagtctcaactgtgttgcccaggctggagtgcagtggcgcgatctcgggctgactgcaagctccgcctcctgggttcaagcctttttcctgcctcagcctcccaagtagttgggactacaggctcctgccaccaagcccagctaattttttgtatttttagtagagacagggtttcactgcattagccaggatggtctcgatctcctgaccttgtgatccacccaccttggcctcccaaagtgctgggattacaggcgtgagccaccgcacccggccacgtatgtatgtctttttgttgggtgtatgcctaggaatgggattggagggacatacagtgtgcatatgttcagctttagtagatgctgctgctgtcaaagttttccagagttgttctatcagccaatgcttgcatcagcagtctgtgagagttccatttattacacatcctctccagactaacaacttgctgttgttaatgtttaacctttttgaagagcctctgctttgtgagataggtagagggcatacagtcgtgaagaaaacagtgctgctttcatagaccgtaatgggtttttttgttttttttttggtttttttttttgagatagagtctcactcttgtctcccaggctggagtgcagtggcacagtatcagctcactgcaaccttcacctctcaggttcaagcgattctcctgcctcagcctcccaattacagctgggattacaggtgcccaccatcacgcccagctaatttttgtattttttagtagagacggggtttcaccatgttggccaggcaggtctcgaactcttgaccttgtgatccgcctgcgttggcctcccaaagtgctgggattacaggcgtgagccaccgcacctggccagattagctggggcatggtggcaggtgcctgtaatcccagctacttgggaggctgaggcaggagaatcgcttgaacccgggaggaagagattgcagtgagccaagattgcgcaactgcgctactggccgggtgacagagtaagactctgtcccaggaaaaaaaaaaaaaaaaaaaagaatgttgtacctgtttaatatatttaggtgttgataagtacttgctgttttttgttttgtgtttttttttgttgttgttgttgttttgagagggggtcttttgcccaggctggagtgcagtggtgcgatctcggctcactgcagcctctgcctcctgggttccagcaattctcctacctcagcctcccaagtagctgggattgcaggcaccggccaccatgcctggctactttttttgtatttttagtagagacaggattttaccatgttggtcaggcgggcctcgaactcctgacctcaggtgatccacctgctttggcctcccaaagtgctaagattacaggcgtgagccaccgtgccctgcctttgttttttttttttttttttttttttttgagatagagtcttactctgtcacccaggctggagtgcagtggtgcgatctcggctcgctacaacctccacctcttgggttcaaacgattctcctgcctttgcctccccagtaactgggatgacaggtgtgtgctaccacaccgagctaatttttgtatttttagtagagacggggtttcaccatgtctggagaggagcagtccaggcaaaggtaatagcgggtgttgaggccctgaggtaggaacatgcttgatatgtttaaagagcaccaaggaggctagcatggctggagcaggggatggagcgaaaagctgatgtcagggaggtagatgggggccagagcacacagcgcatttggggtcatggtaaggattttggatttgctgaatgaaatcagttttgagcaggagggtgacattatcccctttaccttttaaagagattgcttttatttatttatttattttattattattatttttaaagacaaagtcttgctctgtcctataggctggagtgcgatggtggggtcttgctcactgcaacctccgcctcctaggttcaagtgattctcctgcctcggcctcccgagtagctgggactactggtgcctgccatcacacctggctgattttttaattattagagatggggtttcactgtgttggccaggctgttcttgaactcctaaccttgtgatccgcccgccttggcctcccaaagtgctgggattacaggcgtgagccactgcactgggtctaagagattgcttttagagaaaacacctagtgaatcaagggaggaggtaggaatgtgaattaagaagttactgttggccgggcttggtggctcacgcctgtaatcacagcactttgggaggccgaagcgggtggatcacctgaggtcaggagtttgagactagcctagcaaaaacatggtgaaatcctgtctctactaaaaatagaaaaattcactgggtgtggtggcaggcgcctgtagtcccagctacttgggaggctgaggcaggagaattgcttgaaacctggaggtggaggttgcagtgagccaagatcgtgtcactgcactccagcctgggtgacaaagcaagactccatctcaaaaaaaaaaaaaaaaaaaaagtgtggcactgcacaccagcctgggtgacggaaaacgtgtccttggccaaatagtggtatcctgctcaatgagggataatgttatttatgctataatatctacctattatttattctgtagtgttctgcattgacactatagttttttatttttatttttttattgagatggagtctcactctgtcatccagcgaggctgaggtgggtgggtcagagacctcaagtttgagaccagcctgacaaacatggcgaaaccctgtctctactaaaaatacaaaattagtcgggcatggtggcgtatacctgtaatcccagctaattgggaggctgagacaagagaatcacttgaactcgggaggcagaggttgcagtgagccgagattgtgccattacactccatcctgggccacaagagggagactccatctcaaaaaaaaaaaaaaaaaaaacggggcggggggaatatcttataattactttcctaaagatagctttcaaaaattacagtgtcgagaaggctcatacctgtaatcccagccctttgggaggacaacacagaagaatagtttgagaccatcctgagcaaaatagcaagaatgcatctctacaaaacataagaaaaattagccagtagcacacctgtaatcccagttactcaggaggctgaggcaggaggaggctaagcccaggaggttgaggctggagtgacctgtgatcatgtcactgcactgtgcctgagagacagagcaagacccggcctcaaaaatgtaaaaataaattcaaaaaatgaacaataatttaaaaactacagcgtcagacgggcatggtggctcacacttgtagtcccagcactttgggagtccgaggcgggcagatcacctgagatcaggagttcgagaccagtctggccaacatagtgaaaccccatctctactaaaaatataaaaattagctgggtgtggtggtgcatgcctgtaattccagctactcaggaggctgaggcaggagaatcccttgaacctagcaggcagaggttacagtgagctgagagcgtgccactgcactccagcctgagcaacagagtgagactccatcttaaaatataaaaataaaaaactatagccaggtgcagtggctcacgcctataatcctagacttcgggaggccgaggtgggcagatcacaaggtccagagttcgagaccagcctgaccaacatggtgaaaccctgtgctgggattacaggtgtgaaccaccatgcccagccaagacattctttaaaaatgcctagcaaatatagtaaaaagtaaaaattctctttcacctcatcgctgaaagtttctgtatattttcaggctttttggtatacctttatacacatctgtaatactcacgcagtgttttttctaaatggaatgatactgtacataatactttgcagtttttataatttacagtcagatgggaaggacacaaaactattctagaagatctttgctttaaacagtagtgaagacatttatctcttctgttgttttaagtgccttggaacagattttatgaacaacagcaacattcgatattgatttgctcagtgttagtagtgagatgcctttagtagtgagatcacacctttcagagaactttctaaatgctctgtaaataaaagcagatatgtgatggactgcttcatgatgttgccaagcaccattcacatccttttccctttctcagaaagtgcagagtcatccattttggagcagttagttcttgcagatctaccaattacctgtggttataggagatgatgtttctctatctgcctgaaagtggaaaaaggaattaatgaacctgtgaagttcagttctgtaactagacagagctgtgctggaaatgaaaataagtcctttctgttattcatgacatatgggaagaaaagcttcaggtagatcaagctctgcaggcctaaatccacagaagccttgccaattttcagctcattattgccatcaaggtattttggtgattatttccactattgtaaactaattcataggactggtttttttggtttttttggtgtttttttttttttttgagacagagtctcgctctgttgtccagactaaagtgcagtggtgtgatcttggctcactgcaatctccggctcaatcactcaagtgattcttgtgcctcagcctcttgagtagctgggactgtaggtgaatgtcaccatgcacagcttttttgtatttttagtagagataaggtttggtttggttagtagagcctaggttggctaggctgctatattttgcctttttttttttttttgaagacggagacttgcttgcaacctccgcctcccggttcaagcaattctcctgactcagcctcccgagtagcttgttctacaggtgtgtgccaccatacctggccaattttttgtatttctagtagagatggagtttcactgtgtgggccaggttggtctcaaactcctgaccttgtgatccacccgcctcggcctcctaaagtgctaggattacaggcgtgagccaccgtgcccagcttacattttgcttttattttttttgagacagagtctctctctgtcacccaggctggagtgcagtggtgcaatctcggctcactgcaaccttcaccttccaggttcaagtgattctcctgcctcagcctcccaagtagctgggactacaggcacgtgcaaccatgcctggctaattttttgtattcttagtagagactgggtttcattgtgttagccaggatggtttcggtctcctgacctcatgatccgcctgccttgcctcccgaagtgctgggattacaggcgtgagtcactgcatcctgcctacattttgattttaatgtcttactgttaatgatccatgcaccaaattcccatgctgttagtatttttctcagaatgacaaaggaattgaaatgccattgtgggataaaattaaatattgtcaaaggcctgctctgagccagtctatggactaggtagatatattggggagataatgaagtaggctcttgttggaaacagagcagaccaaaccaaacagaaaatgaatttgtcagaccaggcacggtggctcactcctgtaatccccacactttggtaggctgaggcgagtggatcacctgaggtcgggagtttgagaccagcctgatgaacatgaagaaactccctctactaaaaatacaaaaaaaaaaaaaaaattagctgggcatggtggcacatgcctataatcccagctacttgggaggctgaggcaggagaatctcttgaacccgagtggcagaggttgcggtgagctgataacacgccattgcagtccagcctgtgcaacaagagcgaaactccttctccaaaaaaaaaaaaaaagtgaatttatctgtgtcttggttttctttttttctttctcttcttttttttgagacggagtctggctctgttgcccaggctggaatgcactggagcgatcttggctgactgcaacctccgtctcccgggttcaagcgattctcctccctcagcctcccaagcaactgggactacaggctcacagcaccatgcccagctaagttttgtagttttagtagagacgggctgtctcagttttcaaataatgaaggtgaattcaactggtaaatgtaggtttctattaaataatgattaaggaaagaaaaataatatttggccctctgtttctgtgggttttgcatccatgaattcagccaaccatggatcgcaactattcaggaaaaaaaatatacagattgtggctgggcaccatggttcatgcttgtaatcccagaactttgggaggccaagatgggcagatcacctgagatcaggagttcgagaccagcctggccgacaaggtgaagccccatttctactaaaaatgcaaaaattagcccggtgcagtggcatatgcctgtaattccagctattcaggaggctgaggcgggagaatcgcttgaacccgggaggtggtggttgcaatgagtcgagattgctcaactgcactccagtctgggcaacagtgcgagactctgtctcagaaaataaataaattatttaaataaagagtattagaggtatgggtaggttatatgcaaatattataccattttacgtaagagacttgagcattggtggattttggtatccacacggattccttgcaccagtctaccgtggatactcagggacaactctgtgtatggtatacaccttggtgtgtattctaatcatctgggaagcttgtgaaatgtaggttcaccccctggatttttaaatcctggaaggtctggggtagggtccaggaatcttcattttcagcagcagggttcctaaataattctcttagaggtaacctgaagactcctttgaggagcattggtgtctcagagggtgtctaaacctgacaaagaccatctaaatctagttggctgagccgggcacggtggctcacgcctgtaataccagcactttgggaggccgaggcaggcggatcacctgaggtcgggagttcgagaccagcctgaccaatgtggaagaaacctcatctctactaaaaataaaaaattagccaggcatggtggctcgtgcctaatcccagctactcgggaggctgaggcaggagaatcgcttgaacctgggaggcagaggttgtggtgagccgagatcacgccattgcactggagcctgggcaacagagcaaaattccgtctcaaaaaacaaacaaaaatctagttggctgaagagttatggggaggaaaaactattttgatatagcacaaactttgtgataaaagtgataaacggagataactgagaaactattaaggaaagagatcagttaacgctcactgaggtagggaggagaggcagatgtctgattttatgttaaacttgaggaatatatctttcatttgattgccttgttttatatacctcataatgctatattgtcttggtaaccaagctctcatatctgtatattactgcagtcctggggcatctctaacttctaacatatactacttttttgataagctattgaactgtcctaagtaggccgggtttggtggttcacacctgtaatcccagcactttgggaggccaaggcaggtggatcactggaggtcaggagttcgaaaccagcctggccaacatagtgaaacccagtctctactaaaaatgcaaaaattagctgggtgtggtggcacgcatctgtattccaagctacttgggaggttgagccagagaattgcttggacctgggaggcagagtttgcagtgagctgagatcatgccgctgcactccagccttggtgacagagcaagactgtatctcaaaaatgaaaaaaagaaatatcttaaataacttttcaacgttcaaactaactcgtggactatggcataaaatcatttgttactcatgagtgttttcgtttatttgttcaggaaataatcactgtttttacacacgcacgcgcacacacacacacattttcacctgccatcacatacacacacacacactttcacctgccatcacacacacacacacacacacacacacacaattttcagctgccatcctagatagtttaccaatattgatgagtctttcttaatggggggacatttctcggaggatttaagtataggttaagtcgatttaaggctttagggggagaagaaaacatttctcaattataaagtatacaactaggaagaaattcttatttctcatattctgtttatttagcactatccattcatttagcacatttacttgtattgacactaccatgcttatgaagccgtgatggctagggagtaatgagcttgttttgctagtgttatcttctataaatgttctaaattaagtagttggggaagtggttaatgacaaccaaatttgtaatctaggattgttaccctctaatcaattctttttaaatttcttcctgacatttatcttgttataataataactctctgacattattattataacaaaattgttgtatttgtgttttggggataaaaggcatattttagcatcctatagtttaaaatggtgtttgttttaatctgggtgataagatggaaatgctgacctgggcttgcctgatctacagctaacattgttctaataaactgcatggagtccaggtgttttactttaactgcagctgtaccatctgtgggagcaggtggacagattctgtgtcatcaggaaaatacagctggtgagactaaggagaagagctaattgattgcttttccagctctctccagtcatatatacctaagcatagcatttaccttggcacaggtgttgcctttggtctggatagtaacagcaaaattgaacaaaaaaagatgtaaatttgagctgcgtgtgtgtgtgtgtgtgtgtgtgtttcttggttggcattgagaaagataatttaagggttttttgtttgtttgtttaggttttatttttgtttttagttacttgaagatatttccagctcgttaacttctctgagagagttccttgtaaggctacttataaatagtagtatatatatatatagtttatggcagggaagatctgggaagtaagcaaaaagagcctttagttaggcaacatagaacaaaatagaggtcacaggttccatgcactgaagaatggaattgaaatagagactccagggtcatagactcttggaaggaagactagagtacattcatgaccctcacccttaattacttcacaggtgagaaaaccaagagctacagaaaataagttattcctcagtaccagggcctggttccttggagaattgggttaaaattcaaaataaccttctaaaaaattctttcagaaacgagtagtgaaagccagtggatcaaattcagtgatagttaacagagaaacagcagcatagataagtaagccaatttaatgtagggagcaaccactagtgtacatgatctcagctcatctggtactaccaagtaaaaatgaacctgggccagccacagtgactcatgcctgtactctcagcgctttgggaggccaaggtgggaggattgtttgaggccaggaatttgagaccatcctggtcaacatagcaagaccctgtttgtttaaaaaaaaaaaattaaaaaaataaaaatttagctgggcttcgtgatatgtgcctgtagtcccaacctacttgggaggctgaggtgggaggatcatttgagcccaggagttcaaggctgcagtgaggcatgattgcaccactgcactgcagcctaggcaactgagtgagaccctgtctcacaaaactaataaataagtaaataaataaaacagaacctgtattatagtgttattttagaaacaattataccattgagatgcatgaagagagctagtagttttgcctatcatacttaaggtttaacttcttcagcttaagagatatatgagagcagcttttgagaggatttaaaagatccctaaaaaaagaaaatccaatggaaaggttcaaaaacttgtgtctgatgaagagaaaatacagaagtttgataagcctttaaggattgttttgtagaagttggctagttgtatacttatccctttagaactagacaggaaggggcaaatttaccttagccatggggaatatagatacgcattgtagattctgggtatgagcagcagcattgccacctgggaacttgttaaaaatgcagaatctgggctctggcccagacctactgaatttgcattttagtaagatttcccaggtgattcatatgaacattaaaatttgagacatattgggataaatcataggctttattttttatttatttatttttttttatattttgagacagtcttgctgtgttgcccaggctggagtgcagtggtgcaatcttggctcactgcaacctctgcctcctgggttcaagcagttctcctgcctcagcctcccatatatgtttgcagcctccctgaattataatttaattacagagtctatcttaattaaataataaagatcattcttatttttcaaaagcatttaaaaaaatggggttcttatctagatgagagaggttttactccataaggatcacagtctagtgatccaataagcaaacaaacgtgtactaaaaccccaggtggggataaatactttgaagaaaaataagctaagattggagagtctttcagtttaagacctaatttattccctatgtgttgtgttttttgttttgttttctttttttcccaggatggaatttcacccttgtcgcccaggctggagtgcagtggcatgatcctcaccgcaacctccgcctccctggttcaagcaattctcctgcctcagcctcccgagtagctgggattacaggcatgcgccaccactcccggctaattttgtatttttagcagagacggggtttctccatgttggtcagactgatctcgaactcctgacctgaggtgatccgcccgcctcggcctcccaaagtgctgagattataggcatgagccaccacgcccggccagtgtgttgtgctttttttttagtttttaatggttatcacttgtaggtaggttttagagcagacttcagttttttgggtttttttgtccctctttttttgttttctcgttttttagacttcagttttcaggacaaaaatatgtacaggttttaaaattattattattattaaaagaattaccttaactcagtgcctggcacatagttaacatttaactgggaatgtttcataataaatctcaagtaagatcttaagaaaatcaacactgattgttacctgtcacaagtcacgtgggctgagatttctggctaggcaggaaagaaagaaaagttcagtcttttgttctctttttcatattattatgatttttggattctgtggattccagaatcagagtttgaacagagaagtggtttctacactttgttgcataccagatgggtatggttttggaataatgaaggggctttcagactgtgggttcttgagtgatttatgacatttctcccgctttgtagttgtttttcttggaacttgcctagatgggcatgccatgaacttgcaaacgttgttctcattttcaaataaaataattttgttgcaatttatttttaggattaaaaaaaaaatccagatgctcacttaaatacataagaagacaaaccaggatcaatcttaataggagaaaggtatacatgtagaggggaattaactttatgcttgctatgctagaaatgagctggttgagttgcactcaggtaatagtatggtaaggtatatttttttggttaatttgaaaagaaaatgtatatatgtatgactgctatatatgtcagaaaatgtgacaaatagcttttttttgttgttgagatggagcctcactgtgttgcccaggcatggagtacagtggcacgatctcagctcactgcaacccttgcctcccgggttcaagcaattctcctgcctcagcctcccaagtagctgggcttacaggtgtgtggcaccacgcctggctaatttttgtattttttaatagagaagagatttcaccatgttgtccaggctggtcttgaactcctgacctcaagtgatccacctgccttggcctctcagagtgctgggattacaggcgtaagccagtgcacccggccgctttttttgtaaatggctttgttgagatataattcacataccctacctccatttttttttttttttgagacagagtttggctcttgttgcccaggctggagtgcaatggcacaatctcggctcaccacaacctccgcctcctgggttcaagtgattcttatgcctcagcctcctgagtagctgggattaccaggcatgtgccaccatgcccggctaattttgtatttttagtagagatggggtttctccatgttggtcaggctggtctcgaactcccgacctcaggtgatcttcctgccttggcctctcaaagtgctgggattacaggtgtgagtcactgcacctggccctaccctacttctttaaggtatacaatttaatagtttttagtatgttgacaaggttttataaccatcactgcacacagtgcagtgaatatttatatcactccgaaaagaaaccccatacccattaacaattactgtctatttttcctttccccagtccctaatctacttttttatttttcccttgagatggagtctgactttgtcacccagattggagtgcagtggtacagtcacagctcatcgcagcctcgaccacctgggctcaagcaattctcccactacagcctcccaagtagctggaaccactggcacatgccaccatgcctgtgaccagtttttaaattatttgtagagatgaagtctcactttgttgcccaggctggactcaaactcctgagctcaagcgatccttgtgccttggcctcccaaagtgttggaattacaggtgtgagccactgcacctggccacgtaatctactttctgtctatggatttgcctttgtgttttttattggtgattggccttcaagtataatgctgaagtgctgtctcctgtttccaagagctagaaagctatgctgtactttagaggaaaatatattaaataagctttgttcaggctgtttgacatgttaatgaatcctcccgccttggcctcccaaagtgctgggattacaggcgtgagccaccgcgcctggccttacatatattttaagtaaggtgttaacactatataattcatctgtgtaacccaaaactactgtatccctaaggctattgaaatttaaaataagtaaataaataaggtgtctttcatcagaaacacataaaaaagaaggtgtgtactgatgatctactgacaaaaatgtgactagaggctcacaggaacctaaccgtgtgttttcctctaggagcaaaggttcaggatttgctagttcaacgtttgtagcaataaaaataatctattataccacattttgtttattcattcatcagttgatggatttgtgacctgttttcactttttggctattataaataaagccactataaacatttgtttactggtttttatgtggacacgttttcatttctctcactgcgcccagcaatgaatacatttattttatggcaaaactaaaagtttgtcaaacacccaaattcagtatgataagttagctttttataggatactgacaggttattgtgggtactccaatcttgttcagcaaggccaaattttcaaaaaaaaaaatgtagatttattacaataagggaaatatatatcttaagctatatttccatgtgttctatgaagacaactctgagaggaagttagcagtttgtgtggttggaagcctcagaaagttctcctacttctatctcttactcacctggcttgcattgcaatatttagggtaagagtcacaagcatactcgggtgcatttgaatgatggtctaagcagatctctacacctgtcgttatctgggtttgtgatcattccagtgtttcctaagtttataggatgaattggcagtaagtgacttttgttccagtcctcagctgcattataaagacaatacaagactatgctgaaatagctatttggtaaagttttgtaaacccagaagcctttttaaaaagtattgttcttcttaatctcttaattatagttttttaaaatcacatatcacttaattttgtgtgtgtatttttgtttgtttgttttttgagatggagtctcactacatcacccaggctggagtgcagtggtgtagtcccggctcactgcaacctctgcctcccaggttcaagtgattctcctgcctcagcctcctgagtagctgggattacagggctgtgccaccaggcccgactgattttttttttttttttttttttgagatgaattcttgttctgtcgcccgggttggagtgcagtggcgtgatcttggcccactgcaaccactgccttccgggttcaagcagttctcctgcctcagcctcccaagtagctggtatcacagatgcgtgccactacgtccaactgatttttgtatttttagtagagacagggtttcgccatgttggccaggctggtctcaaactcctgacctcagatgatctgcatgtctcaggctcccaaaatgctgggattatgggagtgagccacctcacccagccctaagtcttattgttttttcttttcttttcttttttttttgttgtatttttagtagagacagcgttttgccttgttaaccagtttagtctcgaatgcctgacctcaggtgatctgcctgtcttggcctcccaaaatgctaggattagaggtgtcagcctccactcccagcctgatttgtatatattttatgtttgttttattttcttttttttctttgctgtattattattattttgagatggagtcttgctgtgttgtcaaggctggtctccaacttctgggctcaagcagtcttcccacctcagtcagctgaacagttgggattgcaggctcatgccactatacctggctgaagtgttggtttttcttttctttttgtagagacaaggcctcactccattgtccaggctggtctcaaactcctgggttcaagcagtcctcccacctcagcctccccagtaactgggattacaggctcttgcctctatacctggctcaagggtttgttttctgattcttcaaagtttacttctctcagatctggagactgtgatatgtataagacaagtttcccatgtcttaagaaacttgatagctagtaagagaggtaaggcctgtgaactcaggtaactaagcaagacagaaagacagatgaagatgaggacatatgagtagaataaaggaagtgatcagtaaaggttgcatgtggaaaatgttgtctgaatcagtcgaagaattgccttcaacatgacctagagaagagcagatcatgaccgaaatccagaccttttcactggcttgattgtttggtgggctatttttctctcttttttgaatcagaggatcccagatgagggctttattatcagcctttgactgaagtctcagttatattcttgttcccagcccatgcgtgtggaatcagggatatgacttacatgcccttttaagctgctctgtacctttttgccagttatatatacatgtaactatgttaacctgccttaaatgtccactcgtgtgtgtgtgtgtgtgtgcgtgtgtggtgtagtgacgggatctcaccatgttgtccaggctggtcttgaactcctgggctcaagcaatctgcccactttggcctccaaagtgttgggattacaggcgtaagccactgcacccggcctaaaatgtcaactcttggttgagaatgaaggctaatttgcctaagaaccaacttaatccatctgttccagccagtaccaagttttgggctcgtgatgccaccaattggctggtgtgaggaagtgtttaacctttttcttttccttttgggagtttgcactacgcgtggaccagtttgtttgttttttttgtttgtttgtttttttgagacggagtcttgttctgtcgcccaggctggagtgcagtggcgcaatctcagttcactgcaagctccgcctaccgggtttacgccattctcctgcctcagcctcccgagtagctgggactacaggtgcctgccaccatgcccggctaattttttgtatttttagtagagagggggtttcactgtgttagccaggatggtcttgatctcctgacctcgtgatccgcccacctcggcctcccaaagtgctaggattacaggcgtgagccaccgcgcccagtgcaccagttatttttaccttacgacattttctcacagattcatgttctcctttggtaaccttccatcaagcctctttcaactctggtttaactagtgcaggagctctttccatccctctttcctttactttgttctctttgtaagttacaaaagagacaagccaggcatggtggctcgcgcctgtaatcccagcattttgggaggccaaggctgaggcaggtgaatctcttgagcccaggagtttgagaccagtctgagcaacaaaaaatgcaaaacgttagctgggcatggtgatgtgccacacctcaggaggctgagatgggaggattgcttgagaccctgtctttaaaaaaacaaacaaaaaaaaactaggcataagattacttctagtgtcttgtatcaagaaagaagaaagcagttatatatatatatatatatatatatatatatatatatatttctttttttttttttaatgagatggagttttgctcttgttacacaggctggagtgcagtggtgcaatctgggcacactacaacctccccttcctgggttcaattgattctcctgcctcagcctcccaagtagctgggattataggtgtgcgccatcacacctggataatttttttgtatttttagtggccacagtgttgcaccatgttggccaggctggtctcaaagtcctgcactaaggtgatccacctgcctcggccttccaaagtgctgggattacaggcatgagccacctcgcctggcctattttattttattttttaatagagatcaggtctccctgtgttgtccaggctggtctcgaacttttggactcaggtgatcctcctgccatggcctctgaaagtgctgggattacaggcatgagctatcacacccagcctctttgtttctcttttgtatcttgttcaatctctgaatctccttaaggctggcttcacctctggtggcaaaatgactaaagctacatgtccttatacctcactgtcataatgagagcatgagaggcaatgcttggcattccacgtaggagtccagcaaaatagcctgattgaaccagcttttaggtctgatgcccattgtttgttttttttgaaacagagtctcactccgttgcccaggctggagtgcagtggcacaatcttggctcactgcaacctctgcctcccgggttcatgcaattctcctgcttcagccccccaggtagctgggattacagccatgcgcagccacaccagctaatttttgtattttttgtaaagacggggtttcactatgttggccaggctggtctcggatcaccttaagtgatccgcccacctccacctcccaaagtgctgggattacaggcgtgagccactgcaccagcccacatgcccattcttgatccacttgtaggaagcactataaaagcacatgaacaaagtgcggtgcgtgttccatgaaaataaagatggcgccaggcgcggtggctcacacctgtaatcccagcactttgggaggccgaggcgggcggatcatttgaggtcaggagtttgagatcagcttcacctacgtagtgaaaccccatctctactaaaatacaaaaattagccgggtgtggtggcaggcgcctgtaatcgcagctcctgtaatccaggccgtggcaggagaattgcttgaacctaggaggcggaggttgcagtgagccgagatcacgccattgcactccaacctgggcaacagagcaagactccgtctctaaataaataaacaaacaaacaaacaaggcttctagttgcagtaggagggacgaattgagagcaagggtttaaggactaaatgcagggtgcagtacagtgtcagtgtcagtgtgcagtgctcaggaaatatttgttgaaggggaagagtatgcttcttcagtccaaggtggaagcatgaaggaaactgtaagcacattgatctagaccacagtttcaggtacagaggggagcgttaactaaagctcagagcggggaaagcacagggtgcttacaaaatggcaaatgctgtcatttaggccagaatcctactcacactgctgctgtatatcctcttcatctgtgtttaggattttgaaatgcatttttgttggattattgccccactagaaaaaacagttcagatctgttgcagtttcacatttgaaactactttcattctggaatccttatccttagaccttcctaataatttctgtggtcacactggacctgatctcttcctgtgctaaacaaaagcacacaatcacaaaactgtgtaggcataaatgagaggcatatgggagtggtgtaaaaggaactggaagagtcttaatatgcctgggtgggcgagctaaactaatagctcccagcagtttttctgaatcagacattgtggagccaggagtctagcatttggaattccactgcctgtgcaaagggtctgtcttttatcctccaaaccaccatttgttaactggttaatgacccagtggacccgttgacaacaaaggagggaaagctggtaaagatcaagttaaaaggaaaaagaaaagttcaaaggtaggaaagtaagaacaagaagggtttaatcatatcttcacctactctttattttttaacaatttattgtggggaattttgaacatacacaaagtagatggagtaatgtagtgacctcccatgaacctatcccctcagccccaataagctgcagttaccagacttaatgaaaggaaaccagaactctggtgaggcttaggtttggtttccagacctctctaggccttgtcacctttggccttatcccatcaaacacctcttttccccatttttagctcctggtgtgcacagaacactgcgtttaggctagtgatgagtatgacagtacttaacctctaatagattaaggaaataactgttattgttcaagtatggttttgagagcagaaaagtgtaattctgtcaaaggtacacaacgaagagggaacttaggaaggcattattgagaagttgacatttgagtttacagcagaaacgttgggcaaggggtagggaatgatctctgagatagcagcatacccgatctactagctctttttcaccaggctatttagagtttgacatttatgttacatttataacaaggtacatttcaagtgtagctttcctttttgctttaagcaactgagacatgtaagtcaatttcagttattttctgctaaactgtgtgtctctttgaatgttcactatcaaggtgaattatacaaggtgtgttagatccttttaacatttcagagcaaccaaaaccaagtttgaatgtctcatttaacactgtgagaggatgtatcttgtctgcatcttgtgtttcagttgtatttatcggtaaaataagccaggggagtattctgacttgcagtttaaaagctgacaggcctaggggaatgttccacaaaatagtatattttgtatatggcatggtattatagataaatgagctattgtgctgcctggcactgtcttctcccttgtgctgtcttctgctgtttctcaaggagtgattcctctctgtgttttggaaccgtgtttctcactgcctacagatgatgtccatttggcttatttcactgtcatctcatacacagctgtttcaaactgcatggaatcctcagagaactacacgccccttcctgaacaaacagtgcttcttcctgcattttcttcttaaacttttatcacttttccccccttacatatacttttgttttattctttcactaaaaaaaaaatgaggtttaattgacttacaataaactacacatatgtaaagtgtacagtttgctcaggtttggcaggtatacctgtgaaatgatcactgcaatcaagatagtcaacatatcattcactccataaagtatccttgtgcccattggtaatctctccctcccatgctccccctgccctgtctccaagcaaacactaatctgctttcagtcactatagattagtgtgcattttatagaattttatgtatatatgttttatatagatgaaatcatacaatatgcactcctttccttccatcctttcttcctttttaggtctggtttctttcatccagcataattattttaagatgtatgtatcagtagtttattccattttattgttgagtagtattctgttgtatggatatatcacatttgtttatttgcctgtggatagatgtttgagttgtttccagtctttggctattgcaaataaagcttctttgaacattcatatataaatgtttatatggacatatgcttgcttttgtcttttcttttttaaaaaaaaaagcacagatgggaaccgggcgtggtggctcatgcctgtaatcccagcactttgtgaggctgaggtgggcggatcacctgaatgttaggagttcaagaccagcttggccaacatggtgaaactccgtctctactaaaaatacagcagttagccttgcatggtggtgtgtgcctgtaattccagctactcaggagggtgaggctggagaaccgcttgaaccctggaagtggaggttgcattgagccgaggtttcagtgagccgagatcacgccagtgctctccagcctgggtgacagagcgagactccatctcagaaacaacaacaacagcaacaacaaatagagatggggttcgagcccaggctagtcttgaactcctgggctctagtgatactcctgccttggcctcccagacaaagtgttgggattacaggtgttaaaccactgtgcccagactctttttcctttgtaaatacataggaatggtgtggttgcatcatatgttttaactatttaagaaattgccaaactttttctaaaatattttcaagtacttaccatctatatatcttctttggtgaaatgtctgtttaaatcttttacccatttaaaaaaattacattgtttattttcttgctgttgaggtttttgtttgtttgtttgagacagtctcactctgttgcccaggctggagtacagttgtgcgatcccagctcgctgcagcctccacctcctgggttcaagtgatcctgaacttcctgagtagctgggactacaggcacgcgccaccacgcccggctaatttttgtatttttagtagagacgaggtttcaccatgttggccaggctggtcttgaactcctggcctcaagtgatccgtccacctcggcctcccaaagtgctgagattataggcatgatccattgcccccagcctgttgaggtttttttttaaatcaggtatataatcaggtatatgctttgcaaatattttctcccagcgtattacttgtctattttcttaacagtttctttcaaagaatagagttaaaaagattttttgtatctttttagctttttttttttttttttttttgagcagtcagaacacacacagcatttattggaagttttccatcttatatgggcacagtttgtggctccccaaaacaattagaatagtaatatcaaagatcactgatcacagatcaccataacagatataataataatgagaaactgtgaaatgtcgcaaaaattaccaaaatgtgatccagagacaggaagtgagtgcatgctgttggacaaatggcactgatagatttgcttgacacagggttgccagaaaccttccatttgttaaaaaatgcaatatttgtgaagtacaataaagtgaaacacagtaaaatgaggtgtgctgggcatcctgccatttatgcacatgcctctttaggtagaaaataatcctgtaaaagttgaggctgtggttgcctttctgagaatcttgtctacagaaatggtcaactggtggccagctagccaaagggctaatctagcccacagacatgtttagttggggctacatagagctttttacaaatttgagtcaatatttagaaaataaaagtctggattttgggattcccttacaaaaactggaaaatttggccacactgggtcatattcccacatagtcgtggtggttggggttcagtagcagtagctgctgccccttaagacaggtccccatggtccccactcagttgcttccttatttatcttacaagcctggcaaggaatttgagttgaactgatctagaagattggtgctaagaaccagctcagtggcttagctgtcctggggtctgcaggagaaggcttctttgttaggcccaggcaggaagtctgggcatggattgagttttatttttatttttttattttttctttttttttttgaccttttaaatatttatttattttattttattttatttatttatttatttttaattgatcattcttgggtgtttctcgcagagggggagttggcagggtcataggacaatagtggagggaaggtcagcagataaacaagtgaacaaaggtctctggttttcctaggcagaggaccctgcggccttccgcagtgtttgtgtccctgggtacttgagattagggagtggtgatgattcttaacgagcatgctgccttcaagcatctgtttaacgaagcacatcttgcaccgcccttaatccatttaagcctgagtggacacagcacatgtttcagagagcacagggttgggggtaaggtcaccgatcaacaggatcccaaggcagaagaatttttcttggtacagaacaaaatgaaaagtctcacatgtctacttctttctacacagacacggcaaccatccgatttcccaatcttttccccacctttcccccctttctattccacaaaaccgccattgtcatcccggcccattctcaatgagctgttgggtacacctcccagacggggtggtggccgggcagaggggctcctcacatcccagtaggggcggccgggcagaggcgcccctcatctcccagacggggcggctggccgggcggggggctgaccccccccacctccctcccagacggggcggctggccgggcagaggggctcctcacttcccagtaggggcggccgggcagaggcgcccctcacctcccggacagggtggctggccgggcggggggctgacccccccacctccctcccggacggggcggctggcctggcgggggctgacccccacctccctcccggacggggtggctgctgggtggagacactcctcacttcccagacggggtggctgccgggcgtaggggctcctcacttctcagacggggcggctgccgggcggaggggctcctcacttctcagacggggcggttgccaggcggagggtctcctcacttctcagatggggcggccgggcagagacgctcctcacctcccagacggggtcgcagccgggtgctctcacatcccagacggggcggcggggcagaggcgctccccacatctcaggcgatgggcggccgggcagagacgctccttacttcctagatgggatggcggccgggaagaggcgctcctcacttcctagatgggatggcggctgggcagagacgctcctcacttcctagacgggatggcggccgggaagaggcgctcctcacttcctagatgggatggcggccgggcagagacgctcctcacttcctagacgggatggcggccgggaagaggcgctcctcactttccagactgggcagccaggcagaggggctcctcacgtcccagacgatgggcggccaggcagagatgctcctcacttcctagacggggtggtggccgggcagaggctgcaatctcggcactttgggaggccaaggcaggcggctgggaggtggaggttgtagcgagccgagatcacgccactgcattcagcctgggcaccattgagcactgagtgaaccagactccgtctgcaatcccggcacctcgcgaggccgaggctggcggatcactcgcggttaggagctggagaccagcccggccaacacagcgaaaccccgtctccaccaaaaaagtaagaaaaccagtcaggcgtggcagcgcgcgcctgcaatcgcaggcactcggcaggctgaggcagtagaatcaggcagggaggttgcagtgagccgagatggcagcagtacagtccagcttcggctgggcatcagagggagaccgtggaaagagaggaagagggagaccgtgggccgtggtgagagtgagagggagagggagagctctttttagcttttatagcttttgttgtgtctaaggaatctttgcctaacccgagttcacaaagattttcttgtatgtttttttctggaatttctgtagtttttagatttacatgtagatctaatattttaatacatggtatgagatattaaggatccaagttcagttttttgcatatgaatatccagctgttttagtaccagttgttgaaaggactatcattcctctaccggattgtccttgtacctttgtcaaaaatcagttgtttatatatctgtgggtctgtttctggactctgttccattgatatgtttaccttatctttatgcctgtaccacactgttttactataacttgaagtgaggcagttttagtcctctagctatattcgttttcaaagttgttttaggtaatctaggttctttgcatttccaaataaattctagaattagcttctcaatttcttaaaaaaaaaaaaaagcacgttgggattttgattgggactacattgaatctgtttgggggaagagctgacgtcttaacagtttaggagagatacaaattaacaaattaaattagtgattttattttaattaatgtttctcagtagtatttttgtgtttttcctgtacaggttttatgtcttttgtcaaatttttctcttaatatttcacaatttttgatactgttttaattttttcagaatttcagtatttggtcattgctactctatagacatgaagttgatttttgtgtattgatcttgtatcctgcaacttggctaaattcacttattttaatagctttttggggagattccattggattttcttttttctttttccttttttttttgagatggagtcctgctttctcacccagactggagtgcagtggcccaatctcggctcactgcaacctctgcatcctgggttcaagcaattctactgcctcagcttcctgagtagctgggattgcagttgcctgccaccaggcctggctaattgtatttttagtagagacaaggttttaccatgttgcctaggctagtcttgaactgacctcaggtaatccacccacctcggcctcccaaagtgctgggattacaggcatgagccaccgtccctggcctccgttggattttctgtacatcatttgcaaataaggacaattttacttctttccaattatcacttgttttacttatttacttattatcagtattttctgtgttgtcactgcttcagagattctgtccttttcaattttcttttgttatcttcttggtcttagatattatcatattgttgtttgttttttttttttaattagttaatggctttctgtgaggtattctctcagtctatgttgtcttcagaaaacactggtttcattttgttcagggccatatcataattcctagctaccaattacatgaagttccaacttatttattcctccacattgggatcaaatatttcttcctgtcaataattggcatttctgtttaccattgcaacttattctagcctaggtcccacttaaaattatagttggggagagagcatcagagttgaggttcggaaatttggtttgaattcccattttgctgcttagtgtctgtataatcttgggcaagttttttaactgttaggcctgtttgcttatctgtaggaagagagtaacacaagaactttacaatatgtcatgtgaattgaaagagagaacatagaaatcatagccatgtgcctgcaacacagtgtgggtagtctgtaaatatttagtctggcactagtgtgagcaccaagtgaaggaatgaatgcttgtttgcatatcctatttctgcactgttgcttatgctgttctccaatctcttttcaggccctctgcatcttcctcatgtttcgaggtcaatgaagcccatctttattactcatttcctatcattgtttacatccctgttgagttgatatcttactaaacttagggactgggagtatatctttggaaaatatttgttttcctcaaaatgcctaccataaatgtattataggtccctaaaataattggttgattgtatagttaatttggaagcagtgcatcaaaatactttgtagggtgacagcgaagtaaggttttttttgttttttgtgttttttttttttttggtagaagacagtctttgtctgtcactcaggctggagtgcaatggcatgatcacagcttacttcagcctcaaactcctaggctcaagcaatcctcccacctcagcatcctgagtagctgggactataggtgcgtaccaccatgcctggataatttttttttttaatttttatttattgtagagatgcagtcttgctatattggctgggctggtttcccaaaggcctcctcaagtgctgggattattggtgtgagccaccatgtctggcctgtttgttttttggtcagatttaggttttaggagtgaagtaagttgaattttacatgctacagtggaagtggcagaaatgtttttgtttgattaaaagtagctttaagagaacagtaattaactttttaattttggccatcaaacaaggagggttgctcataaaacagaatgggagtttggtaactataaaccatttattaaatgttttttaaaaatcacattgtttcaacattgaatgtggtagaatattcagtatttcctttaggtttacatgtatagtcttatgtcttttaacaacagaaatatgttctgagaaatgcatcattaggtgatgtacaaacattatagagtgtacttacacaaacctacataatatagcctactacacacctaggatatatgtaaacctgtaatagtagctaacagcatgttactgtactgaatgctgtaggcagttttaacaatggtgtttgtatatctaaacatagaaactgtacagtgaaaatatagtaatcttatggtaccacctttattgactgaaacttcagctaaaaatgataaacctgattaatatgcaaagcagcccttataacatgctttttcaaaaacagcttaagacttttcagatttcgttaagaagttatatggtaacatgctgactagagaatgatttattgggctagttagcattttaaagtaaagggaatggaaaccagaagatgatgcaagggtacttttattcgttgtgttaaaaagccatagtaaaagccgtagtaatcattctaaactgttggatgcttccttagtgctgcgtatataaagtatgttaataaatttgatatctagggtacttgttagaaccctaactggcatagcctataactccagaatcaccattctaattgtattctggagttgtgctctacagtggtgctattcacatagaatataatgtgaaaggtaaccctagagttgtgcaagtagaaggtactagcttaatgaatttggctctaataagttaataaagtaatttgaacattccttgagaggtaaagtttaagatgcactgtgggacgctagaaagtaatttgcaggcagccaggaaatctggtttctggaaccagtcaactggcacctcactttccccatagtaccatggaaactttgattagatgtctcttccattgctgatattttgcatttaggtgatggattgaagtcaggaactagatctagcattgagggcactgaaaggtggttgtcatgtagtccagaggtcaagggtcaagtgattagaagcagtttgttcagaggtcaagtgattagaagcaggttaagccaaagttagactcatgattttagcagggaatgtgaatggaaatccatatacccgcccatctccattggttggagaccagcgggtcatctttcttaaattgtatatgggtgtatggaagggatttgaaattgacgagtcgtataactgagtaaggacagagaagccggactctatttttccattaggtctagggctttctagtgcttaagatgagttcttgctcctgctctgttactcaggcagtggcttgattgtggtagacacttatgacctacacattttagcctaggctgatgcctttccacagttatgttcctggtttgtttgtttgtttttagttctttctctgtcagttacaggtacattttcccaaatcatctgaactcaaaattctcctaacttttccatgaagcctttattgttctttgcctagctggaagagactttttctataatttttggtactttttacttgttactttttattatatcttgtgttatgcatacatttatcccctactatattactgaaagcagggactttgtcttagtgctacaggtttttgtttttgtttttgtttaatttgagacagggtcttactctgtcacccaggctggagtgcagtggcatcatcatagctcactgcagcctccatctcctggactgaagtgatcctcccgcctcagcctcccaaagtgctgggattataggcatgagccactacacctagcagttttctcaaactttagtgtatagaggagtcacctgaagaacttattaaagtttggattcctggaccccctattctgattacttggttctgatttaggcctgggaacctacattttaacaagttcctcagatgagcttgagtatgtgggctagaggaacatgtggtttacagcatctagcctagtacctcgttttgctcttctattgcctgagtggttaagtcagtgatcagttaaaaccaataatcattggtaactctgctagaagaaccagtcttaacacctgtgaggaactagatctattttgttcctggctacctagtattttacaggtttttgtgtttacatgaactttttgtaccctcagtttaagatgccctttgattttagttttaaatttttttttattataatttttttcattaagcctcttccattttaggatgattttaattttaaagcttctgaatactctctcaattatcaatgtatatatattgtggacatatgcatttgagttttgttgttgttttgcctttaaacttatatgtcttattaaaataaactctacagaaattgctatattcagtctttgtaggaactaacagaagaagtctttcttactaagtctttttttggggggttcaggaacagggtcttgctctgccatggaggctggagtgtggtggcacgatcttgactcattgcaacctcctcctcccaggctcaagtggtcctcccacctcaacctcccgggaagctgggactacaggcatatgcggccacacctgactaattttatgtagttttggtagagacagggtctccccgtgttgttcaggctggtctcctggactcaaacaatctgcctgcctggcctcccaaagtgctggaattacaggcttgaaccaccatgcccggctatttcttactaatacttaatttgtattaagtattagtaagacaaatttttattattattattttttgagacagagtcttgccctgtcgcccaggctggagtgcagtggcatgatattggatcactgcaatctctgcctcccaggttcaagcagttctcctgcctcagccccctgagtagctgggattacaggcgcatgccaccatgcccggctaacttttgtgtttgtagtagagcagggtttcaccatgttggtcaggctggtcttaactcctgaccttgtgatctgtctgcctcggcctcccaaagtgctgggattacaggcgtgagccaccgtgcccggcgaaaaattattattttatagtgatacacttttgtattagatattatagggaaaaccagaataagtagatacttaaagattttctggcgcaatggagtgctgaagacaaacacgtaaaatagttaacattcaaggcagttcgcaacataggaccaaatgaatggtctgcatcaataaaagtaaatagttattagagttcaaagaagtgggggagatgaacacgtactagagaacctggaaagcctccatggagaaggcaacaggagctgaacttgaaggtgttttagatttcagtcagaggaaaagagcgttcttagagggaagaacatacaaagattcattttacaattggaaaaaacggaagctcagaaaggtaaagtgagtgtgtgctgaggtgccagtctcctgaccactgctctgctttgtgcagcatttggaggtttttcattgttgccaagtagaagacaggcaacattatgataaccatatttcaaagcactgataactaaattaaattaaattaattaattaatttatttatttattcattttgaggtggagtctcactttgtctcccaggctagagtgcaatcctgtttgttctaccttgagactatatccagaatccagaatccaagtaacatcttacctttaccccttccattcttgtccataccactagcatctctggcctggattattggagttgcttcctagttgttttccctgtttccattcttgccctaccatctgttttgaacatagcagccagagtggttcaatttagtcaggtcatgtcaattctctgctcagaaccctgttaatgactcccattttactgaaagagaccaaagtttttccagtggctggaagctatctgtgatctgcttccctctccctgcccactgcttgacctctcagctcatatcctactacttttcagcttcagccacactaacttcttgcagttccttgaagactgtaggcctagtcttgcctcaggacctttacctagacaattcttttttcacctgtcctgctgcggctcatttcttcccttctctgcaaggtcaaccaggctaccttatttaaaactgtgccccatctcactttaccagcttattaccttctgatatactgtatatagtatttattaattttgtttgttctttgtctcctcttgctagtttcagagaagacagggaatcttgtctatttgatttatttttatttttatttatttgttttttatttttttgagatggagtctcgctctgtcacccaggctggagcgtagtggcgcgatctcggctcactgtaacctccacctcctgggttcaagcagttccctgccccagcctcctgagtagctgggattacaggcacctgccgccacgcctgtctaatttttgtatttttagtagagatggggtttcaccatattgggcaggctggtcatgaactcctgacctcatgatccccccgcctcagcctcccaaaatgctggaattacaggcgtgagccactgtgcccggcctatgtggtttattgatgtatctccattgcctcaaacatggtcaggcatctgatagatgcacaataaatatttgttgcatgcatgagtgaatagaatagaacagaatagaatagaatagaatagaatagaatagaatagaatagaatagaatagaatagaatagaatagaacagaacagaatgcaaggtagacaggcagtcccaactctcatgaagcttacagtttgtggtttctttactccaaatgacgttaaccatgtttttcacattttttggtatgtgtaattcaaaacctttgtgaaataataagcatttaaactttaggaagcagtgtttcttaaaaagaatgtgatcttggggtatgttttgaatcaactgaaaactataaaacattaaatagaaaagctgtgtgccaggaaaggtgattgcttgatcagtttttgaaaaatgccactagataatttttgatcttaattcattcctgtggaacacttaactacaaaatttccttgaaataaaatgcaagttattagtgggattgttagtgggattcccaaatgaaatgatttttagctctcattaagactctttctttctctttctttctttctttctttctttctttctttcgttcgtttgttttcctctaggctggagtgcaatggcacgatctcgcctcactgcaacctctgcctccgggttcaaggattctcctgcctcagcctcctgagtagctgggattacaggcacatgccgccatgcctggctaattttttgtatttcactagagatgggcttccgccatgttggccaggctggtcttgaactcctgacgtcaggttatctgtcccctgttggcctcccaaaatgctgggattacaggcgtgagccaacatactcagactttttcttatctttttgcagtctaccatagaaaaacacagaatttcatttctgttcatttaaaattctgtggtagaaaatcaaatatggaagacttttgaacaaatatccagtgttgaagcaaatgtaaatagtagatattatattgatgccaactgaggaaatatgattagacttagtcaataaatgaagctgttaacataatctgtcatgtgccagtttaaataatgaaagcattactgtagtaggatgttttgttaaatgtcctacaaggcctgtatctttctgtgcaagcctaccatgtggtagacacttaataatagttgatgataataatgctgaattatctgcctcttaaatttgtttatctgagggaagaggtgcttatttgtatataaactgctaatttatctgttagtaactgacattttttctttactttttcctgaagatttgcaattaatttaataatagaataaacatttttgtattgtttttatataggataaataatgaagcttataaaaccaggccttagcagccacactgtaaagactaaagaaaaggacattttcagttggtataaattttctttttgtttatttggtgtaaattttgaatttcttcttttttttggtctgaaaaattaatttagctcagcatggcctatctggatatactttttttttttttttttcttggagacacactctctctgtcatccaggctggagtgtagtagcagccaggatcacggctcactgcaacctttacctgctcagctctagcaatccttccacctcagcctcccaagtactctgcaggcatatgttccacaggcacctgccaccatgcctggctaattttttttttttaattttttgtagtggatacaatttttattttttgtagagatttattttttgtatttttttatagaggtctccctctgtttcccaggctggtcttgagctcctggggtcaagtgatccacctgcctcagcttcctaaagtgttgggattacaggcgtgagccactgtgcctggcctgggtgttttctttacaattgagtttaccatttgtagcagcaaaagaaaagaaaaataactccacattacctctctgtttagtttcatttcggagccagagtttgttaaaagtgtgaaatactgtgccaggctcagtggctcatgcctgtaatcccagcattttgggaggccgaggcgggtgaatcatctgaggtcaggagttcgagaccagcctgaccagcatggtgaagccccaactctactaaaaatacaaaaattagccaggcatggggtacacatctgtagtcccagctactcaggaggctgaggcaggagaattgcttgaacccaggaggcagaggttgcagtgagccgagattgtgcagttgcactctagcctgggcaacagggcgagactccgtctcaaaaagaaaaaaataaaaaagaccggaaataaaaagtctgcttgggaccaagcatggaagattatgcctgtaatcccagctatacctttgaagctgagtcgggaggatgacttggacccaggagttcaaggctgcaatgaactatgattgggtcacagcactccagcctgggtaacacatctctgagaaataaaaaatttaaaaataaaaatataataaaatggccagtgctgttgctcatgcctgtaatcccagcactttgggaggcttaggcaggtggatagcttgagtctaggagtttgagaccccatctctacaaaaaactgcaaaaaattaaccaggcatggtgacatgcacctgtagtcctgctactcagaaggctgaggtgggaggatcacttgaggtgaggaggtcaagactgcagtgagctatgattgcacccctgcactccagcttgggcaacagagcgagaccctgtctcaaaaaaatgtgtgtgtgtgtgtgtgtgtgtgtgtgtgtgtgtgtgtgtgtaagtaaaattaaaagtctgcctggcagaaaattaggtgtatattataaaaatctgtataggcactcccagtattttgaatgaaggcatgtcaacaaaactagatgtaaaaacctctctgtgaagtgaacattatttcgttactaatttttatttataaaaccagaaatactttactgaggggtaaggcagttacacttgttttttgttttgttttcttttctttttgtggagaatggggtcttgctgtattgcaggttttgaactcctgggctcaagcgatccttccacctctgcctccttaagtgctgggattacaggcatgagccactggacgatacctggcctgaggtgtaggaagaagaaataattccagtatataaagttggaaattatacaaagaaggcaggatctctagattattctgcttgtcttataattgctgggcctctaattaatttttagcattcacctgtaggtttccttttattttgagtactgggagtttttatttttattttttttattttttttttgagatggagtctactctgtcgcccaggctggattgcagtcacgcaatcggctcactgcaacctctgcctcccaggttcaagtgattctcctccctcagcctcccaggtagctaggattacaggtgcccaccaccgcacctggctaatttttgtaattttagtagagatggggtttcaccatgttggccaggctggtctcgaactcctgacctcaggtgatctgcctgcctccgcctcccaaagtgctgggattacaagcatgagccaccgtgcctggcctgatttcttaattagttgtgtagtctttggacttagtttcctgtgggttcagcaataagtatagttatcttaataaaactcatattttaggcttttcaacctcagattttctgcatatatcaaaataaattctgggctgggtacagtggctcacatctgtaatcccagcactttgggaggccaaaatggggagattgaggccaggagttgaagaccagtgtgggcaacatagtgaaaccctgtgtctacccttcccccgaaaaaaagccagacatggtggcattcttctggagttgccgctactcaggaggctgaagcaggaagatcacttgagcccataagtttgaggttgcagtgagctatgattccctcctttgcacttcagccccatcctggatgatagagcaagaccctgtccatctgtccatccgtccatccatccatccatccatccatccatccgtattcattcattgtacttaagaatgagctatataaaagtgaaaccacgggagttctagaagaacatataggtgcatattcttataatctgggacgaggaaaatctaaacatgatattaatattagttgacaaactactgatgagagcataatgtcagaataatcgaaaaattattaaaaactatttggttagggcagaatttctggaatgttggattaaggtgcttgggaaatcctccctccataaagcagataaaactggacaaatttataaaaaaaaaaaatcaaccattttgaacttgtgtagattgttcccagcagcattactaaatagccaaaaattggaaacaatccaaatgcccattaactggtgaatagataagcataatgtgtattcatcagtagaatactactcagcagtaaaaaggagtgaatcttgatacatggtacagcatgaagctcagaaatattttgctaaattaaagaagccacaaaagatgacatatcctttcatttatgtgaaatgtccaggaatagcgaatttatagggacagtgaaagcaagattagtagtggttgtctagggctgtaaagggacatgagggatcttttaggggtgatgaaaatgttctaaaatggaattgtgatgatcgtacaactgtaaatttactaaaaatcattgacttgtacactgaaaataggcaaattttatggtctgtatattatacctcaataaaacttatttaaaatgttggcaggggcagagggacaacaggttttttcccctgctgcaaaggagtagtccaagtacagcacatgtctgcagatggcatttatgtataatagatggctgctgcttttttttttttttttttttctctaaatcaggtgtcctgagagattgggaccaagagggagatagaacactggcagttggggttcatgttagggtttcagacacatcaaagacagcatccttctttgttttaagtttataaaatagggttcaataaatacctgtcttatagaatttggacagttttttccacataaagccttccagaagatactaagagctatagattttaataacttaacaaatgtaataacgttctacattgtctttgcaaataggtgtataccccaagtatgaatgataccttattttggatgggacaggatggtgaaaatggccacgatgtttggaaaaaccagttcaggggcaataatttttaatacttattagcaaagtagtcttgaaattattaattttttgtcaaaatcctcccattaaaaaattcttgaagacagcataatttgatttgaatacatcacatttaatagaaatttaattcaccctttcagactttaactcccctccccctattttaattaaatggagggattggcttggattctttctaagctaatgctttgtggtttgatcctgttaaatttattttttaaacaaacagcatattttaatttatttacccaacaaataagcattaaacatgttaatcaagacacaccacctgtcctcagagaacagtaatgggtacatttggtcaacaaataactcaaagtctgaagtactaatgtggttatttatttatttatttatttatttatgtagagatggagtttcgctgttttcgcccaggctggagtgaagtggtgcgctgttagctcgctgcaacctccgctcccgggttcaagcaattctcctgcctcagcttccctagtagctgggattacaggttcgtaccaccacacctggctaatttttgtatttttattagagacggggtttcaccaccttgcccaggctggtctccaactcctgacctcaggtgatccgtcccctctcggcttcccaaagtgctgggattacaagcgtgagccaccacgcttggccttgatgtggtcttatctgctgtcaagctacatgagttggaagctacatgagttggggtggagagttgtcaatgctgtttcaggaatcattgctcctaaaggggagccataagtctttaagtatggatagttttccaggtgaagagctcattcgacggaagtgttcatagtgaaagaaggaaatcagttggtggtctcatttgagtagagtaactgtatatcccttacttaaaatatacaattaactgttggtttattccagcaagtgaaatttttgacttccatttattttctgtgcttttttttttttttgagatggagtttcgctgttgtcgcccaggctggagtgcaatggcgtaatctcggctcactgcaacctcagcctcctgggttcaagtgattctcctgcctcagcctcccaagtagctggaattacaggcatgcaccaccacgcccagctaattttgtatttttagtagagacggggtttctccatgttagtcaggctggtctcgaactcccgacctcaggtgatctgcctgccttggcctcccaaagtgctgggattacaggtgtgagccaccacacccagctctgtgcttttgttccatcaatgttttgttgttgttgattgattctctctctgtcacccagtctggagtgcagtggtgtgatctcagctcattgcaacctccacttcctgggttaaagcaattcttgtgcctcagtctcccatcgtagctgggattacaggcgtgtgtcaccacgcccggctaatttttgtatttttagtagagacggggtttcaccatattggccaggctggtcttgaactcctgacctcaagaaatccgcccaccttggcttcccaaagtgctgggattacaggtgtgagtcacttctcctggcctgttccatcaacttttaaaaatcttctatcactattaagtttaattcttgatttttttttcctttttctcttcttgccctccctgccctttttttttctgcttacgtaaaattcttgattttaaatgatggtccacagctgctgtagtctgacttgtgtcccataagggctgatgactcaaacatcagaattgttgttcagttttaattttcaagatcacttttgagtttgattgcttccctggtttttttttttttttaagttgacaaaattttttccaagctttgtaatgctcagtgtgtgaagcaaatacacaaccatttatgaagtctttaataactaataaaactggaatctacacattgtcatataaattggaaaattagaatatcttgtttgtggagagcattttcaggttatttgacttaacaatgatgttatgagactacatggaagaataattggatcttgagctgtttaaacatgtgctaaatagaaagaaacaaagcttcagaggacctcaggtgacacctggtcctgtcttctgatttttgacagatgagagttttagggatttagataattggcttagtaattgaatcagtgaaacagctactccaggctctttctgctgaattgtaaggggaaatcagtgtctcttgaaatgtttgctgtaaaaaaaaggaagacactattttctgatcagttgtacatttcaaattctaaacatttttttgagcattgttaaacactgtcaagccgtgtggatgtgaaggtgaataagacagaatagtgaataagatagcctttgttgtcacaggagtttgcaagattatctaacatttaggaagtgagacaaatgggcttatgctgtcccctgcaccccagcaaatgtgtgaaatgtccccttgcttgtcactccacttcatcgtccttctgcacgtttaatgctgtccatacatgctgacttcctcctgcttctttctgctagtcataccttttaccatctcagggttcctatattattctgttccctctgcctgaaatacttctgaatattcttcatctccaccccatccccctttttaacctgatctacttctcctctgtcaaatttcatttcatcagagattatgtctatatagcacaccccttaactctagtccctgctgtgaagctcatagttctggtttttttctttatagcacttagtatatattattatgtttgtttgtatgataattacattacttttctcaatagactgtaagctccctgagagcagagactatttttctttactgtgtctcctgcacttagtgtaacctcagtaggtgtttgagtattagaacttttttttgtaaagctacgttgttgctataaatcagagtttagtttatgttttttgttttagagggagtttcactctgttacccaggcgggagtgcaatggtgcacagtcttggctcactgcagcctccacctcccgggttcaagcagttctcctgtctcagcctcccgagtagctgggactacaggtgcacgccactacgcctggctaattttttgtgtgtatttttagtagagacatggtttcaccatattggtcaggctggtctcgaactcctgacctcaagtaatctaccagcctcagcctcccaaagtgctgggattacaggcgtgagccaccatgcccagccagagtttagttttttgtaaagggtcatatagtgaccgtttttggctttgtgggccacacgatctctgtcccaaccctgctaatgcggcaggaaagcagccatagatagacaatatgtaaaggaatgggcatggtccttttccagtgaaactttgtttactaaaacgctaagcaggctataagtttgctgacttctactataaatcatcatcccctgatcttgttggacttgaaagcccttgttatgcaatcttgcaaatcccctcttagggttttttgaaaaatgattttatttttgtatggtagatgttaaagaggtgatttttaaaaagtctgatcttaaagtaatgtaaaatacaatcttaaatatattaattatatatttttagtttctccagtttactagtaggcatatgcttttgttaactttacatttgtatttaagtaaaacatgattcttgatattgatgttaaaataaaaagattggtttggttttgggatagattaaaatgtagattgaaattttacaatgcgtttcattttcaaaaaagactatttttgcaacctgatgcttgaaataccatataatattattttgttcttaagtgacagatgaagaaacattccaggttgctgtttgcagaacttctgtgcaagtaaggagttattacaatgaaaagcaaattcactataagcaccagtgtttatttttcttacttttttctttttttttttttttttcagacagtgttgctctgtcacccaagctggagtgcagaggcatgatctcagctcactgcagccttcgcctcctgggttcaagtgattctcctgcctcagtctcctgagtgggattacaggcttgtgccacctggcccagctaggttttgtatttttagtagagacggggtttcaccatgttgaccaggctgttctcgaactcctgacctcaagtgatctgcccacctcagcctcctaaattgctggggttacaggggtgagccactgcgcccggcctatttttcttttttcttttcttttcttttctttccttttcctttttcttttctttttttttttttttttttttttgagatggagtttcgcttttgttgtccaggttggagtgcagtggagtgatctcagcctcccaaattgctggggttacaggtgtgagccactgcgcctggctgtttttcttttttaacgttgtttgaaagtctagaatcatttttatgtgctagatgagagatttgatctgataaatcaaactcagatgtctgcatctcaagtgtatttgtagaattatttttctgttttctattaatttagattgaatgtcagagtacccattataggtattaaaatgaatattacataagaaaaaataacaacttaaaaatgttcagaattgtttaaataaaaactttagacagacatttagcagaatttaggtgagcattaaaggattcaggcagcattcaaaactggaagaagttcagagagctctgctttagaagcaggcttttataggctgaacgctgtagcaaagtaaaggaattacttgattggctgtagctaggcacttgccttatttggatatgatccagtggaaagtccctagttagaggtttgtttttgattggttaagcttaagtttcattttatgtttacattgggcttcagtttgcttactaggcactggagccagctgtctcagcctaatggctgcccaatttaaaaaaaaaaaaacattaaaatggcatgtagttgtcatcatcagagtaagaaaccaaagaagagaccgtcatgaatgggatcattagatcatggactgacacacatgttcacttaatacccacaagagtgtcttcacacttttttgtcatggatgggacttgttttctgttttttgttttgttttgtttttgatacagtaaaatacttaggagttcttgcaactttctataagttgtttacattttactccaattgctttatcattgtgtgtattttggaggtacagtttttttcctgaaccactctgaaagtggaaatatgcccttttatccctaaatacttaaatgcatatttcctgaaatcaaaggcattttcttacataaccacacataaccacagtacaattatcaaaatcagaaaatgtaataatgataccatactattaacctgattcacagactatattcaggttttataaattatttcaataatgtcttttatagctcttatacctcaatccaattcagtctgtcatcacacactgaatttaactggcatgtctctttcttccttgcctttcccctttcctctttccttttttcttctttcttagagacagggtctcattctggtgcccaggctagggtgcagtggtgcaataatggctcactgcagccttgacctcctggactcaggcaatcccccaacctcagcctcctgaatacttgggaatataggcacatgccattatgcctggctaattttttttactttttgtagagatggagtctcactacgttgctccggctggtctcgaactccttaccttaagtaagccaccttccttggcctcccaaagttttgggattacaaatgtgagccactgcggctctttaatttttcttattctaaaacagttcttcagcctgcctgcctcctcttctcccctcctggtacttttcttttcttgaccattccaattttgaatacagaccagttgttctgtacttagtttgggtttcgttgccgttaccttatgattacattaatgttacgaatttcaggctggaatactatagaagggatgtattctccttaatgcctcatttaaggaggcacataatcagtgtgtctcaatattagtgattggttaatcattgtattaaggtcatgtctgccaggttactccactgcaaaaattactatcctctttgtgattaataagtaatttgttgggtatatttagagatgatgaagttgtcctgtttttcattagttttctattcactagtagtctcagcatctagtggtgattttcttttttctaatttttaatttttttttgtagagacaaggtctcactatgttgcccaagcagattttgaactcctggcctaaagtgattgttccaccttgacctcccagagtgctgacattataagcatgagcagctgcaccctactagtggtaattttctaattccatcattgtttctgcatttacatattggcattctaatgaaggaatgctttcctttcttccttgttgattggttaaaaaaattaaatatggattatgctctaatccattactatcattatttattttgatgcttaaattgttgcacaattccagtggtagtcccttctaactggctttagtgttcttttgacatacccctgtcatttttgagcagtctcttactttcttgcccaaggtgttgcatgcttatcttttttttttttttttttttttttttttgagacagagcctcactctgttgccccggctggagtgcaatggcatggtcttggctcactgcaacctccgcctcctgggttcaagggattcttctgcctcagcctcccaagtagcttggattacaggtgcctaccaccacgcctggctaatttttgtatttttagtagagacgggttttcaccatgttggccaggctggtctcgaactgctgaccttgtgatccgcctgccttggcctcccaaagtgctgggattacaggcgtgagccactgcgcccagctgtgtgcttatcttttactttccctgccctaccagagatcagctatttctccaaggatccttggttttagtagaaaatgtagtttagaaatcaagatctgggtgttcatttatagaaggggtcattgcttctagaacctctcagcaaacagctaggaagtgtatgtatgaaagtgtgtttgcgtgtgtatttctatgtctatatattttttgagagacagggtctcactctgtcacccagggtgaagtgcagtggtgggatcatagttcactgcagcctcaaactcctggtgtcaagcaatactcccacctcagcctctcaggtagctaggactgcgggcatgccccaacacgcctggctaattttgtaattttttgtagaaatgggatcttggtatgttgcccaagctggtctcaaactcctggcctcaagtgatccttccaccttggcctctcaaagtgttgggattacaggcgtgaaccactgtgcccagccacatttaggtcttttatttctctctctttttttttttttctgttttgagacaaaaatcttgctctgtcgcccaagctaaagtgcagtggcgcgatctcggctcaccgcaacctccgcctactgggttcaagtgattcttctgcctaagcctcccaagtagctgggatttcaggtgccagccactacgcctggctaaatttttagtagagacggggtttcaccatgttggccaggctggtcttgagttcttgacctcgtgatccactcgtctcggccttccaaagtgctgggattacaggtgtgagccactgcgcctgggcgcgctctctctttttttttttttttgagactctgtctcactctcgctcaggctggagtgcagtggtgcgatcatggctcactgcaacctccgcctcccaaattcaagcgattctcctgcctcggccaccagagtagctgggattacaggagtgcgccatcttgcccagctaatttttgtggttttagtagagatgaggcttcaccatgttggccaggctggtctcaaaactcctggcctcaagtgagacatcttcctcaatctcccaaggcgctgggactataggtgtgagctgctgtgccaggcccttatttctcttttaatgtataggttctgctcctaactccctccatctccctttttttccttaagaatctggattgcttggactataaagttttccacattctcgactttgctaattgcatcatcatcttgccattaacatgttcctgtgtcccctcaatgttttataaatttgctcaatcgtattgttttactttttttttgggtaaagcatgattcattaggaggcatattaatttccaggtgtctctcgttttataatagtggcaattggtgatcattagattcattttttcattagggatttgcaaaatgatgatattccagatatattattttgtcatttactagttggattatttcaatagagatcaatttttcgccaactgtttgggggggcggcgattcttgaatctttattttagattcgggtacatgtgcagctttgttacatggatgtattgcatagtggtgaggtttgtgctcctagttagcctatcatcgaaataatgaacattgaacccaacacttttctccaactatttgtttaactagatgtacagttcatataggaaagacagatgaaatgcttgattcatcagattttagaatgagtttggttctctagtattctctgaaagataagtaatcaattagtttttttaaataggtattattatgaactcatgatttaaacattttattgtgtttcaatcaattgcagcttctttttttcctttctttttttttttttttttttttctgagatggagtgtcactctgtcacccaggctggagtacaatggggcaatcttggctccaacctctgccttcctggttcaagcgattctcctgcctcagactcctgagtagctggaactataggcatgtgccagcatgcctggctaatttttgtatttttagtagagagagagtttcactatcttggccaggctggtctggaactcctgacctgaggcgatctgcccacttcagcctcccaaggtgctgggattacaggtgtgatccaccactcctggcccaattgtgatttttgttgttgttgttgttgttgagacagggtcttcctctgtcaccagcctggagtgcagtggcatgatcttggctcactgtaacctctgcatcctgggttcaagccattctcctggctcagcctcccaagtagcttggattacaggcgcccaccaccacacccagctaatttttgtattttttagtagaggcggggtttcaccgtgttggctaggatggtcttgatctcctgaccttgtgatccacccaccttggcctcctaaagtgctgggattacaggcgtgagccattgcgcctggccaattgtggtcattttttattgctcctcaaattaccccatctttgttagtgggagcctcttcacattaactctctctgagtccttgggacataactccagaagtgattgatggcctgattgctttctgttatgacaagttttgtacattttctgccctatacctggagttgactattttcctgaagagctctgcttccttttattggaaaatgctatttaggatccataatctgagtgctagaagtgaaagacccaccttgttttcctttttaaataacagtatttatcacctcacatggtttgtatgggtcataattctgaggtgccttagttcgatggtagtggcttggtgtctgctgtcaagatggcttacttacattgtaggcaatttgataccggctattggcaagatgtctcagtctctccccatgtggaaggctcttaggactgcttgagtgtcttcacaacatggtagctggcttccttgagaacaagtgatccaagacagccagcagcatctttggattcattttcttgtcagcagtggggtgtagtgctctagctgtgaattcagacaacctgatgctgacactagctatgtggcattaacttgtttgaacattactttccttagctataactttgagacaataatacctaccttataggccctttaacataggacctttgtagcaatgcagggaactagaatagtctctgacacttagtgagtacacatgacaaacactgaacctgctggtgttactattattaccaccatcactggtatgaaatgaagccctaaaacctagtaattaagttgcccttgacagaaatagccttccttcctatttgtcaaaaattgccatgacagaaatattgtttacagattgcagatatatcccaagtatggtagaaggttaagggttagagaattataaccacacctgtttgactatatatatatatatgcaggggatctttcatgccgaatctgtattcatgtagattttagtataggatatgtgtcatgtaatgtgacccaggaagaagccaagacccccgccttcccctggccatctttttttgcttttgcttttgctttttttttgagacggagtctcgctctgtcaccaggctggagtgcagtggcatgatctcagctcactgcaacctccacctcccgggttcaagcaattctcctgcctcagcctcccgagtagctgggattacaggtgcgtaccaacacgcccagctaatttttgtgtttttagtagagacagggtttcaccatgttggccaggatggtcttgatctcttgagcttgtgatccgcttgcctcggcctccaaaagtgctgggattactggtgtgagccacagtgcctggcctttctttttcttttcttttttaaagatggggtctcactgtgttgcccaggctgatctcaaacgcctgagctcaagcgacctgaccaccttggcctcccaaaattgcccaggctgatctcaaacgcctgagctcaagcgacctgaccaccttggcctcccaaagtgttgggattacaggtgtgagtcactgcacctggctaccaccacccacaatcttttaactttttattttaaaatgtagattcacaggaagttataatgaaaaatgtacagggaggtccgttggacccttcactcaatttgccccagtggtaccattttgtgtaactatagtatggtatcagttgtcaaccttcgatttttatttagcagaaattgactgagcagctattatatgctagctctttgaggtataaaggattaaactctgaccttatgggtttctgtcatctctctggattttcattgttattgttcttaaaatattttttattttggcgactcattgttgacacttatattagcagttattttaatgttaaatattatgttatttctgacatttatatttgctctgttttaaaacaattttgcattgtgtccccatcttccatttataatctttacagcatcagaaccatgttgcctgcattgtcttattttaatcacgtgccagttttgcagtgctaccaagtctggatctgagaggcagcttgtgtgaatcatttacatacatttctgtttatattccccaaattaatttgcaactttatatttttcatccaattatatgttcaaaacatatttttaataattgattttaagaaggaatttgttatattaggatttaaaaactggctcaaaaaacagaagctattaaacaatagcagaaaccagacagtatataggactttaaatggtaattgctaaacatttgaatgttcccaaaaatgtgagtctgtgtgtctctgtgtgtctctacgtgttattccactagggatttgcacagataggttttgcacaatatccttgctgttattgtcagccataaacaaattacacgtatttaacaagttaatgtcagattggccaggagccactgggaggtgtgtacttagtgacatcagctggcaaagagccctggtaacagggagggttggaagggtagtggagagagaggaagcaggagggagggagaaaaagagagagactgactgtatctggggattctggcaaggtgaagagctggtctgtttggcaggaccttcccatctgggatccatctgtgtttccctggaatgggacaggcagctctagtcagtgagaaatcgcagatgtgagagagctgacacatgtccagctaatgaaaggaggaggaaggctggtctccgattgagctttgaagattaggaggagaaaaagaggagctttggaatatctatttcaaataaatttggtgtatttaagaatctggattgtttataatttgggcatttggggtaagtacattttaatatagttttgggggttaaagtgcacaattctctgcctttcaaagctttttacttctttcaaattacgatgatatgaatgtttcttggtatttgatacaagagttcagcctttctactcagttttattttaatgcttcattttatttatgtttctatttttctgttgccaaccttatatttgaatgtcatgcttttttgaatgcaaggtttacttaataattagatgtagtatatgaattctacagctagaaaagtagtcccacaaatatttctgtaaggttttccacgttggattgttctgtgatgtttagagggaatttttttcccctttagtatgcataatacaaataggccatattaaaaagatggctcataaaacgctcttttctattgtcagattttatttcagtatatgcaggcaaattataactaaaagaggttgaagcaaaactaacagcatctcttcgttttagatatatctaacagtttttcatttacattttgctcctatgctgttttcttctgttttcttgctacatataaaataaataacatcaatgaatctgacttgaattgtgagtttggggtagttttgtgatgcaataaattcatgtgcatataactacgtactgtgttctgtagtcctggttagtttgtgatgcctattttagatttttgctatttcttatatataagaaatagagatgggtctcactgtgttgcccagactagtctcttaaacttctaggctcaagtgatccttctgcctcagcttcccaaagtgttgggattgcaggcatgagccactgcacctggccactttttactgtttccatacattgtattcatgtttttgaggccttcgaatctaggcttcctttccatgttctatggaaagaacatgagtttgggagttacacaaactgtgtacccattatttactagttctgtaatctcaagcaagccactgttctctttgaatctctattttgtgtaattcctgactgatgttgttattggggaaatttgtctggcacatagaaagcatacaagttggtttcaagagttctagatgttcactttttttgctgcgatagattcctaaaccccttgcatttttaacttcagctcctgggcaagaatgggtctggcctgtagttctagttttcagggcgcccttcctcttgctgtactcgtctcagattgtctgcatctattctaaatgttctatgctatatttgccaaactataccagaacagaagaactttgaaaaagtcaacaagcaggagtgaggtactgaattgtactgctttgtgacgacactgttgaaattgttccccccactccgcgacctcccgctggaaaattgtttttcccccgtgtattacaagtcacgcaaaaattctaccatttctcaaatagaaactttaaaaaatatttttattccttaaagttcttcagcctttatttatattaattgggtaattaagtggacagtatagtactcttcaatttcttccttcaattttatagtcagatttcttgaggtggaggggacttttttctttttctttcttttttttttttttccgagatggagtctcactctgtcgcgcaggtggagtgcagtggcgcggtctcggctcactgcaacctccacctcccgggttcaagctattctgcctcagcctcccaagtagctgggagtataggcgtgccaccatgcctggctaatttttgtatttttagtagagacgggttttaccatgttggtcaggctggtcttgaactcctgaacttgtgatccgcctgcctcagcctcccaaagtgctgggattaaaggagtgagccaccgcgcctggccctctttttttcttttctcttttcttttctttcttttttttgggacatggtctcaaactctgttgatcaggctagcatgcagaagcatgatcatggctcactacagccttcactcttccggacttcagtgatcctcccaccctggcctcctgagtagctgggaccacaggcacgcaccaccacgcccagctaattttggtagtttttatacaggtggggttttgccatgttgcccaggcttgtctcaaactcctgacctcaagcaatagagccacctcgacctcccaaagtggtgggattgcaggcatgagccaccacgctgacttgaaggagacttttaaaatggaacttttcccaagttttcttttcttttcttttctttttgagacggagtctcgctctgtcacccaggctggagtgcagcggcgcgatctcgactgactgcaagctccacctccccggttcatgctattctcctgcctcagcctccagagtagctgggactacaggcacccgccaccacacccggctaattttttgtatttttagtagagacggtgtttcaccgtgttagccaggatggtctcgatctcctgacctcatgatctgcccgccttggcctcccaaagtgctgggattgtaggtgtgagccactgcgcccggctccaagttttcttttataccaaattgactaaaatgattttgtaaaaatttgggggcatctcttttgataggtgcattgttcaacaagcatctttgggacttttctgaatacttgagaggatatagtgtttatactgaattcacatggtactccttcagtgagaaaacactttccattgtagcctaggagacatgagtggggagaaaaggacttaatgcttttctgtaggatagggcctactatagagggcctgaaaaggggatttcatatgactatgtccatgctaggaatactttggatgctagagtttcaggaaacataataaataagaaaaaatatgcattttaggatgtgaagattcactcactgtaaataaagttgggtgattaaaagtcttgctaggaccagacatttcaggagagtattgcttgctactgaggttataaccaagatacatttgagttgaatactggagaaaatcatgattctttctgaagattatggaagcatcatgagaatcttactactaggaggaaattctcctaaattggcttccagtaatgacccaagcatattttcatagcgagggtccttgttggactggaggcacataatgcaataatgccaataaactggagatgaggataatgacatttaagtggctttgcgggaacatcaaaaaatacatttgagtgaacgaatgtatttaatacacaactggaaaaattcagttggatccgaaagattggttgggtcagttcattgatggttattctaaggctactcagtgctcataagttcccagagatgacctatggacaatattagggttggaaaggatcctttggataatctagtcaaacacattattttatagataaaataggaaagttgagggaaagataatgggatggcaaatagtctccccagcccagagttcaatatcctcctggttgctggctgagcttagactagaattatgttgagtttccaggacacccattttacgaatgttattttgaattgcctgttgtatgtgataatatggtaagggattttttttaaaaggtgaaatctcatagaggagataaagtgtacaaaaagtggctgggcgccagtagctcacacctgtaatcccagcactttgggagaccgaagtgagcggattacttgaagtcaggagttcgagacaagcctggccaacgtggcgaaaccccatctctactaaaaatacaaaaattagccgggcgtggtgacatgtgcctgtaatcccagctactcaggaggctgaggcaggagaatcaattgaacctgggaggcggaagttgcagggagctgagatcatgccactgtactccagcttgggcaacagagcaagactcagtctcaaaaaaaaaaaaagtacaaaagtagtaagtcctgaaaattagcaccaactgtaggaatcagagaaccttcctaaaggaggtcgcgtttgatcagaatttagaaggacaggaaggatttggacttctcatgtttggaaggagcatagtggcaggatggaaaggttccctttcttctagagccttaaattaaactttattaaatgcataattacatagtattcatttctaccatgttttgaagtatgtctagctgttgctgtctttccaaatccaagatcagttgtttacttctgagatacttacctttatgcatgcatagccgtcttttatatgtgtgatttatataccaggaagctgtgatttaaaagattgctaccatgatggactctgtggattgtttaattttccctccaagttcaagtcagtaaataaaggaattagtggtggttgtatcttgcagaaaaacaacatattataactggtgtttgtattttcactggctgatggactttccaaacagcatttgacttttgagaactatatgatgacacagattgatactggggaatttaaaatgcatatggatttaattttcctaaagcatgccaaaacctgaaaaagcaactctttgtgttttgtttaaagcaacagctcgtggaaatcctgttatcgttcaatcctcagcagtttgttatagatgcctggcaaggtgggatgcagttctgtatatgtatacatattatctgcagttgtctctcgtagctggagctctgcagtaaatggagtgtgtacagtagtctccccttagtcgaagtttcgctttccagggtttcagttacctgtggtacagtacgctaagacattctgagagagagaccacattcacataacttttattacagtatattgttataattgttataatgttttattcttgttaatctcttactgtgcctactttgtaaattaaactttttttttttttttttaatttgagacggagcttcactcttgttgcccaggctggagtgcagtggcgtgatctcggctcactgcaacctccgcctctcaggttcaagcaattctcctgtctcagcctcccaagtagctgggattacaggcatgtgccaccacgcccagttaattttttgtatttttagtagagatggggtttcaccatgttggccaggcaggtttcgaacgcctgacctcaggtgatctacccgcttcggcctcccaaagtgctgggattacaggcatgagccaccacgcccagcctgtaaattaaactttatcgtaggtatgtatgtataggagaaaacatagtatatatagggtttggtactgtctggggtttcaggcatccgctgggggtcttggaacgcatctccttcagacaaggcggggactattgtattttcatttgattgtggtagtttggacagatggagagaagacggtgaaagattgtgtgtgggttttgacattaggctgtgtaaccataagctgatttaaccttcacctctaagcctcagttttctcagctgtaaaatgggaataaaaatgagttctaaggatttaattagaaagaaattagcatgatacttcctgcatcagcactcaataagatttctctttccatgtgatttttcccagtcccccaaaaacattgaagtcacaataactaaaagatttacttaaaatgggagtcttggatatttttactgtctcacttgagactgacagggaacccagttccctaactaattctaagtcatgggagaagggtgcgtgtagagaatgctgtagagaatgcggcagtctttaaaaactcaaacctgttgctgtgtggcaagctgttaacatttagggaccttgcaccacttactctgctggaagagctgggggatgggctgctttgagggtgacagatgtgtcctctgctgccggcgggcgcgtgcctgctctgtccctctgctcccagcaccaggtgcagccattgttctggctggtctctcttcatccggcctcgtctgttactctgctctttctagctcattgtttctgtaggaaattagcattaaaaacccatctgaaacccccatgtccctcaactgcaggtgactgttattggccccagctgccacccttgcgcttgattacttccatatgggtctatgcaaagaagtagtagccatttattgatttccaccacaaccccaacctctattactcaaactataataccctgaaatctattagacccccagtaggctgtatagctcagttggcgctacaactgtgatgaacattttacaagcaaaactaattacacccttttccccacccccatcacctcctccctaaatattaaatgtagaaacaccagagtgtcataagtggaatagtaaatcttttaaatgtctggaaatgaatctgtttctgagtagtaaagcttttagactttggatgggattttatggaaaattttagtcactgctttaatatttcatgccacacccataatattcaagcaaatcgtggcccagtgcccctagggtgggggtagggcacacaaaaattttcatcacttgctttttggtttgttaaatttaatccagtgggcagtatgttaggaaaggggcctagtttaaaaggataatatgttttgtgggagaaaacaacatgcagtcattgttaaatgctttaattttgcattattttgttgtttgttctctgtgtttacacaaataattgttctagtttactcattagaataaataccacaatgagaaggtcgatgttttagacttctttcttccttcatcagtaaacaaacttaagtgttccactttggttattgttctaaatcaagattgtaatctcaaacaggtaataagttctcagcttcaaactctagatagaatttcaaggacaatccaaagttgttattgactcctgatgaattgtattgtgaccttgacaaagtcactgccctgtcagtgaagggtattctggtagcctttacaagtcaatagcccaggaaatcaagggggaggtcattgacttttgcctgttgagagtttagcagtgtaacccagttttaaagtaaaatcttgagtttacagcattttaaattaaattatttaataatttggaaaatttaaagtaacaatttcaatgttttaagcttagctgcatagagcttttatcataaggaacatagggccatttctgttggaagaaatgtctttttggctttctttctttatattctatttattttggagtttaaaaaggtactaaagccaggccctatggtgtgtgcctcttgtctcaggtactcagaagcctgaggcaagaggattacttgagcccagtcattcaagacaagcctgggcaacatggccagacctgtaatcccagcagtttgggaggccaaggcgggcgatcacctgaagtcaggagttggagactagcctatccaaaatggtgaagccccatctttactaaaaatacaaagaaactagccaggtgtggtggcacatgcctgtaatcccagctactggggaggctgaggcaggagaatcacttgaacccaggaggcagagtttgcagggagccgagatcatgccactgcactccagcctgggtgacaagagcgagactccatctcaaaaacaaacaaacaaaaaaagatactagaatttgaaaagcccctggcagccaacattttacgtgacagctcctatgaaggcaagcctctaggtagagcaatgtgattatatttagaataggttaggagttgtagtatttgaagagtttttttcagagctttttaatctgctccttcgttttaagcagtggagaaattgaaaggtagggaagtcagtaaaggggaagagttgagatttgaaacagagccttctctgactccaaattaagtgtactttgatttgaagtttggagctagtacatgttgggaatgttgatcagtattgctatagatattgtcgtcttgaggtgagtacatgtgctgttaacccttctttctggtacttaggaagaatgggggtttccttctgtggccttactgattctttcattctgtcattgtacatactgagaaacaaagttaaatagtaaaaggagtttgcagtctaatgtgagactcattttcttttcatctgttttaattttattaagttgtcctctctcattcctagggctaatgccacaatgaaactggaaataagttttcttgcactgtgaatgtgaactgaggtttccacaagcaaactgtgcttctgtctccccaagtagagaagcatggcaaataaccacaagtgctttgtcggggccccaggcttctcacttacctttccccagtcctggctctgttcttcatgtctaaagtaagggaggacaacagacttggtgtgtgtgtgactgaccttctagaaatgttaacttccatctttatcttggagaatgaattgaagtgtttccctgcctttccatccaagggaaccatctctaacaacaaatctttttaagtgggtctggaggggggacagagaattggtgatttgtcttggtaattatgttgttttttggagtcagtttcaaacacttcagtaaaaatgtttaaggctcttcaacttttttggtttgtttcattttaatgtactactttattctattttctcacattttgtacgcacaaatcaatagatactcttaattgaataagtgaaaatagtgggtgagtttaaagatagatgtttcgttttccttattttgatgattacttttaaaattttaatgtgtacttgacataaaatctaatgtcaattcatatatccatttttttctttaagtacagaagtcttagaacacttcaaattcagtaactttttcaatatattaccgctgtctaggattttgtttccattttgtttgttacactcccagccaaaataatagttaccattatttttaaagctattaatttcgatttaccaatatatttattgaattatctggtcactttgcatatttatcacaattttccttctaggttaataattcattcctgccaagtgtatctgttaataattcttggagaatctgtaagtagtacactctttttgctgatctgaagatatctttatttcacctttacttgaatgatagttaaatgtggttagagtgtaaaggttgacagttattttccattagcacttgggagtggtgatttcttttcttgtgttttgtttgtttgtttggtttgtttggtttttgagatggagtctcgctctgtcgcccaggctggagtgcagtggcacaatcccggctcaccataacctccgcctcccaggttcaaacgattctgctgcctcagcctccagagtagctgggactacaggcgcctgccaccacgggcctggctaatttttgcattgttactagagacggggttttgccatgttggccaggctggtcttgaactcctgacttcaggtgatctgccaaccttgtttatatgaggaagtccctcataaattttagaataatatctgtaaagatggtggtagggtattaatgttaataattttggtaattatactgggcttataagtaaacatcctaactcttagcatttacacactgaaatatttaagcataagggagtgtaatgtttccagcttgctctcaagtggtttagataaaaatataggtagatagagaaaaagaaagtgatttttataaatggatgaattaattggtgaatttagctaaatgatattaacagaattatttgaatagtcttgcaaataaaaatgtttctaaatttgaataaaagaaagtactgagcccattaacaaaaaaatatgtatatgaaattaagtgttaatttaggactctctgaagaagtaaattgagctgtgtgctgaataacaataatgaaatagtcggtggatgtcagtgataagaatattccagtgcaaaggctcaatgatgggaatgaactcagtatgttcaaagaatagaaaaatggccgatgtagatataatgtagtggacgaagagaagagggtagagagacaggagacagaagttcatgtagagcttttaaagccagcataaagctttgtaatccaatgaatttggatttcattctgagtgatgggtaaccattgaatagttggggcagtaatgtgatctgatttatattgtataaagatcattcttcctgtcatatagagaaagaattttatagggcatggctggaagcagcaagaccagaagtgaaaagtgacaagtttggcccagctttatggcagtgaatatagtagaggacagatgatttgttatattttagaggaagttaagttttctgaacttgttgatagattgaatgttgagagggagaggggtgttttcaaataattgtcaaatctgtcttccttattattcatccattcatttgaatatttaggtgcctactgtgtgctaggcattattctaggtattggagttacatcaatgagtaaagcaaagcccctgccctcatggagattaaattctagtagaagagacaggcagtaaagatgattaataagtaatatatatgtagcctaaaatgtatgtttatgtatatttaggatgttttttaatgttacaaaaaatgaaagcgctaaggagaaagggaaagggtttaaggagatccaggttagtttgaggagggtagtcaaggaggatcctcactgaaaggtgattattttaagaatgcaaagagatgatggatgtaagtgttcagtactgtatgtgacacattgtttctcagtttttgagtactacttcttcttcttcttctttttttttttcttttgagatggagtctcgctctatcgcccaggctgaagtgcagtggcgtgatcttagctcactgcaacctctgcctcctgggttcaagcaattctactgcctcagcctcccaagtggctgggactacaggcgtgcactaccatgcctggctaatttttatatttttaatagagatagggttttaccatatttgccaggctggcctcgaactcctgacctcgtgatccgcccacctcagcctcccaaagtgctaggattacaggcttgagccaccacacccggccctattattattattattttgacacagggtcttaactcttcacccaggctggagtgcagtggtgccatcatggctcactgcagccttgacttcatgggctcaggtagttgtcccacctcagcctcccgaatagctaggactagaggcatttgccaccatacctggctaatttttcttatttttttttttttgtagaggtggggttttgccatgttgcccaggtgggtctcaaactcctgggctaaagcgatcttcccatgttggctgcccaaagtgctgggattacaggcaagagccaccataccagttcctgtctagatattatgatgaagattgaggatggtagtttttgtggagcacaatcctgactgtacctgtgatgttgcattcatcttttggaacataagcagatcaccaggtgaatggctaaagaatctggaataagcttgaaagaaatacaggtcctggcaaggcaatggaaaggtatgtgtgaaacattcatttctaatagaggactaatttaataacagaaatatactcttccctagaaacaatttgctttaaaggccaggcatggtggctcacgcctgtaatcccagcactttgggaggccaaggcgggtggatcacctgaggttgggagttccagaccagcctgaccaacatggagaaaccccgtctctactaaaaatacagaattagccaggcgtggtggcacatgcctgtaatcccagctactcgggtggctgaggcaggagaatggcttgaacccgggaggcagaggttgcagtgagccgagattgtgccattgcactccagcctgggaaacgagtgaaactccatctcaaaaaaacaaacaaacaaaaactcttataaaaagttgttttctttttaagcagggaagcctgacttcattggcattttgagatggaggcttctgggcaaaagaagaatttcatgggggtattttgagatgagtatgatcaatctagtcaagagatggggaaggtctaagctttgtctcttgtaggtggaatggagaagggcaaagggtttgaattttggttgtgtggtgtgaagaatgattggtcttaaaacagatttaaaatgaaaagattaaactgatcaatgttttttatgcttttaaaaaatgtggctgataaagcgtttttgtgcttttaaagggagcctggatgaataggctttggtactgtatgtattgtattaaacatttggagtggcaaaataatttctaaaatatttctagcaacttcattttcattttatctgcaggatgaaaaagtaaatttggggattgttgattaaattagcaaaccatatggttgtttgcgcagactgactgctatgcgaggtagctgtgttatttttctttcaggatatgctgttgtatctgatgccagtgttctgaaacacttattttctagtcaacagtaggtgaagcaattatttctagtcattatggtttttcttgatgccttaattaatgtcacaatttgtgaatgctttaccctgctgtttaaaattagtttaatattttaaaagattaaatcttcacatttatgtaatgcttcccaacctcttttcacatcatagcatacatagaaagtattaagttctgattggctgtcccaggctgaggaaatcattatctcagtaaactgataatcattcttcataactctctggcgttggtccctggcacacagcttgggaagttctgtcttaatagaaaagatatagaaacctttctgtactgtattgcagttagttaagaggaattaggaaagagttatagagtctttcttaatagggttttttttttcctttttcgctagaagcctaaatctcaccaaattatcgggtgttatactaggaactatggttataagagtgaagagctcaaggaactcacagacagacaggcacagaaacaaatcacctgtggcacaatatgacaaatgacatcacagaggtgtttatttttatttttattttttgagacagagtctcagtctgtcgcccaggctggagtgcagtggcgcgatctcagctcactgcaagctccacctcccgggttcacaccactctcctgcctcagcctcccgagtagctgggactacaggcgccagccaccacgcctggctaatttttttttttttaatgtatttttagtagagacggggtttcaccatgttagccaggatggcctcgatctcctgatctcgtgatccgcccaccttggcctcccaaagtgttgggattacaggcgtgagccaccgcgcctggcctaagaggtgtttataagaagctgtaagagtccaaatgtgggaggttttatttctgtcaaggtgcacttgagtctaccagggaggacttggagttagaccttaaagtaggagtttctaaagtgccagagacagggaaagcagggcattgcaggtggagagcacaacctgttttataggctttctgcctccttaatatctagcagaggtctcatcttaatataaaagtagatactggaacttaggagtttgctctgatggcagacatggatacttgccctgccagagtgcccatctaccttccatttatgttgtttggattcagtctccactatactatagccttatatttgcatggtgcttttaattttcaaagctttttatccaaataacagcccctcagggataggaaataaaagccagctggtagtgtttttatttttatagaggagaaaactgagacatcaccatcatatcagcatttcatttcccagataagaaggtctttttttcatctcttgattgcaaagggtgctgcccaacaggaataacctctcccaattttctgggcacagcccagagtgctgactgaggcagccaccaggagggcgccagcaaggcagacagcatggctgctgatcacagagctaacagctcgacatctgcaggctgcagctgtacatttttgctacagcacatccgtatttctgctcacacttgtgaagaatcacagagtttggaagaatatgagttaaaccgttccaagtgtataagtgtgctccatctctgggagttttattctgtactgggtggagtggtctatgagatcttatagctgctacttttctctgtttatttattgccatatttagtccatcttccctgtcctaattttagttcaatgccaaaaaaagatggagcactccataatagatgaattgagagggtgctgattgtgtcactgaaatgtttgccaaagaaattgtttttctagctgattttgttctgcctccatctttcagtctatttggaaaacacagtagagtacctggttatctttcagagtgtcattgttaaataatcatttcagtaagcagtgatggctgttgatcattttagacttgtgcctatactaagtatttatccatttttctaatatacctggatttttaaaaatattgatggataaaaactttctggattgttgattttgaggaggtataccaagaagagaagggtgatcttggtgtggagccaacatctttgaaatcttggcttatttgttcttactccttaaggcaccccattgccactccttaagcccatgtatttgacagtggggctttttgtcagaagcctctctgattgtcatttggggacttaaatgggctcctacataacagcttctatgcttcaattttctaacttgtccagggtgtgcttcagctgtagactgtgtatttacgttcatatatttgtgaagaaagacaggaactatatagtagaatgtgaagtctctctgaactgtaatcaatgtgttttattaaattcttggtcacaatgtgcaaacttcattgagtcctacaataattaattctttttgcattatttattttgctatagtatggtctctggagctcagcagagctgccatttcttagccatatgacttgggacataatttttgacttctctgagccttagcttctggttaaataaagtggtattggagatggtaccttctactgtcttagtgtcatttaaataagaaaatattttagcaccattctttgcgtgtaataaatattttgttatttctaaatgaatatatgaagatggagagtaatggtagctattactattatagttatttcctgacttgtatttatccttcccagcaagaaagtcttgtcctactcaaatcttgggtaaatatgaaacttgcttcattatcagtgtggattgagaaggtgtgtacggtgttcctgggcatctgaagaaaggcttttaaatcagctttcctttgtggtcagttggtcacaaataacatcaaaatatcaattgttaatattcatatttattttttcctttacagctgactactttagtattggtacacctaattaaaatttttccacctctaaaattttttctagggcaatttatatatgattgaattaatttacattgagtattagtttccttggtttttaaaaatagatccccccaaaatggtaaggagttgagaagttaaggctgtgagcaaatagagaatttgggcctaaagtttaatgtggaaatgagaagatgatttcaattgatttgtagaaagaaccataatgaagggaattttcttaagtaaacttatgtttgtacccatttgctactatttttctcttagagcttttagcactttctccctgtcataaggttgtagagttgccatactctgaggtgtcccacaaggctagcacaacagccctctgcttgtggtgcatacagctatcatccaaaggggccaaccacatgacatggcagtgtatttccagatgtcattctctctgtttggatgacttgggagcttaagaagggtattttctcttgaataggagaaaaattgttactttggcataaggcccactctggcaccattcccacatctgttattgattagaagtgaatgctggtcagtcaggatgcaagagtgctggtccgattatcaagctcagccttcaggatgaaatactgcaggaaatctgaaggatggcataaactggctctacacagtctttaaaaagaccctttcataagctattgtacaaagacctggtgtaaagaaatagcctgagtgatgtctacatgttaagaagatgccgtaacatgtacatgtaggatctattcttagaggggagcagtggaatgggtggtggaatccttatgcaatgatttttaaaatatataataaacatgcacagatactaagtgttcaacccaatgagtgcctttttggtttttttgggggtttttttttgtttttttttttttttaaggaaagcgtctccttctgtcgcccaggctggagtgctgtgattacagacataaaccaccatgcctggtctattcatgtttttaatttttaaatttttattcaattttttttaaaatttagcgatggggtctcactgtattgcccaggctggtctcaaacttctgggctcaagcagtcctccagtctcagcctcccaaagcattgggaatacatacgtaagccactgcacccagcctgttcattttcttaatggtgtcttttgatgggcagaaaactttaattttcgtgaagtctaacttagcagtcttaaaaattttatggtttgtgcttttttgcttaccaccaggtcataaggatattctcctattctttttgtagaaattttatggtccggggtattattttacaacccatcacgaatctttttttttttttttttgtatggagtgagagaggattgaggttaatttgtatctatttggacatcgagttccagcaatatttgctaaatagacttttctttccccattgagttgagttgacacctttattgaaactcactttgtgtttggtggttcgtcctccaaccctgtccttcttttttgagattgctttagctctttggtgtcctgaacatattatacagacatcttggtacatcttggtgtctctctctctctctctcttttttttttttttgagacggagtttctctcttgttgcccaggctggagtgcaatggcacggtctcggctcaccgcaacctctgcctcccatgttcaagcaattctcctgcctcagcttcctgcatagctgggattagaggcatgcaccaccatgtctgactaattttgtattttttttagtagagacggggtttctccatgttggtcaggctggtctcgaactcctgaccttaggtgatccatccgcctcggcctcccaaagtgctaggattatgggtgtgagccactgcgcctggcctcttttttctttttttaatctaatgcagagatattcttgaattttaaaaacttttacaaaattgggaatatacattttaggcgtgtaaatttttaaattttaagtcctaactgtattttaacgttggtagcctattattatcaaaacatagtcattctgtgtaacgcagtaagaaatatctaatagttggttttacttaataaactttactaaataaagccagtatgtactatgtactatgttctggccactggacttggcacttggaatatggtggtgatcaagatgaacgtggccccaactctccagaggcttacaacctaagaggccgaaattggcctcttctgaaacaaaaatagacaaatgatgcatttcaggccttgtgatgtgaacagaaatttttttatattcttcattacgcagcagctgatagcagcatcacaatttgataggggccaggcacggtggttcatgcctataattcagcactttgggaggcccaggtgggcagatcacttgggtccagcaattcgagaccagcctgtgcagtgtggcaataccctgtctctacaaaatacacaaaaaattagccaggcgtggtggtatgtgcctgtagtcccaggctacctaggaggccaaggtgggagaatcaccctgagcccaagaggttgagactgcagtgagcagagatcacaccactgtattccagcctgggtaatggaatgagcccctgtcttttatttatttatttatttttaaaaaggcagactccatttgggtaggatgtatgtgcagtatacagataacattgctgtttgtttttgaatgaaaatgtttcctgaagccatagcatgagtattggaatgagtatatatgtctgccctcccttcccctcccttgccctcccctccccgtcctgtccatccatcccgtccctccttctttccttctttctttcctgtcttgagacagagtttcactctgtcacccaggctggagtgcagtggcgtgatctcggtgcactgaaacctccacctcccatgttcaagtgattctcctgcctcagcctcctgctgggattacaggcacacgccaccacacctggctaatttttgtatttttagtagagatggggtttcaccatgttgatcaggtgggtctcaaactcatgatcttgtgatccacctgccttggcctcccaaagtgctggaatgacaggcatgagccaccaggcccagccatgtctgtcattttctttgttaacctaatttctaaagattactcatcttttaaacttctttgaaacaagttgtttcatacctgtgatttgtactgtaactcaaggttttttgttttttgttctttgtgtgtgtgtgtgtgtgtgtctgtgtgtttgtcgtctttgttgttgttttgttttgtttgaatcctggggaaccagaggtgttagcctatgttttaaaactcacatttggcaatggtatcaacagctgtcacactgaataattgtcatgtcattataagggtttctgttgctcactaatctgtaggtataaatctggattttaaccacatgtgattggtaaaaattagttcttgtgagagattctatgctgtgtaggccatctgttccctattctcaaacccagaatgaaaagttagccttagaatttgcaaatcagtgaactaagaggtatgttataataggaagatgggctgactgaagtctctggagctaagctgggacctgtatgtgggcactgctggcagaaacataagtgtgtgtggataaactcttcattagtggaaaggaatcttagttttcggctgattttcagtggtgggcatgaccccaaacagaatctgagatgatgtaataatcatctgtgatttgattgtacttataagattcagctaaatcttcccttttttgtcccagtctacttgagatgtaccttccttgaacccttattgcccagctacatcatgaactccttgaaggttggaatatcagcttcaagtttgtgtcccaaacacttagtacagtgcttgggtcatgttagccttttgatgatgttgatcaaatgaatcagcagccgggcgcggtggctcacgcctgtaatctcagcactttgggaggctgaggtgggtggatcgtctgaggtcaggcgagaccagcctggccaacatggtgagaccccatctctactaaaaatacaaaattagctgggtgtggtggcacattcctgtaatcccagctacttgggaggctgaggcaggataatcacttgaacctgggaggcagaggttgcagtgagccgagaccacgccattgcactccagcctgggcaacaagagcgaaactctatctcaaaaaaaatgaatcagcaaggtaacttcttgcattaggaatgacagcacaggccgggcgcggtggcgtacacctgtaatcccagcactttgggaggctgaggcaggaagatcacttgaggccaggagttcaagaccagcttggccagcatggcaaaaccccatctctactatgccgggtgcggtgactcacacctgtaatcccagcattttgggaagccaaggcaggcggatcacttgaggtcaggaattcgagactagcctggccaacatggcaaaaccccatctctactaaaaatacaaacattagccaggtgtggtagcacgtgcctgtaatcccagctactcaggagcctgaggcaggagaatcacttgaacccaggaggtggatgttgcagtgaacgaagatcgcaccactgcactccagcctggatgacagagcaagacagtctaaaaaaaaaaaaagaggaaagacagcactaccttttattaaacaacttctttctttccccatattcccttctagttttttcttatacatgtgcatactctttccattttattttcgtgagtatacattatatccagctctttccttttacattatatcaagaccttttctgtgttgctatatatttatctgtcattatttcagtggagaagtagacccagaatgtgcattgtttttattaatatcacatgccattgtttccattagattgtgttaccatctaactatcctttgtacaagaacactattgtatcgatttgaaaaatcaactgaaaaatcagttgttttagtagtcattactacaaagttgtaggtacatgataattgaccttttcccagggccaaaggccaagtcccaagccataaccttgcctggatttcattttctttatctgggtagactgagtatatgactttatagtttaaagttctttgactaatcgttaaccttatttggggagatgaaatgatttttatgaaccagtaatttgaatataatgtatgatgaagttttggggctttttttccctttaaattaaataatttagtaaaattttaaaaaattatcttgtttccaaaaacggataattacatataattgaaaatgaattatttgttgaattggatatatttaagttcttaagtcaacttgtttggatttagatggtgacccaagtctaccagcactgcatttagtaaccatttcattagacagatgctgtctacagggtgtgctgttatattatgcattcatcctcagtacttgactgtcctctgggaggccaagtgtctcaaaatcctgtaagcactttcctgtaccccttctcataccaaccatgccacactgtgaacttgctgtgtatttttccttcttgattgcataccttcaccattgtcatttggtttaagtgattttatttatttatttatttatttgtttgtttgtttgtttgtttatttatttatttgagacagaatcttgctttgttccctaggctggagtgcggtggtatgatcttggctcactgagacctctgcctcccaggttcaagtgattctccttcctcagcctcctgagtagctgggactacaggtgcctgccactacactcagctaactttttgtatttttagtagagatgaggttttgccatgttgtccaggctggtcttgaactcctgacctcaggtgatccacttgcctcagcctcccaaagtgctgggattacaggcgtgagccaccatgctggccagattaagtgacttttttttttctttttttttttttgagacagagtctcactctgtcgcccaggctggaatacagtgatgcgatcttggctcactgcaagctccacctcccaggttcacaccattctcctacctcagcctcccaagtaggtgggactacaggcgcctggctaatttttttggtatttttagtagagacggggtttcaccatgtgtttgccaggatggtctcaatctcctgacctcctgaactgcccgtctcggcctcccaaagtgctgagattacaggcgtgagccaccgcgcccggccttaagtgacatttttaagagtttaagatttttccctcagcccatcaggtaagctctagtcagcttctttagctggcttcttagtagaagtaatagcaataataatatagatgatggtggtcatgatggcaattataaccataatatattttgtaaaatggtgtgcagtttagaacaggattactagcatcatttcctgattacagaacaggttggagacagaggcagacttaattgcttattttatagagcttgagccactgttttggtgtgtttaagcatttactatataccaaaacatgatatcctttaaactaccagtgggattttgacagggtaacttagatgccttttatcatattaccaagttgctgagattgtaacccagggcatttggtctaatttgggagcatgtttccattcatctctgcagctcagatggagaagggctggggtttagggcttctgacctcaaaccttgttttttttctgtcatgcttgcagggtattttaaataccctgtcctgttgttccctcaacccaaactacctgttaaaattttggttttgaaaatgaggtccctatagctagatcatgctgcctgtgtgtgaagaaagactaacatgttaggaatgcgtggcattcaagtaggtgtctaataattcttctggagaaaagcaaatttagtcaaaaagcaaatgaaaatattttataagcaatgtttcaaaatgattcaaggaaattggtatttacctcttatccccatcgtgtcatcagttccattgtcatgttctttgaataccgtgagcatgtgtctattttttaataaataattgtaatcatactacatatatataggaaggtccccccatacagcgttgtattatatgcatttcgccaagtgttgaatgaatgatccttcataattacaatttttaatgcctttacagttcacattgacatgctgttccaccgtttaattaaccattctcttgtggtataaattgctttttcccttgagctgttttcttaaggacagatttccaggagtgaggtcacacagtcaaacattatgaacatttttctagcagagaaattattttttaacctcactaattgaatgttggtaccttgaaatacatttatttctgtgctttttgtacctagtacattagtaattggatactggaactaatggaagcgaacaagcatgtagataatctagaaagcattatagtcttaactggaaatacataattattttctctcaaaattcaccatcccattttgttatgctttggcagagcaatctagaactatggcagagtgatggttgaggaaatgtggggaaatttatattaaaaccttagccgtggtaaattgaaagttaacttttgaagcaaagcttaactgtagaagaaaaatagtgattatttctcatgtttgttgctgaattctaggttttattcttctaccttctttgcatatatctgtctctaaaaaggtagctaattaatgtgttatggtaatttacagtatgcaaaaggactgccagtgcagatgtgatctgatcaatattgtgattattatcattattatcactgggttttcttgtttgtttttttgtttgttttgttttttgagacggagtcttcctctgtcacccaggctggagtgcagtggcacaatatcagctcattgcaacctctgcctcccaggttcaagtgattcttgtgcctcagcctcctgagtagctgggactacagggacggggtttcactgtgttgttcaggctggtcttaactcctgacctcatgatccgctcgcctcagcctcccaaagtgctgggattacaggggtgagccaccgcgcccagcctattatcattgttatctcggttatagacataggaaaactgaggttcctgttgatattattgccaaaacaatgctcttgatctcattctatctttctctgaggttttaagcagaacctggttgtatgtgagccatttatattctatagcagatttttgcattggctgtgagttcaaaatagataaaaattttaagattgcttcaaagtcaagagattctatataatcaaaaatacttcttggttaaagcataaagggccaaggtgacgtgtttggaaagtatagatagaaggctctgaattagggaaaagtcctgtaattccacagaggtatgtattttgacccttaatttctcttttccttgaaggttcataattaaagcacagaaattcagaattgtcatagtttggaagctatgaacttgagtgatagctttctcaaaatatattggagagtttcatagaattgtctctacctaactctgaacttcactatttattttattttatcttatttaattttatttttgagttagggtcttactctgtcacccaggctggagtgcaatagtgtgatcacggctcactgcagccacaaccacccaggctccagtgattctgcaacctaaacttcccgagtagctgggactacaggcaccccccaccatgcctggcgaattcgatggcatcttttttagagacgaggtctccctatgttgtccaggctgttctcaaactcctgagctcaggcaatcctcctgccttggcctcccaaagtgctgggattacaggcgtgagccacggcacccaggtttgttttttatttttttgttttgttttgttttgttttgttttgagatggagtcctgctctgtcgccaggctggagtgcagtggcacgatctcggctcactgcaacctgtgcctcctgggttcaagtgattctcctgcctcagcctcccgagtagctgggactacaggcgcctgccacaacgcccggctaatttttcatgtttttggtagagacaggctttcaccgtgttagccaggatggtcttgatcttctgacctcgtgatccgccccccttggcctcccaaagggctgggattacaggcgtgagccaccgcgtctggccaatttttgtacttttagtagagacagggtttcaccatgttggccaggatggtctcaatctcctgacctcatgatccgcctgcctcagcctcccaaagtgctgggattacaggcatgagccactgcgtccagccccgtacccagttttaattatattttcttaactggacctatgtggaaaagaggttgtatgcttccaagacaaaaattgaattatttcacatgtatttccttttaacttgttatgtctgggctgttttggcatttaaagccattaatctcaactcatgatttctgtcccaaggaaaatgagagtcagatgttcacatctggaccatttgtttcattcaagtagttgaaattgcattagaaaattttgatagtgataaagtcaagaatttagaatgaatcattgaatcctcccattgaaagggaagatcaaaacctccaactttatgtagaactatagactgagagaactattactttttgttgatttttcttaaataacattactgaggtatgattgacatgttaaaaagctgtacatatttaacatatacacctccatgcatttgggaataagtacacccctgtgaagccatcaacacaaaagtttcctcttgacccctttattattattttttgtgtatggtatgtagctattttaaagtattgttagtctttgttttaactttgttgaagtgttaattaaaatgatgaacttgcagaagaaaaagtgaacattttaaactattttttataaatagaatagaaacaggtgcaaatgaagaaatatatatatataaatatatatagatcaacaaatgaataatgaacaaatatatatgttaatgtagcatatattaatataatatatatgttaaccacaaaagtaccatggccattcagctcgtgatatgtatttctttcttttacctttatttttggcctgtttgaaagatttatgctacattatattttcctttattccttagattactttaaagaacaacactataattaagagcagtacaccctaaccaagtaaggttgatcacacaatggcaaggatagttcaacattaagaagctgaaaagggctgggcatggtggctcacgcctgtaatcccagcactttgggaagctgagccaggtgtatcacttgaggtcaagagttcgagaccagcttgaccaacatgatgaaaccccgtctctagtaaaaatgcaaaaattagccaggcatggtggcaagtgcctgtaatgccagttactctctgaggcaggagaatcacttgaatccaggaggcagaggttgcagtgagccatgatcgcgccactgcactccagcctggaggacagagtgagacttcccctcaaaaataaaaataaaaataaaaacaagaagctgaaaggaggaaaaaaaacccatttccataaatacatcccttcccctaaaaaaatgcatttgattaagctgaagacctatttctaataaaaacaagtaaaaagcaagtttgtggtaagtagaaacttcaaggttatacatgcaaaatgtggcttaaactagagctgcaacataaaagtggtgaagaacagcagaggacagttggagctgtgggagatgcacaaatgaatgcctctggcatggagcttcagggttgaaaatcaaacactagaagtccagccaggcacagagagcagccagttgcagaggggacatctccctttgtctttatctgttgtggagatgtttggtagtcccttacccccaatgcattgtaataaagcactccatttgtatatgcatcttaatagtcctcaatgatttaggcccacaaaatgatcagttaagagagttacctttattttgtttactttcaaaaaaataagaataaacccaaactcaattcttaatttctcagcctgaacagtgtgaggtcatagttgtccagatttctctggaaacgagtaaagatgaattcgtttctttgtcatgggtctgtactataggttgttctctttttatttcatttgattgtaaacagcaactctggcagctgggcaatattgaatgattgctgtaaacaaggaaacagactttgaggaggaaatatccccactatcagagagctaacagagcctcaatttcaatcctgatctgtctgaatccagccactgcctcatacccacaccagagctgttcaattgaaatataatgtaagcaacaaatagaggccacatatgtaattttaaatattcttgtaaccttattttttaaaaaagaaacaggtgacattccttttgataatatgtttaatatactaagaaatttcaatatataatcattataaaattattaatgagcttgtttacattcctttccttagtactgtttgaaccttggggtctggcatggtggctcacgcctgtaatctcagtgctttgtgaggccaaggtggcaggatcacttgaggccaggagtttgagaccagctagtgagaccctgtctctaaaaaaaaaaatagaaaaattagctggacatgttggcatgcacctatagttccagctacttgggaggctgaggtgggaggatctcttgaacccaggaggttcaggctgcagtgagcctaggttatgtgactgctcttccagcttggacgatgctgtctcatctttttttacaaaaaaaaaaaaaaaatctgcaatccttttttcctgtgcacaaacagcttccagaaaatagttaaaagaaaccatcaaaccctaaggtaattttttttaagtacctgttggcccaaacagagggcttaattagcggcaactcttagaaaccagattgcgttaaacacatctagctttgtttttttttcttggcccccacaaaggctatgcgcatgccccaggaatatacttcttctttgattgggcacaataagattgttttcttcaaatatttgagagtggtaggaccccagaagaactcttaccaactgatggtgagtgccaagatcttctcatttatctggcagtggcatattccatctctgcagcaaggtaaagccctgggtgctagaagttccttcacagaacctaggtgtcagccagtcatggatattgtcctgtggcttcccataaagaaagctaaatctttgcttcgtgctactcctgagcatgcagttttgatttttgtggttctccatctcaaaacaaaagctgatgggctgactgggcctttctttgcgctgggggaatattaaaaactcggtttttcaaatattaaggtacatggagccaggtggaacccaggctcttttaaagattgatgagggcaggtgcagtggctctcgcttgtaatccgagcactttgggaggccgaggcaggcagatcacttgagaccagaagtttgagaccagcctggccaacatggtgaaaccccatctctactaaaaagaaaataaaaatttgccgggtgtggtggcaggcatctgttaattccagctacttgggaggctgaggcaggagaatcacttgaacccgggaggcagaagttgcagtgagccgagatcacaccattgcactccagcctgggcaacaagagtgaaactccctctcaaaaaaaaaagtactgatgaatagctgggcatggtggctcacacctataattccagtgctttgggagcccaagacaggtggatcacttgaggccggaagttcgagaccagcctggccaacatggtgaaaacccatttctacttaaaatagaaaaaagtagtagtccctgctgtagtcccagctactggggaggctgagacacaagaattgcttgaacccgggaggccgaggttgaagtgagccgagatcccactactgcactccagcctgagcaacagagtaaatctcaaaaaaaaaaaaaaaaaagaaaaaaatgatgaataaatatgtacaaaaagaaaagaaaaatatttgtcacatccaagttaactgaggatggcaatgtaattaaaaagaatggtttgaactcacaattggctttgtggttaccttactacttgaaagacgggactgggcacatataccatttcattggacaaacttatttttacttaatagaatataattaaaatgcaaaagttaatagcacattaaagtttaatagttttctttgagacagagacattctctgctctcttttgctcctcagactggtcttcgtagtcttcaggttgctaaaatctgatactttcccaagtccattctcatgaacaattctacatcccaattgtggcggggtgggaggggggggcctcctgtaagtcatggtcattctgtgttcatgctgtctccatttccaaaaacgctccagaatctctagatatatttaaatcttccccaacacacttggtccaacatgttgcttctgttttcattgtctgtcaccatgcctagggcacagcaaacaagagtagtggattgataacaagtgttagttgatgaacatgaaaaaaacgacataggccgggcccagtggctcatgcctgttatctcagcactttgggaggctgaggtgggcggatcacgtgatatcaggagtttgagaccagcctgaccaacatggggaaaccccatctctactgaaaatacaaaaattagccaggcatcgtggcacgcgtctgtaatcccagctactgtggaggctgaggcaggagaattgctggaacctgggaggcggaggttgcagtgagccaagatcatgtcactgcactccagcctgggtgacaagaacaaaactctgtctcaaaaaaaattttatatatatatatatataattatgtaaaaattatatatataattatgtaaaaattatatataattatgtaaatatatatataaaattatgctatgtagttctgttaatgcatgatattataaaagcacagttgtaaaaaggttacatttactctaattctaggccacagactattcagttagtcctaaaaattcatgcaacatcgccaggcattgtagcacatccctgtagtcccagttacttgggaggctgaggatcacttgagcccaagagtttgaggtcagccttggtaacaaagccagacctagtgtcttcgagaaaaaaaatacaaaattcatgcaacattacttgacactagggagactaagtaagtatgaagatggagttatatgaatgggtcactgccacttaaaaaaacccctcaaaaatacatgaactattaatgagttgtagtgcatataaggaagacagaataatgtcttatatatcatgactccattaacctctataaagaagctgaatatctacatcttaaaattgtagactaatggagacattattttgtttatattaactctctacctaggcttttccattgtaaagaagctatatttatctagatccatcctcccccatacacacagagctgtttttctttcacattgaaaaattatgaccaggcaccctggctcatgcctgtaatcctaatagttgtgggaggccaaggcaggcagatcacttgaggccaggagttggagaccagcctggccaacaaggtgaaaccccatcactactaaaaatgcaaaaattagctgagcttggtggcatgtgcctgtaatcccagctactcaggaggctgaggcaggagaattgcttgaacccaggaggcaaaggttgcagtgagccgagattgtgccactgcaccccaacctgggcgacagtgagattccgtctcaaaaacaaaaaacaaaaaaaacctattacataataaactgatttgcaaatctcttgactggattttttttttttttttttttttgagacagagtctcactgtgtttcccaggctgtgcagtgacatggtctcagctcactgcaaccttcgcctcctgggttcaagtgattctccagtgtcagcctcccgagtagctgggattacaggcacctgccaccacgcctggctaatttttgtattttcactagagacggggttttgccatgttggccaggctggtctcgagctcctgacatcaggtgatctgcctgcctccgcctcccaaagtgctggtattacaggcatgagccaacacgcccaaccttctgactggtttttaatacaagatagctagatttttatatctgcttctgcattaatcatgtaatctctgtaaaaagctaccattcactcatgaaagagtaaaaaggataaatgacctcttcttgctacgattatgaaaattgttttgacctttccccttctgtccacacatatcccaaagggtctccagggcccccaacggtcccaggaccatattttgagaactgctgagtagatcatggcattcaagccaaggtaagtttatgttttattgtaagagcaataggaagccattagaagagttcaggtctgtgggaagatctgttttaggttttaaatcagcactttggatactacgtgatgaatggactgaaggggttaaaagcagaagcagaaagaatagttaggaggcagatgaagcagtccaggtgagagatgacagtggctaaattctagcaatagagatgggagacatgacatactgtgacatatttaagagctggactgtcagaatttactgctatatttctttcttttctttttttttgagacggagtctcactctgttgcccaggctggagtgcagtggcgcaacctcggctcactgcaacctctgcctcctgggttggagcaattctcttgcctcagcctcccgagtagctgggactacaggcgtctgccaccacacctgtctaatttttatgtttttagtagagacagggtttcactgtgttagccggaatggtctcgatctcttgacctcgtgatcctcctgcctcggcctcccaaagtgctgggattacaggtgtgagccaccgagcccggcctactgctagatttcctctagaaggttctgtgttccgcagacatttagcacagatgtatcaaatgctggaacccaagagacctggctttttgaatcgtaggaaagccattaactagctgtgtgagaaattgatagcgtttttccctgtctcccgaaaaaaaagtgaggtttatttttggccaagaagactaaagttagctgattctccatcagtctcagattctctgagttctctgactttggctgcgtatgtgtggcccaggcagtaatgtgacacacctttaagtggttgggattcagtcgattttgattgtggtaggggtggcttccatacaaaggcaagatgctaatcaaatttaatttaagtcttttctgttcatgtgagaaatactaagctggtggagacctgaaacagatggtgtgcagttggagtagataactatattattctaaataaatatttgctggagctgggaagcaacaatccatatttcattttttccctatttacattttcaggtcagctgtgttgctactgtttttaacttgcattaaggttatcaacagacttggcaattacaatatatctttaaatgttgaaataattagcattggaagagaccctcagcacgtagtgctgtaatgattcttaatgcatttctggtggatagctgtctaataatatcttacacttgaaaaaattttttttttgagtcggagtctcactttgttgcccaggctggagtgcagtggcccaatcccggctcactgcaacctctgcctcctgggttcatgtgattctccagtctcagcctcctgagtagctgggactacaggcgcacaccaccatgcccagctgatttttctatttttagtagagacggggtttcaccacgttggccaggatggtctcgatctcttgaccttgtgatccgcccacctcggcctcccaaagtgctgggattacaggcatgagccactgtgcctagcttaaaaatcttatacggtacttgttttttaattttcattttttttttaatttattttttttgagagcgggccttgctctgtcacccaggctgaagtgcagtggcacaatctcggctcactacaacctctgcctcccaggctcaggcaatcctcccaaggagctgggactataggtgtacgccaccactcccagctaaatttttgtatgttttgtagagatcaggttttgccatgttggccaggctggtcttgtacttctgagctgactcgatccacctgcctcagcctcccaaagtgctgggattacagacgtgaaccaccatgcctggcctacagcactttttaatctgttactttatttgccttttaacacctcccttcctctgttttacaaatgaagaaaccaaggctctggcatgacttgtccagggttccacagtagctgataaattggcagaaaaatcaggattcacagtcacagtttcatgcccagttttctttcttccacaatagcctacctttgactattcaagaatataaatctctagctggtctggaatttggctgttttgccaaactgaccttttcatctcatcttttgctgcatacagctttttatatttactgtatattctgtttcagctaagagatggtcttaaattgagggagtaatgaaaattttatattaactctttcctggcttaaggtgctgtagccactgtatctgtctcagttaagttctggggcgagatctgtgtgcagtctcttaaatgttaatatattctttgttacacataatatacttgttctcaccttcattgtacctgtattcttaatgatactttgatgaaagcaggttttcaaataagtaggtttaaaaaggcattttattaatcactggtctaatcattataataacctaaacagctagcatgtattcctatgctctttgtatatttattcttgaaattcacagtgcttacagcccggtagattatactctttacttggcttctggtttttccccttatttccttggcttttctttttcagtctctttttttagtttcttgtctttcatgatctctaagagtggaaatacctgcagatctgtacccacttccagtaagatacctgttctcaggctttccgtagaatctatatgccattatttgaaaatatttcatcacaacttcagactttcccaccccaggcctcagctccacacttttatatccagctgcttatccagcatttctgttagaatatctactgagcattttaaaggtaatcctgatcttcagttgctctttccccattttcctttaccagttcctccttcttagtaaatggtaacttcatccttccagttgcttaggctaaaaacctcaaaattgtttcttgacctctgttttttttttttttttttctttctttttttcagtctcatctgtcaaccaggctagagtacagtggcacaatcacagctcactgcagcctgaaactccagggctgaaggaatcctcctgtctgagcctccaaagcagctggaattataggcaagcactctcacacctggctaatttttttttggttttaattttgtggagccggggtcttgccatcttgtccaggctggtctcaaactctggactcaagccatcctcccaccctcagcctcacaaagtgctgggattagagatatgagccactgtacccggccttttgacctctattttgtatttattttttatttatttactgctgtcacctcagtagtagaagacttagtagttactcgaataattttgaataaatagatgagaaaattctaagattcaatttaggaaaagttactcaaattccttatttaactgcattccactacctgggggttatgttaagacaggggtctccaatcctcaggctgcataccggtatggatctgtgacctgttaggaaccgtgtggcacagcaagtggtgagccagtgcattaccgcctgacctctgcctcctgccagatcagccatggcattagattctcattaggagggcaatccctgttgttaactggacatgtgagggatctaggttgtgcactccttatgagaatctaatgcctgatgatctgaggtggaacagtttcatcctgaaaccactccctaccccacccccagttagtggagtgcaatggcacgatctcagctcactgcaacctccttttgtagttcttcggtaggtacatggcctcccaagtagctgggaccacaggtgcatgccactgtgcccagctaattcttttattttttgaaaagacagggtctcatatcggggaatctgccccaatattcacgtaggttcttttctattttcctttagcatcggccagcttgagaaataaagggacagagtacaaaagagagaaattttaaagctgggcgtccaggggagacatcatatgtcggtaggttccatgatgccccacaagccgcaaaaaccagcaagtttttattagggagtttcaaaaggggagggagtgtgcgaatacgtgtgggtcacagacatcaagtactttacaaggtaatagaatatcacaaggcaagtggaggcagggcaagatcacaggaccacaggaccaggcaaaattaaaattgctgatgaagttagcaccattgtcattgataacatcttatcagaagacagggttttgagataaaccggtctgaccaaaatttattaggcgggaatttcctcttcctaataagcctgggagcactatgggagactggggtctatttcacccctgcagtctcgaccataagagacaggcgcacctaggggggccgtttataagcctatacatccaggcgcgtattctctttcccagggatgttccatgctgagaaaaagaattcagtgatatttctcccatttgcttttgaaaggagagaaatatggctctgttctgcctggctcatcagcggtcagagtttaaggttatctctcttattccctgaacaattgctgttatcctgttcttttttcaaggtgcccacatttcgtattgctcaaacacacctgctgtacaatttgtgcagttaatgcaattattacagagtcctgaggcgatatacatcctcctcagctgacaggattaagagattaaagtaaagacaggcataggaaatcacaagagtattgattggggaagtgataagtgtccataaaatctttacaatttatgtttagagattgcagtaaagacaggcataagaaataaaagtattaatttggggaactaataaatgtccatgaaatcttcacaatccaccttcttctgccatggcttcagccggtccctccgtttggggtccctgacttcccgcagcagtctcacttcattgcccaggctggttttccagctttttaatcagttatagcagaagtcagtaaactgtggcccactgtcggccaggcatggtggcttacgcctgtaatcccagcactttgggaggccgaggcaggtggattgcctgagctcaggagttcgagaccagcctgggcagcagggtgaaactccatctctactaaaatacaaaaaaattagctgggctcagtggcatgtgcctgtagtcccagctacttgggaagctgaggcaggagaattgcttgaacccaggaggcggaggttgcagtgaacagagatggcgccactgcaatacagcctgggcgacagtgagactctgtctcaagagaaaaaaaaaacctgtggcccactgtccatttttgtgaataaagattgattacaacacagccaagcccatttatttgtatattgtctatagtgtgctacaatagagcaaaaaaatatttactgtcttgcctttggcaggaaaagtttcctgattcctgagctataataatgataaattaattttccagtatatgtataaacatggaatgtaaaaaatttattttttctatcagtgttggtacatgttaaagtattgattttgttttaattgtgctccatcttctatcttcaaaggtccttgtaaaatactttctggtaatttcccttttttttttttttgagacggagccttactctgttgcccaggctgtagtgcaatgaatggcatgatcttggctcaccgcaacctccacctcccaggttcaagtgattcttctgccagccatagcctcctgagtagctgggtttacaggtgcccaccaccatgcctggctaattttttgtatttttagtagaaacggggtttcaccatgttggccaggctggtcttgaactcctgacctcaggtgatccacccacctcaacctcccaaagtgctgggattacaggcgtgagccactgtgcccagcctctggtaatttctttgagtccttatgtctccatttttgttgaatgataaattgtttgtcattataaacagttgtttctggccatctcggcatatgaagcctgcgtgttattaggaagttggatgtgttgtcagatttgtggcagagttacaaagatggtaaatgctcatccttaagcatgtactatgtccataatcagtttagccaactttataaggctataaatgtaacagtaattttgatgtttcttcctccatctttagcaagttagaattatcacttttggaaagtttttttttttttttttttttttttttttgtgatggagtcttgctgttttccaggctggagtgcagtggcaccatctcaactaactgcaacctccacctcctgggttcaagcagttcttctgcctcagcctcctgagcagctgggattacagacgcctgccaccatgcccagctaatttttgtttagtagagatggggtttcaccatgttggccaggctcgtcttgaactcctgacctcaggtgatctgcctgcattggcctcccaacgtgctgggattacaggtatgagccactgcacccggcctggaaattcttaccatatgacaattacacattcagaacatttacctatgcttggcagtgattgaagagaggctatggtccaggaaatcttttccctgatttttccttcagctgtgataccacctcttgggggcactattcaaactatatcccatgtgctacctggagagcccatgtagcctttccagcaaacaccttaacattgtgttaagacttgcctggccgtcgtacatggtaatgtttctatttctttattttcccagtactgtatgtctgtctttcccataagtgaggtccctccctaccttcatctctgaacttccctaaggcctggcaaatccaggacagtcaagtagattgggatctggatcctcaaaatccaggaccaaattattggaaataatccaattgttcattgacaagggattgtttaaatgaactatggtacctcctcaaagtgtattatcatattgttttttaaaattgtggaattaagaattccaggacatattgtgatattataaaacacaataatagaaccaaaaaaaaaaaggaacattataatttgtatgtggtgtagattagttgtctattcctgcataacaaaccatgtcagaacttcatggcctaaaatgataagcctccccgctcccttctgttagtctaatccgcccacctcagtctcccaaagtcttgggattacaggcaggagccacccacgcccagcctgagagtctgatttttgttttttttgtgggttttttattgttgttgttgttttttgtttgtttgtttttagacagagtctcgctctgtcgcccagactggagtgcagtggtgcggtcttggcttattgcagcctctgcctctcgtgttcaagcggttctcctgcctcagcctcctgagtagctgggattacaggtgtgtgccaccacgcccaactcatttttgtatttttagtagagacagggtttcaccctgttggccaggctgatcttgaactcctggcctcaggtgatccgcccgcctcagcttcccaaagcgctgggattacaggcatgagccaccgtgctcagcctggagtctgatttttttataaagcaatggatttaatggcttccttggccagcttctttggaatgatcagtgttcctgtcattataggaaagatctctatatggatctttatagatagatctaatatagaaagatctatattctgcatattttctcagtcatgataaacaggaacacttgaccagatcttctaccccacacagcatagataacatctcaaactcggtaaactgttattctaatagatttttttttttttgagacagggtctcaccctgtcactcaggctggagcacagtggtgtgatcacagctcactgcagcctcgacctcctggactcaggtgatcctcccaccccagcctaatgagtagccgggaccacaggcatgcgccaccacatccagctaattttttttgttgtttttggagagatgaggtctccctgtgttgcccagcctgttctcaaactctgggcttatcctcgtgtctagcaattctcccgtctcaaggtggtttggattacaggcatgtgccatcatgcccaaccataattctaatatattttaaaatatgattcaagtaaaccatgtgagagtatctgctgtatacccaccattgttatgtccattatggtacccttcatataaccctgtgttgaaatatccccagggacagataaagaaaaccactgtcacacaactagggagtgatggagcattcttcacatcaggctcaccttttgcctcaacatgctttctccttgagacctaaatttttcttctttccaattgcttgggagtagcctttccctttagataacctcattattttcttatctcgtatttacacctctgctctctgccagtctctgattaaaaaaaaaaaaaaaactcaaaagcaatttataatgatttgtaaatgcccttgattgtgggcagtttatcatggaagattcttctcaagtagcacatttctgggatgtcagtcagtaatacagtggttcccccttacccacgtggaatatgttccaagacctccggtggatgcctgaaaccatgggaagtattgaaccctacatacattccttttggactgtaactgagcctatgagatgcaacagcaaaatgagcacaaacgtctttttccttcttacagtagatgtcagcaacctcagcataggaattttttctttccttacgaagtcaagaacttctgccttttcacttagtactttacagcttcactttggtgtgtccgaattgccagcatcactcctcttttactttggggccattattaactaataatcagggttacttgaccacaagcactgcaaaaccatgacagttcatctgatggtaaccgagatggctactaagtgacttatggtcgggtagtgtatactctggacaaagggatgattcacatcccaggtgggatggtgtgagatttcatcacactattcagtacggtgctcaatttaaaacttatgaattgtttatttctgaaattttccatttgatatttttggactttgggtgactgtaggtaactgaaaccgtggaaactgaaactgcagataagaggaagactgctgggtgttcagtgttactttcctgtggagctacaggatagttctactctttagtttcatctttgattctttaaattcctatgtaggaaaaaatatcactgctatcacacagagaactgtttattactttattctttcatctgttttctgttttcaggatatccttagcaaattgcacacagtgaagaaattattcagacatacttttccattttgactcatcaagttctttggcttcccatggtttaggtgttgaaccataagtcattttggaaatgcatgctgtcatatctgggttttattttttaatatatacatacatatatatgcacacatgcatttatttttaatacacgtatacaaatatattcagaataatcaaaacacaaactcatagggtgactaaattgtcagttactttgaatttgaaattgagttggacccttatgacaaaaccaagggttattttgacttcctgggactaaatctttatggctgtttgatatgctaagcaatggtgtttatggacttaagccacaattgagggaaaagaatttcttcttcaactctatttaaggttctccaagatagaagagagttcaatatatggttgattctttaatgggatccagctagaatatagcacataactatcattttcataaaaattcaaaaaggaagtcaccataactaggatgacataaaggcatgtcatagccttcttcctacagggacttactataatcctgtgaccccaggcagagggttaaaatgcctactttggaacataccctttcccatcatctgagcaactgctgaatttgtcaccttgtaaaccacttggatagatctcactccatgaagggcattcatgccacccagcttccatcaaaaatgccactttacattgtgcttggtgattttgcagctattaattcttggatcattccatacattatctctgagtttccatggataaattgttgatagtatacctattttccacagaaaacagatgttaatattaacttggtcaaggtcacatacctagttaatagtatgtccagaatttgacaccaggatttctatcttctaatcatcattcctgttaattaagcaccttctgtataccttgcagtgatttaggcatcatctttaatcattacatgtttcctgacaggtaggtcttactgtcactcattttacatatgttgaaaatgaggcctagaaaggtgaaatgaattggtgaaattcacttgcattgtaacagaatgagaattcacacggaatctctcagtcttcatacctgtgctttttctgcttcattcacttgaaacatgaagaaacactagtgttgtaggttttgggtggtgaaatgaaaagtatcaatctgtaaacagttctctagtggctgggtttggcccactatcaaagcttttggttggtaagagcacagagttcagcgttctgcatttgggctgctctaacttttttattctgccaagtgctgactgttaaaactcatctcactgctaagccttcctcaagtctttggcacccttgctatagagccaggtggtctgaagaaaagctccctctaggttgttgcacactgtacacaacacattacagtgcgagacaactgtcagttccttcctttccttctcccctacccttccagaaagctgggccccagatggaagagctggaaatgtgtcaactgttctctgaagggcattgagaaaatactgtcaggaagaaaaggcaagcgcaacagctcattagtccactaatcagacaggacgaccatcaatttcacaaagaaaatgtcctgaacagagaaatgggaagggctggcagagtgttgcccacatggttctgagaactgcacatttttgtcaggggatttgtaacttgggggcattgctttcttgattgactttattatatccctttcccaagtgtggccactgcaaactgaagcataaaaatggtatttggagatacttttctacaaataccattgtgtcccatcaatgcacaaaaatgttccttgttgccaggatcgtgaacactcttgtatgtattgtctttatagctgtgctctcacagaaggaaaacttggactttaccttcttatttgagcctttgctccccattttttacactttaatttgaattcagcagttattggagaatgaatggctggtacttaagtgaaaagcttagaattactgtgaggaacatagctcaatttaaaggtgattatggtaaccctggtcgtattattaactaagtatgtaacaagttctctttgatagggaaaaataacttgttagatatattagaatattactcattggtatcaagtctgattcctgttagctcagacctacctaattgcagcatcatgaagtttatctaatttatctttctggaattttgttgccatttagtattatcaaacaactgcctattattaattgttcccatagatgaagtagcctctgcttcatgtagactcagctctacttttcatctttttgaacaatgtatagcatgaatgacatttacatgtttgaggtcagagaggttgactccctcttttttcctacttgatgtagttgatatgtatatatataatttagtacatcattattaatggtgatttttttttttttaagacagagtcgctctgtcacccaggctagagtgcagtggcatgatcttggctcactgcaacctccgcctcccaggttcaagcgattctcttgcctcagcctcctgagtaactgggactacaggtgcccaccaccacacccagctaatttttatatttttagtagagacagggtttcaccatgttggccaggctgatctcaaactcctgaccttaggtgatccacccgcctcagcctcccaaagtgctaggtttacaggcatgagccaccgtgcccagcctattaatattgatttatatataactgattgattttcttttcatgtcttgcagttgaggcctaagtctagatagttcccatgttagctttttcacccctaataatttgattcatttataaggagaagttaaagaaaatgcatttgaggtaagctatatttgtaacctggtttcttcctttctcagccactatctaaagactgctaactttcagttcacatcacctcttgaccttgtttcctcattttagttcctagggttgaagtaacaaagtaccactaactgagtggcttaagacaatagaaattcattctctcacagttcagaaagccagaggcccaaaattgaggtatcagcaaggttgattccttcccggggtttcagaggacaaatgtgtccccttctccctcctggcttgctggttgctggcactccttggcattcctcggtgtatagatgtgtcactctagtccctgcctctgtcgccacttggtgtgactgtcctctctttggcttccctctgtgtatgtctctgtgtctgtgtctcatcccttctttaaggacaccattcagattggatttagagcccacccagacaatctaggatgatctcatcctctcaagatttttaacttaatgatatcttcaaagacccttttgccaaatcaggtaacattcacagttccagatgttgggatgtggacatatcttttagggggtcactattcagcctattataccaagcagtcctctagggaagtatgttggtatttcaaattgttgtctgtttttgcaaacttttagaaaaccctaacctccatttctctgattctctgcagttggtcctgagaaaagggtgccagcgatgcctggatcgcctgtggaagtgaagatacagtccagatcctcacctcccaccatgccacccctcccaccaataaatcctggaggaccgaggccagtgtccttcactcctactgcatgtgagacctcttagttacttatgtttgtagttcagagtgacatttggatctaagtgactgacttgtatgaagcgttccacatatattattcagtgttttcaaagtactattgaaaatatagacacagatatatatttctggttgtttcttttataaattacttttaccctctgagaataatacttagcttatttggatatttagttgtttaaatattttgttttcatattctttggctggtaactatttttatttctttgactctaacaataatgaatttaaattattatattgccttatgggattccaagtaagttttctaaaattatagaattctaaaaatgttccagtgctgtcatggtaagactttttacaaaagagaatattgttgtatttgtttactagggctgccataatgaaataccacagactggatggtttaaacaatttatttttattcactttttcacagttctggaggcaagaatgtaaagatcaaggtattggcaggtttggttttacctgggccttgtagatggttgccttcttgccatatcctcacatggtctttcctccattttgcgtccctggtgtctcttcccctgcctttaaggataataatcatattggattagggactactcataatacctcttttaaccttaatgaactcttcaaagtatctccaaatatagtcctattctgaggtacaaggggtaagacttcaatgtatgaatttggccaaggctcgggcagaattcagtccataaccattatgttagctaataatatatgtaacaatatattcaacttcactaaccatcaaggaaatgcaaactaacacccaatacagtaccattatacacccaccaggatgttcaaaatgataccaagttttggtgaggatgtatggagcaacttgaacactcatacaatgctggttggagtgtaatttagtacatcttttggaaattggcagtttgcactaatgctgaatttccacgtgccctgtaactcaacaatttcagtcctatatatctataatcaccaaaagaaccccagataaactagtatacatacatgcacacaagtgtcttgatcttcatttgagttctacctttccatgcacatgctgccgtccccagttcactttgacactctgcagatcttttgcctgtaaaccaaaatgtactgctatttttggaatgcccaaaaagtgtcagagcactgagctagatgctgtatgtattgtttcatttaaatgccattacacaagcttgcacactgtccttgctcaaaattttttgttttttgtgtttattattttaaaaggcaagagaagagaatgtaagatgtacagctttaattggaagtttattattttccaaaacatttgaaatggagtagctggtaactgtagcattcagtttgagccagagtgaatgaaaagaagtgtgatatcccttttcttaaattctaatttctatctcaaagttgaacagccctagacatatatactatcttgaaaagaaacagatttaaacctcagccatcaatcagatttcaagatacaccaataggtatatgtatatacaaattcagccctttttacttccatatttggctgcttggcggtggttgtgtttcatttcagaaaatgtgatcatacatttttttctaaagagactacgaaaaagcctttctatacatcagagaagctaaaagcatggtaatgtgttatttttattggttccttcaaaatggagcaactttccaatggcaattgacctttctgtgaaaacaaagaaatggcagactattgcaactaattttctggattgctgaggttgagtgttcaactttcctttcattagctttactaattttctttagtggaagacacaagaaaactcaccccttttctcagcccgttagtctgttatgcagtgaatcattcagcagcattttcctaaacaccctttgctgaacaaagcaaaaatatacactgtatacacaacttataaaacttaattaaagtatgcacatatgtattgtgtattgtattattaataagtgaacatctattaaggcaacacaaatatagaaataaacaagcataggccaggcgcagtggctcacacctataatcctaacactttgggaggccgaggaggacagatcacttgaggtcaggagttcgagaccagcctggccaacatggtgaaaccctgtctctactaaaaatacaaaaaattagctggatgtggtggtgcgtgcctgtaatcccagctactcgggaggctgaggaaggagaattccttgaactcaggagacggaggttgcagtaagctgagattaaaccactgcactccagcctgggaaacagagcaagactcggtctctaaaaaaaaaagtgaaatagtggaagcatgcacataggcagcacagagatgtagtgaatccactaaggttaccttcaagcggagcaacagcagtatgtgtcaaagaatgctccttaacagagatgatacctgaaccgtatgggatgaagaagagcttgccaggtcaaatttgagtaaggttcagtgtaagaagagggaacagagatggttaactgactgtgactggcttagaggaagtagaagggaagtggaagattttttatgattaataagttggtttttggcaaaatatgactaaatgtcttttttctaagctaggtaaagattaaatgattggctctttaaacattgcttatgtcttaaattgtttcttatgtttttagataaagtttcacttttttagttttttaaggctggatatgattaagtgaaaacagaatgatacttaggtactagataatttagatttttacttgatgccaacaagaacgtagctcagtgccaggcacggtggctcatgcctgtaatcccagcctttgggaggccaaggcaggaggatcacttgagcccaggagtttgagaccagcctgggcaatatagtgagactccctgatctacaaaaaattttaaaaaaagaaattagctgtgcatggtggcatgtgcctgtagtcccagctactcaggaggctgaggtgggaggacacctgagtccaggaggtcgaggctgcaccaggaggtcaaggctgcaatgggccaagatggtgctgctgcactccagcttggatgacagaatgagaccctgcctcaaaaaaacaaacaagcaaaaccatagctctagggttgttttcgaaattaaaattttcaagaaatgactattaagaactaaataggaaaactgtaattaatcacatgtattataatttgagcaaaaatgtaggatgggagtgtcctgcatggaatcaggaagatgctttattgaatgaccaagggtttggcagtattaatctagcactgttaaggcagagagtaactggctctaatggacatgagtattctggatggccaaagagataggtaccttattgtaggaataagtcattaaatcagtaggcctaaaaaatatccctcatattatcataactcttttttctggtgtcttgctcacatgctaccttctgattgactgcctagtgttttggggaccttgaaattgggaaggagatgcaatgtaaaagatgggcatgagtatcccatcactggaaagatctattggcccagacccatctcaagcactacctgttgcaggaagtctttcttaaaactacccacccctgcccatggcacctgtagagttagatttcccttcttattgctctgggagcactctgctttctttttaacgctccagtgttactctgttaccatttttatctgacagcagtctcactgaggacagaaccagttttgcatacctttataacatgtgctttacaaaattcaaatgaacaaacgaaaatacaaacaagaaaaaatgaacaaaggttcccttgttttacacgtaacctgagtctttcattttggctttcttttagtaagcaatggcatcaaccattctcctcctaccctgaatggtgccccatcaccgccacagagattcagcaatggtcctgcctcctccacatcatctgcactcacaaatcagcaattgccagccacttgtggtgctcgacaactcagcaagttgaaacgctttcttaccactctgcaacagtttggcaatgacatctcccctgagattggggagaaggtgcggactcttgttcttgcactggtggtaagtacagcctcactgttgttctcagctgcctgagtatgtggctcaggtccaaagcgagcaaagttctagatatttctgctcattttcaaacccatggtcatatggcaaatgctacagactagactagttattgaataacttgtgtaaaactgtttaaatgtaggtttcttttcttttcttttcttctttctttttttttgagggtcttactgtgtcacccagcctggagtatgatggtgcgaacacagctcacttcagccttgaccttccaggtttaagcagttctcttgctgcatcctcctgagtagttgggactacatgtgcatgccgccatgcccagctaatttttttattttggtagagatgggatctctctatcttgttcaggctgctttcaaactcctagcctcaagcagtctgcctgtctcggcttcccaaagtgctgggattataagcatgatgtttaattgtagattttatgtcagtgcttatcaaagaaacaatcgataatgtttacttgttatttaaggtggtgatttaattccaataagcaactttggattttttttaaaactgctctcaacaggcccactggtgtccaaccaagttaatgcaaggttttgtaatttaatatattcagtgcttagtgcattgtttccaaaccaaggagagtagagaggtagcaagtttaattttcaaaacaatgatttctaaaattacaagttacgtggcctaaataaatactatcaaaataaacagtatcaaagggattgcattgttcagctcctcgtgcatataaacttgcttaagaatttgcaaggtacacataatttttctttctttctatactgcacgtggtgaacctgtggcataaaggagtgattttctgacttcgacacctgggtggggttttattctcagtgtttataagggaagtactgccagttcccaatgtttctaattgaatttacctccaataaaagcattctgtgctcctttgtgtatgttaacccctttatatgggataaaaagatgaatcacagcactaatccttgaagctgcagctctccgagtgtaaatctagggaccctgaagattctccaggatcctttctggagatccagaaggtgaaaactattttcataatataacagtagactaaatgcaaaagtagagagaatacaactggcttctagtatgctagatattaaagagactttctattatgctagatattaaagagacttgcaaaatgataaaacagtgctgctcttcttactgcatttattttggaaaatacagattttaaaaatcacacctcagtctgaaccaatatagttattttttattttaattaaattctcagctttaatttctgatatagtaatgtcaataaatgtaatccatataaattagaggaattctgagaccaaacagtttaagaattattgccttaaaaaatttctcagtctaaggccagatgtggtggctcacgcctgtaatttgggaagccaaggtgggaggattgcttggatgcaggagttcaagaccagcctgggtacatagtgagactgcctctacaaaatgattttttaaaagttagctgagtgtggtggcatatgcctgtggtcctagatactcagtaggttgaggtgggaggattccttgggcccaggaaagctatgtttgcaccactgcacttccagcctaggtgacagagtgagaccctatctcaaaacataaatttaaaaaatttctcagtctattatgaaaggaacaactttcatacaaggcaaaatgcaatatatgactttttcatcatttgtgaggtttagtccttgttacgtatgactgtaggttattttcattgctatatagtgtcatattgtaggaatataccacaatttatacctttgggttatctgacatttaagtcatttgtaatttggggcagttttggggtctccagcatctcccccatgtttggagatttgccagaaggagtcacaggacttgacatacagttgtgctcacagctaagatctattacagaggcatagtaaggagacatagtgagagagacacagtctggaggaacccatctgcaggtttccttatgctctctgcctctcctgaatggtaacacagagctccctttccttagcaacaaaaataacagcaacatatatgcagtgtttctgtcaagggaagcctattacagactcaatgccaaggtttttgttggggcctggtcacatagtcagtctttgcctagcacctgccaaattttaccctcttagaaggaaaacccgtgtttagcatgaaccatactgttcgcagaaccactctacacacggccacccttatcggttagggagaagtttagttcttttttattttaaacctgtttattcctcaaattttagactactacagaaaaatcttactggatccagagtaaggttattggagttaaatgtcaaaatgagcttgaacataattggaaacaaagcagacatcaaaatgttatgttgattccagcagcaaattaagtattatctattcttaaaaataatttcaagactaaaagtaaaaatgtcaaaaattcatttgcggcgggcggatcatgaggtcaggagatcgagatcatcctggctcacacagtgaaaccccatctctactaaaaatacaaaaaattagccgggcgtggagcttgcagtgagccaagatcgtgccactgcactccagcctgggcaacagagcaagactccgtctcaaaaaaaaaaaaaaaattcatttgtaaaaaatttgaatctttttttagttatgaaaagtatatgtaggtgtgtccaattatttcttttaaatggccacatttgggttaccttttttttccatagtaaaatatacattatagaatataccattttaacctcttttaagtagacagttcagtggtcttaagtacattcatattgtttgtgctgttcaccatgtgtccctgtttgccattgtgtatttagagcctatgagcaccacagggttaaggaatttatacaattgctttttttgaattgtgatgaaatttactatattaactatttttaggtttacagtttagtgacaataagtatattcatattatcatacaaccatcatcaccatccatctccaaaactcttttcatcttgcaaaactgcaccaattaaacaataataccccattcccccctctccctagaccctggcaattaccattctactttctgtccctatggatttaactactctaggtacctcatacaagtagaatcatacagtatttgtctttttgtgactagcctatttcacttagcttaatgtccttagggtttatgcatgttatagcatatgtcagactttcctactttttaaggctaatatttcattttatgtctatatcacattttattgatctgttaattccccaatggacacatgggttgctgccacctcttcagttaagaaaagttttatatcaatgtaggaaactgtttgccatccagggtcctagatgccagccagtggcccaaccttacaagcaggcctttctaaggctagcagttttaggcctactatgttaactcttttttgtacagaaccattacaaataatgttcctatgaacattcttttacacgtgtggaaacactgcacgcaacagtggaattgtggtttcatatgtgtggtgtgtacctgtagtcacagctactcaggagactgaggcaggaggatcactttggtccaggagtttgaggccagcctgggtaacatagacagacccccatctctaaaaataaaggccacataatttagtagctggagttatccatctgcattctgtgtccatggtgtataagaagtaaggtactgagagtccctaactataccagaaagcaagcatgggcattttgcacttcaaggtaatggtaaatgttttgtgcttcacttacttattattatttggagaatgtactttctggaggatagtttggcaatgtttctggtaccattcatcctaagaaaataataaacataaacaatatacaccaagataatcagttcaacattaagtaccccctcccccattgaagctaactgaaaggtctgtaaaaccctgaggaaagtacaatttatctgttgtcgttaaaaatcaagtctcattctggttcagaggcaaggtagaaagacagacttctccctattccccccaataagtagcaaaaagccgtggactttacctataaaacaaaaataattagagtcttcaccaggtgtggtggagtgtgtctgtagtcccacctatgtagtcccagctgaggcaggtggattgtgagcctgggggacagagcaagaccccatcactttaaaaaaaaaagagagagagactcttaaaggtagagagaagacagcagattcactcatgggacccaagggactacataagcagtgagttccctaggttttgtgtttttctgatatatcccacaccaggttatgcagaaaatgttgagtttaagagtaaaaatataggtaagtaaataaactttccttagctggcatagtggagtatgcctatagtcccagatactcaggaagttgaggcaggaggatcacttaagcccaggagttcgaggctgccatgagccatgatcacaccactgcactcctgcctgggtgacaaagcaatactctgtagatagagatagatagatagatagatagatagatagatagatagatagatagatagatagatgacagagcaatactctgtagatagatatagatatagatacatacatacatatacatacatatatatatacataggtaactagctaactaactttccctctcctgagttttctaaattatgtttcttgttggcagcaaaaattactttgcctgatatggttgtcactatatgtagaggaaataattgccaatttttattataaaccaggaggataaagatagacaaggtttctgtatttctgtattttggtcagtggtggttacatgaaaatacacatatggcaaaatggtatagaactataagtatgttgtaccaatgttagtttcctagttttgagattgtaaccctttgggaagccaagttggaaggatcacttgaggtcaagagttggagatcagcctggtcaacatggcaaaatcccatctgtactaaaaatacaaaaattagccaggagtgccagtgcacacctgtaatcccagctacttggaaggctgaggcacaagaatcacttgaacctgggaggctgaggttgcagtgagctgagatcacaccactgcactccagcatgggtgacaaaacaagactgtgtctcaaaaaaaaaaaaaagatgtaagcattggagaaagctgaatagaggatacattggagtataagtgttgcccttgaaatccagagaccagattccctcagcatcttacctctcaacgttcttctctctgctctgacacatctttcccaaagctgcatttcagtttcctcaaggacaacactgatgtacagaaatccttgtccccctaagtttgattcaaatatatcttctctggccaggtaacacccataatcccagaatttggaaggcccaggccgacttgaggccaggagcttaagaccagcctggggaatgtagcatgactccttcctctacaaaaaaaaaaatttaaattagctgggcatggccaggcacggtggctcacgcctgtaatcccaccactttgggaggccaaggtgggcggatcacgaggtcaggagttcaaggttgcagtgagctataatcatgctactgcactccagcctaagtgacagagctagaccctatctctgaaaaaaaaaaatttttaagcaaatacgtcttctctgtgagtcagtagtgtcctgtacatgtgtacctccatcatactgtaatgaatagcttagttgcctcttttcccactagactatgagatctttgaggggaagaaacaaacaattatgctcttaatataaaataaggttttataaactagctgaaggaggaaggtgtttatccctctcatacaggactgccctatatccactatgtatgtaaacctgagtccatttctctggcctaactcactatttccctgtgtcacacaatccatcctttccccttgtctacccacaagtatacttaaaatcattcatgtagcccttccatacatttaatctatttgtgtttgcttttcaagacctgattgcttcccttgcagtagatataaaagagtgtcattctcttacacttagtttttattcctgattaccagaattacaggtttcttttgctgtattgtgcaaatgtcatatacttaaaacagatataacgttaactttaaaagaatttttttggtatgaaatgtgggaaagtgttcaaacattttcctttaatatgtttaaattggacataccccttttccctgaaggaaaatgtcttaatgtttaccgaataataaatatgatatatttggaaaatccaacataattgcacactcagaaataactgttattgtgattattctcccaggcattaaatatatgatataatatgcatgtgtgttatttttgtaagtggattcttagaaaatataatgttctgtttctggtttttcacttaacagtattgtaggtaccttttctgccttaatgcgtacaaatctgctctaccccctccctgcataagcattctgatacatgactcttgtaattttaatgtagctttctgttggtagatctatatattttcctttttttttttttttgttaggaaaatatattgtgatagcgtgggggtaagttgcatgttacatactatgtttttgaacacttacaaagtttctaaaagtaaattcctagaaatgttatagctctttctggggagcaagcagggattcagaataatccccatatttcattttgttcgtttgttttaatttgttatcatacagtgttatcggcaattgaaatacaaatattgtgtgaactttgaagaaaatatttttatttgttcattccccttagcagagttgctgagtctcattcctaatttgaggcctagacttttgggaaaacacagaggacgtccaccttttagagaacagtgataacttaccaatgggggtttgccggttgggagttattctggtatgcataatgcatacaggccacttgaaggtagaaggcaactattcttttttcttttgcttctggtggtttttgtttgtttgtttgtttgtttgtttgtttgaagatttgggggaagttatgccaggaggtagggggcagaacttggaaaaagaaatgaacttttgaaaaaatgtgacactgggttactgagtccaaaatgtcttagagttgacatcctaggccaagtcattatctctgtaacaggaaacattgtaagcttgattgcctgttcctgaagtgacttgcaatgaacccctcaatatcagggatcagagtgcctctcttcatgggtagtgagaaaggcagtgccctattctgcagcctaggctgctgggcaaaggggagaatttggtggtggtgaagggaatcaaggagggtttctgtcataagaaaccagtgtggtttacctttgccaggcgtctgagttcctgatgatgttcctgcagttatccttttccttatgatttaaaagtctttagcagctgagcacggtggctcacccctgtaatcccaacactttggaaggctgagggaggaagatagcttgagctcaggagttcaggaccagcctagacaacatagcgagactgcatctctactaaacatttaaaaaacaaaataaaaagaccgggcgcggtggctctcccttgtaatcccaccactttaggaggccgaggcgggtggatcacaaagtcaggagttcaccgtcaggagatcacaggaggtggaggttacagtgagccgagaccgcgccactgcgctctggcctgggcaacagagcaagactccatctcaaataaataaataaataaataacattaaaaaaaaaaaaaaagaagagtttggcactataagttttggaagtccagttttggaagttgaacaaggttatttatcttttcagaactcaacagtgacaattgaggaattccactgtaagctccaagaagccacaaactttccccttcgtccttttgtgattccatttctcaaggtaatttgataattactgaatataatttatcttgaatatttcctcaaattctgctaatccctgttacgtgatttaaatcagagccgcttgccacgtttttagatctttattttgggctggtagagaggtctgagtgcagttaacagataaacgtcaggtttaatgagatgagaattgcaaaagccttaagttgtggtctgtgtgcagacactgctgctaacacatagaagtagctagcataggagagaataggaggtgcttgggctggaagtgtgaaagtggaagggaggctgaggtcctagcagaagaaataactggtcactaatcctttgggtatagtcagagtgtgaagagtgttgtctgagaggctgtcagacaaaaggcaaggtctttgcagtttagacttactctaaggtcaggagacgatgtaggaagacagtgtttgtgtctccccgaaccccagatagtctagtttctaaagatgtcttctgcaataatgttctctggagcataacttttggagagattgttctgcattatcatgcttacatgataaatgaaatgaggccatgttatatatgttatatttacatggaataaaatcttctaaacagcttttggccagtcacggtggttcacacctataatcccagcactttgggaggccaaggcaggtggattgcatgagctcaggagttcaagaccagactggccaacatggcaaaacccccgtctctgccaaaaaaaaatagaaaaaaaaaatagccaggcgcttgtagtcccagctagttgggaggctgaggcaggagaatcacttgaacctgggaggcagaggaagcaggtgagctgacattgtgccactgcaccccagcctgggtgacagagtgagacattctcaaaaataaaataaaataaagaataaaaaaagaaatatttaagagtaagccgcaaggccgggtgtggtggctcacgcctataatccatgcacgttgggaggccgaggcaggcagattacctgaggtcaggagttagagaccagcctgactaatgtggtgaaaccctgtcttcactaaaaatagaaaaaattagcacatgcctgtagtcccagctactcacgaggctgaggcaggagaattgcttgaacctgggaggtgcaggttgcagtgagccaagattgtgccactgcactccagcctgggtgacagaacaagactctgtctcaaaaaagaaaagtaagctgcagacattatacatctaaatacttaaatacaggtatcaaatcaggaaagtaacattcatacaacactgttacctatagaccttattcatatttcaccacatgtcccactaatgtcttttacaacaaagaaaaacttgggagggagcatagttctggatctgactcaggatcacccattgcattttgttgtcacgtctctttagtccactttaatctggcacagttactcagctctttgtgatcttgacgtttttacagaatacaagatagttattctatctgcgcacctggatttggttttctctggtgttgatttgattagaatcatttaacagaaaaactgtattcaattgttactgtattttgaattttgtcaatatttatggaaatttgttttctctcttttatgagtatctctataatacctttaattttactgccttttttttttttttttttttttttttggggagacaaaatctcgccctgttgcccaggctggagtgcagtggcgcgatctcggctctacaacctctgcctcccgagttcaagcgattcttctgcctcagcctccagtgtagctgggactacaggcacgcgccaccacacccggctaatttttgtatttatagtagagactattaatagtagcgaccatattgtccaggctggtctcaaactcctgaccttgtgatccaccctccttggcctcccaaagtgctgggattacacgtgtgagccaccgtgcccagcgtctaattttgcctcttaacaaagcctaaaatatttactgtctggtcaaataaatatgccccttttactttcttttaccttattttcatttcctaagaaaatgtaacagcatcatacagatgggttatcttactaaagtactaataccagttttttaaaaccttctattggagcacagcagatacacaggaaaatgcatcggtctaaggtgcacagcctgtatcatggctcggttctaatggcattgaagcctcggctgctctgagcagcctgtggtgcctttttgagccctgaaacagctgtgctggttctatcttggtctcctttatgtatgtcagagctggtagacaattatttccccaagactctagaatcaagaaagatttgtgaaatttgtgttaataggaaataattagcatgttttttattcatcatgggacacatgtcagccgtgtaaagatctgacatggtgtttttttcaattaagtttttacagttgcaacaagattgaggttatagaacagactttaaaagagttttatatagtcaaattccttattcttaactctgttattttggaaaacagcatgaggtaggttgttatggcagctttttggctagcatttggggttttgtcaatttatttctgctttaaaacagtcactaattatggtgcctgctaaattaaccctcagtgaagggatggctacttgcatgtattaaaactctcctttcacttgctcatctgtcccttgggattaagcctttgcttatgagcccagcctgcattgcttttaaatttggtgagaaaaatataatttctactttatgttttttttaataaaaatgggaaaagtaaattctgtatatgaaagagatcgagttctgagcttttaaagatgtatagggttttaaaatgtgatttgttcctattgcaggttttctaagtatgagagacagaaaaatacctacttaatgaattatctttttacattttacatcactcccagtgctccttttcaaactcccatgtttcagaataatcacagtttccagaattctgttgcagcttttatacagagctggaaggaaggttgagtagtgctatcagagatgagttggggtccagaagagagaaaccagggcttggaatgactcccacataggcagtagtaattctctcactgactaaagtcttcagaagcgtatgttttaaaattattatgttcaacaaccctttattgagctttgactgtatactaggctgcaaaggtaaataaggtacaatctcttccttaagcatatttacatctggttggggcaagagacaattgaaccagtaattcaagtgcagtataagagatatcattgactcacagaagaagcatttgaaaatcagactgccaaggagagaaaggcttttatcttgtatcatctgctttgtgaaagccctttgaggtgctgagccttcttgtgtagggcctaacactggaaaaactgcctcttcctttcaaggccaacctgcccctgctgcagcgggaactgctgcactgcgctcgggcggccaagcagaccccatcccagtacctggctcagcacgaacaccttctgctcaacacaagcattgcatcgcctgctgactcgtcagagttgctcatggaggtgcacggaaatgggaagaggcccagtccagagaggtgagcagatgagctttgctgtccttgccttcctggaaccgcactggtcctcccctttgcttataaaagagagagaatttgattgctgtggttgtaatgtctcaaactttttttgagacaaggcctggctctgtcgcccagactggagcgcagtggtgcaatctttgctccctgcagcctccatctcctgggctcaagcgatcctctcacctcagcctcctgagtatctgggattacaggcacgtgccaccatgaccagctaatgtttgtttgtttgtttgtttgtttgtttgtttgtttgtttttggagagatgaggttttaccatgttgcccaggctggtctcaaacttgtgagctcaagagatctgcccgcctcaacctcccaaagtgctgggattatatggatgtgagccaccatgcccagcccaatgtctcagactttctgtggttatttttgctttattccaatacctagctgcataatacatctaaaatctatgggagtagcttccagacatgagtatttttcgggaactcttcagatgcctgcacacccggtaagaaactctactctagagaatttatgggtcgactgttccagaagcctcaggagtacagttctgccttttccttgatgctgtttgtagaaagaattggaaaaaaaaaaaaaagaaaagaaaagaaaaaacaaaaaaaaagaaatacaatctgccaaatgccttttatgtcaaacgcatttttttctgatctgagaagttttgaaaaagtatagcaattaattattaatatttgccaatgactcacctttactgagattaaaattaatatgaatttattttagaaaactccctatgagtggctatcaaaatattctatgggttatcaaagaaggcaatatcaacaatagtggataggctttaatgacatttttttaaaagtaaaaaaaaaaaaaaaaaaagaaaatttattacagttgaatctgagtgactgaaaaccctgctactacacaattggacccactgttaatttgactggctttaaaaaaaaaaaaaagacacaattggatttgttatatgagcctttttcctcccatgtagtttctttccagtaactcatctccacagtaacaaatttgaccttaatactttcctaagtatggttgaacccgtaactcagaaaaacggtgtcatctccttagtctctcctttgctttataagggttaatgtttctgtctggttatggatggatttgacctcttttttcatgctggtataagtcagcaatttacatgaggtgcctggcccttgaagacaattcagctcatgcctcatgtcacacctttccttagaggcttcctgtttatgccagcatgtagcaaaatacctaatacatagtaggttctcaggaaatgtctgcatgaacacttgttgacaggatcagatacgcacttctgcttcttctacaggagagaagagaatagttttgatagagacacaattgctcctgagcctcctgccaagagagtatgtaccatcagccctgctcctcggcacagtcctgctctcactgtgcccctcatgaatcccgggggccaattccatcctacccctccacctcttcagcattacaccttagaggatattgcaacttctcacctgtatcgggaacccaacaagatgctagagcatcgagaagttcgtgatagacaccacagtcttggtaagcaaccgaagcagcatggtaaattcagactggattcttggatttctttccaactcaatgataaagtcaaataatatgattgctttttcccactgattggataaaacaatattatacatagactattagaatcatagttgatcttatttgatatcaatctcatttgataccttgttgctatgatatgatagaagtacagctaggtgtggtgactggtgtctgtaatcccagctcttagagaggctgaggtggaaggatcacttgaagccagtctgggcaacatagtgagatcccatctctacaaaaaattttaaaaactagccaggcttggtggcatgcgcctgtggtcccagctactagggaggctgaggagggaggatcagttgagtccaggaagtcaaaactacattgagccatgatcttgccactgcattcagcctgggtgacagagtgagacctgtctaaaaaagaataaaggggtatcgcctattctcagatggttcagaagaagagaatgaaaaagcaaaggaggtaaaatgttaacatttgagaactctgtttgaagatatgtgagaattctttgtgctccttttgcagctcttctataaatctgagtttattgcagaataaaagtttttaaaattaggccaagctcagtggctcatgcctataatcccagcactttggaaggccaaggcaggaggatcacttgaggccagaagtttgataccagcatgggcaacatagagagacctcatctctacaacaacaacaacaaaaattaaaaatgaggcaggaggggctgggcgtggtggctcacgcctgtaatcccagcactttgggaggctgaggtgggtggatcatgaggtcaggagatggagaccaatctggctaatacagtgaaaccctgtctctactaaaaatacaaaaacttagctgggcgtggtggtgggcacctgtagtcccagctactcaggaggctgaggcaggagaatggcgtgaacccagaaggcggagcttgcagtgagccgagatcacgccccagcactccagcctgggcaacagagcaagactccgtctccaaaaaaacaaaaccaaacaaaaaacaaacaaaaaaaatgaggcaggaggactgcttgagcccaagaggtcaagactgcaatgagccatgatggtgccactgcactcccctcctgggcaacatggtgagaccctgcctcaacacaataaaaaatgtttttaaaattaagcaggaaagatgcaagatttcaccttggaggagaaagtgcatggacatttaggtcaggaggtgaggcatatcgaaatcttggctctgcatcctaactagctgtgtgatctcaggcaagttgcttgggctctctgagcctcagaagagtaatttctaaatgattgtaacgccaccccctgtgctaggttgttgttccatttggaatgcctggtatataggtgctcagaaacctttaaatttaggaagaaacagaaaagaaaccttaacaaacctcttctagttttggacagagcggtttgtcatgtactcttacacgttttcagcataaggttttttggagtaaaactgctgagcagagaaccaaagggctatcagcttccagggtttccctaaatttccatgtataccttgttgagtaaaaaactgcaatacatttgccctcacttcctcttacttaggctcactagcatctttcagacgcttggccacagtggggcccctggcatcatgtagtgggatagtagctgaatagggaaggctgtagcagccatggtgttctcagagccaacatttactgagtcgtagctaccacttagattgtgttgtaagtacattgtcttattttatcctcacaggagtcccagacaattgttatcccctttttacagatgaaggagctatggccaaaaatcacttagctaataattggcagagacaaaattcagaccccaattgtcttatgcccaaggtttagatgtactggcagtatgttatgatacttatcctagtgttcaacccctgttactcctatgcctctcttttatctattaaaaactgcttgcgggcggtctggcgtggtggttcatgcctgtaatcccagcactttgggaggcctaggtgggcgaatcgtgaggtcaggagatcgagaccatcctggctaacatggtaaaaccccgtctctactaaaaatacaaaaaattagctgggcgtggttacaggcacctgtagtcccagctacttgggaggctgaggcaggagtagggcgtgaacctgggaggtgggggttgcagtgagccaagatcacaccgctgcactccatcctggcaacagagtgagactccgtcaaggggggggaaaaaaactggcttgctttgattggaaatagcacagtgggggaaaaaactggcttgctaattaatggtttcttctggaccttttttgccagtttgacttgagaaagaagtatgctaaaaactaggtatggggtctcactatattgcccaagctggacccctgggctcaagtgatctacctgtgtcagcctcctgagtggctgggactataggcccaccccaccacacctggcttttattactacattttttgacagattttacaaatcatgaggaactcaatatatactgaaataaacagattatcacactaatacatagtcactatgaatattatgactataaattcagactggtaacaggggtgttgtgttaatgactcaaagactaagcactgttactgtatgtgacttaggtttaaaatagtagacaattcttactggtatacccttaattcacacagttgttccattcctggaagtttcagtatatatcaaaactatccccccaccaaaaaaatttttttaagttactgataatattaagctgtttccaagtggttataccagtacacacgctagttttggtggttaattattcgcattgcaccacatccttgtcaacacttagtattatctgacattttaattttttccagtatgttagatgtgaaatgctatgtatgacatacctgtttatttcttttacctctttttctttagggctatttcgtgttttacaattgatttgttggagttttttatataatgtgaatcgtgatcctttgttggttatattgtcattttgtgggtcccccaccccattgtgaatcattgccttagtagtgtgatcaaagttattatgaatatgtgtgtatttacttggtagaatttgcttctattgtgtttttcctgctatctttgaatttaatctgtaatttctaataggtctaaatggaggctatcaagatgagttggtagatcatcgtttgacagaaagggaatgggctgatgaatggaaacatcttgaccatgtaagaatcttgtagtgtgtaatgtccctaactctttattacttttttttgaaacaggagtctcgctctgtcacccaggatggagtgcagtggtatgatctcagttcactgcaacttctgcttcccaggttcaagcaattctcctgcctctgtcttcggagtagctgggattacaggtgtacgccaccgtgcctggctaatttttgtatttttagtagagacagggttttgccatgttggccaggctggtctcaaacccctgacctcaagtgatctccccacctcagcctctcagagtgctgtgattacaggtgtgagccaccgcactcagcctacttaatgctaccaataattaatggaacatgtatgcttgaagtgaacataaccacagccatgacatcctttgcttttaataaaagctggtttagctactactccctcagctgaggaattacagagtcactccctaatctttgtgatgggatgatcacttcaggtcagaaaccaaataaagtcatgtagtataatggttaacaacaaaggtttgtagccaggtgcagtggcacatgcctgtagtcccagctactcgggaagctaaggcaggaggatctcttaagcccaggagccaagacttcaagtctagtctgggcaacatagcaagatggaattcatttgtatttgttaaatttttatcaaaagaaactttctttttatttttttcaattctgctccttctgtagtaaagagattgctttttagcccacatactcatgtttcgtagttttagaacacaggtcagtaacaaacttctaggtaattcaaccccccaaaattgtttatattccaaaattattttgcactctgaaagatagcagccttcctcatctcatcaaaattcataatttctgttagaaatgtgtgtgtgccttattttatggttcagccacagcaaatttacagtgctgcagaccctagggatacaacaaatgctgctgcaacatgaaatagtagactgttggccagaaggccatgcatctgaggttttgtccaaacactggaagccctggtagttattgtcctctttaggtatgtcagcctcaacaccaatgtccttcctagctgatggagaaacagacagcaataaaggttttaaatgtaaacttgatattcctaaatctgtactttaaggaacctgaattcctcatattgcgttggcctgatttacagtgttggttgtttgaatgttcttatctcatctctgcctggccccctctgtgactcaggcgctgaattgcattatggaaatggtagagaaaacaaggcgctctatggcagttctgcggcgctgtcaggaatcagatcgtgaagaactcaactactggaaaagacggtacaatgaaaacacagagctgaggaaaacggggaccgagttggtctccaggcagcacagccctgggagtgcagattctctcagcaatggtaaggggagagtctacgggaaacccaaaataaatgtcagcctttagagcccaccaatctgtcacagaaggcgttttctacttgactttaaagaaaggtggtactcaattgtggatttagggaaactcaggtgattatgaaaagtaaatgagaaaatatatgaagcccctggcatgttttggtgggtggcgcaggaagggggtttttttgttttggatagacaggatctcactgtgttgcccaggctggccttggactcctggcctcaagcaatcctcctgcctcaccctcccaaagcaccaggattacaggcctgagccactgtgcccagcctcgtacttggcgtgttcaaaaaatgttaattcttcgtggagaatgagaatatttgtgattttgttctgtctttaactctttacatatatgtgtgctaggtgttggtcagagtgtttggttgtcaaattcagcctggctggatgtatgtactaggcactcttgtgtcatcactttcatttctcacagtagccctgaaagtgtttaccttaccttccctcctcctgtccccagcccaccattcaggaaaataccactcaatccaccatggcctggtggcctcctacaaaaggttttaccataccacgctgggttgtttccccttgcctttcagagtctgaagcagcagcaatccagagtacatccagcaaacctcagttattcccctcaaaatgttccagcacattcacccagtaactgagaaagtgccctatccaaaggcatagctgagtgacaggccatctgtgataagactcttcccacgcactctgagttcccaaatgttcaccacgaagaacaagtctcttacgacagacctagtatgttccattgaaggcagctattagtctctaaaagactgtaaggaaaacttgaggcaaagccagaattaatacagtatgtacagacagtgggagttaaaggctcacctttccccaccccacccacagcagcagctctggagccaaccatggaattacaaccattaggtggaatatctagcacaacaaggcgtcaacacatatgtagagttatatagtatgattcctttcgtaaaaactcgaaaaacaggccgggcgtggtggctcatgcctgtgatcccagcactttcggaggctgaggtgggcagatcacagggtcaggagatcgagaccatcctggctaacacggtgaaaccccgtctctactaaaaatacaaaaaattagccaggcgtggtggcggacgcctgtactcccagctactggggaggttgaggcaggagaatggcgtgaaccccggaggcggagcttgcagtgagccgagatcgcgccattgcactctagcctgggtgacagagcaagactccatctcaaaaaaacaaacaaaaaactccaaaaacagacaaagctaatcttctggtctccctcactttctgaacatttgcagatccctgtgcgactttcggacagggagaaaggcttttggagacgtagctaaagtttacacccaagccatacctcattcatcagtgagtccacatgtgtgcaggtgagaagcatagagtacagagggagctgcagtcgtgagccagtggttgctgagccaagatacagctcttgctggagtcattcaggtcttgctggagtcatttaaacatggctatgcatgaccactactcacctttctcaccttttgcatcaaggattagctctggggagcatgttttctgatttgcctgagacagtccagtttatacctgtgtcctgttaatagttattactagcatttccctcattctcaacaatgaaggcaatctggatgataagttatattgtcattctaggtttggtttctgacagcactatcaacctgatttagatagtatattttagtgtcatttatatgtttatctcatgtttattacttgtccattttagtatagtatgacagtataattcatatcctaaataaatgtactatgcaaaatgtgaaccaaaatgactccaaaaagtgccactggtctgattacatgaggagcttgggcacggttggcttcatcaagaaagtcttactgtgaaattagttctttttgtttgtttgtttgttcgtttttgtttgtttgttttgaaatggagtcttgctctgttgtccaggctggaatgcagtgcacattcttggctcattgcaacctcctgggttcaagccattctcttgcctcatcctcctgagtagctgggattacaggcacctgccaccatgcctggctacgttttgtatttttagtagagatggggtttcaccatgttggccaggctgggctcgaactcctgaccttgtatgatccacccaccttggcctcccaaagtgctgggattacagacataagccaccatgcccagcctgaaatgagttcttagacacatagttgttttacattctggcatatgttataccaataatcatagtttgagtagcattgtcctatattgggcagtattcttagacatttcaaagaatttcaccaatgactttttttttttttttttaacagagtctagctctgttgcccaggctggagtgcagtggcatgatctcggctcactgcaacctctgcgtcctggattcaagggattctcctgcctcagcttcctgagtagctgggattacaagcgcctgccaccacacccggctgagttttttttttttcagtagagacggctggtcttcaattcctaaccttgtgatccacccgcctcgtcctcccgaagtgctgggattacaagcatgagccaccgtgcccggcctcaccagtgacttttaaataagtaattagtgtttttgtttgagacggagtcttgtctgtcacccaggctggaatgcagtggcacgatcttgcctcactgctccccaggttcgagcagttctcctgccttagcctcccaagtagctgagattacaggtgtgccctaccacagccagctaatttttgtatttttagtagagatgaggtttcaccatgtttgccaggctggtctcgaactcccagcctcaagtaatctgcccgccttggcctcccaaagtgctgggattacagacataagctaccatgcctggccaagtaattagtgtttttaaagtcttgggttagctgggtgcagtgtctcacgcctgtaatccccgcactttgggaggctgaacgaggtggatcacgtgaagccaggagttcgagaccagcctggccaacatgtcaaaacactgtctctactaaaaacaaaaaaagttagccaggcatggtagcacatgcctgtactcccacctacttgggaggctgaggcacgagaatcactcaaacctgggaggcggaggttgtggtaagccgagatcacacactgcactccagcctgagcaacacagtgagactctgtcgcaaaaaaaaaataaataaataaataaataaataaaagtcttgggttatgcagaaatccatggtgtggatagttattgaagtaaagtggtttggtgatttggagagaaattgactagaggctttagatggcattattacttttcccatttaaattaatgcaatgtaggtttccttacctgaaaatttatgattcacaatgttttcacaaatagattttgttcagacagcaagcagtgtatttaggtgtcattaaaggatgcataaataagtgcaaaaaccataaggaaaagaagaaaatgcttatcacagagatcaggagactggtttcctctggctgtgtgggtggagggtgcagagttagtgagttctaactacgtctattcttgggacaggattgtcagtctggctagcattatttaaatactactatggcttgccatgacttacctcttagggatttggggttgctggtactgttctgtttcctgaactcaggcttatgatgttaaattgtatattaatatttttattatattgtatgttaatattttatgaactggtcagccatctaactttgcaagtaaaatttttttttgtttgtttgtttgtttttgtttgaaacggagtctcgctctgtcacctaggctggagtacagtggtgcagtctcggctcactgcaacctccgccttttggcttcaagtgattctcctgcctcagcctcccaagtagctggaattacaggtgcttgccaccatgcacagctaatttttgtatttttagtaaagacggggtttcaccatgttagtcaggtcggtctcgaactcctgacctcgtgatccacccgccttggcctcccaaagtgctgagattacacacatgagccactgcatctggccaaatttttaaacaaagaaaaagaatacttaatcagctatcagtttttcctcagaatgacagtcaagctcacattccgggcccttctggatgttatgattctgagacccaaaaatctgaatatagtccacctgtggtggctgacgccagtaatcccagcactttgagaggcagaggctggcaaatcgcttaaactcaggagttcaagaccagcctgggcaacatggtgaaaccctgtctctacaaaaaatatgaaaattagctgattgtggtggtatgtgcctatagtccggctacttgggaagctgaggtaggaggatggcttgagcccaggaggcagaacttgcagtgagctgagttcgtgccaatgcactccacctgggcaacagagcaagaccctatgtccaaaaaaaaaaaaaaaaaaaaaaaaaagaatctgaatatatgtgtttaatgagttcaataagcaggcaagtttgggaaaactgcctctagttaagtccatagcagatggacctcattcagtgtcacagggcttccaggcaactttttagtgacatgtgtgcacaattaagggtgaccactctctagaggtaagcctctaatattggagactgaaataaacagaaatgggaattaatagtagctcttcagggaaaagaaaactaccaataatgtagcattgttaatatctctggtgagaaaaagagaacaacattagaaatctacccaacttatatatccaaatcatgaatttcaaaaagaatgagcagaacaagtagagaggatagaatagttattgaaataattccaaaaaattaccaagacctgcaagacagttccaggttgaatcagtctaccaagtagacaacacaggaaaataaatagacttagtcgtttagcatcattgaaagttagaagacaattctgaaggaaaattattttaatttagaattctatacttaaccaaaacaattaagtgttagattagtaacctacaatttttcaaaaaatgcacctcctgcctaccctttctccacagtatctactgtaggatatgcctcaatatgtgaaagtaaaccagaaaatgggagacactgaattcctgaaagaggatccaacacaagaaaggaaggaaaggaatccctaggctggtgaaggagagccccaagcattagtggcaaagcaggcctagaaagcgcccagtccacgctggaacagcccagaaccttgctagagatttccttaagtaaatgaaatttataaaagatttacacaacaggaggataatttgagattgaattggaagtaattacatagcagcctggcacaatggcttacaactgtaatcctagctctttgggagactgagacaggaaaattgcttgaggccaggaatccaagacctgtctggaaaccctgagatagtgaaaccctgtctgtgcaaaaaatttagaagggaaattaggcggtcatggtggtacatgcctaaagtcctagctactcaagaggctgaggcaggatgacctgagcccaggagttcaagggtgcagtgagccagtgatcagctgtgtatcactgcactctagcctgggtgacagaacaagaccctgtcacacacaaaaaagtaatttgtaaaaatgctgcctttcctccccctacatttttccataggctcaatggttaacaattaatgtattcttgtagaattttctatgtacatatttaaagataatgtttcctaatgttttattttgaaatttccgaaacacgtagaaattttgaaagagaccaccctggccaacatggtgaaaccccatctctactaaaaatacaaaaagaatagccaggcagggtggcgcacacctgtactcccagctacctctcgggaggctgaggtaggagaatcacttgaacccgggaggcagaggttgcagtgagccaagatcgcaccactgcactccagcctgggtgacagagtgagactccgtctcaaaaaaaaaaaaaaaaaaaaatctgtgtgcatttatgttttatacatttatattttagggggtactgtaccttaaaaaccgatgtttataggggaaaaaattaggacataataggtaagtaaaaagaagaaagtgaagatcacttttaatctcactactttgaaatactgttaatttgttcatttgatgggggtgtgtgttttaaaactaaatatttactgtactattttataatctggtttttagcccttatatgagaatttttttatactaaatgaaatatatgtttgagtctaagtggtgaatgagaaatctgatcaaaaataaaactgctgatcatagacagcttctgaccctatgctttttatgtctcttctgcagattctcagagagagttcaacagcaggccaggtacaggatacgtacctgtggagttttggaaaaaaacaggtatgtgtctgactgcttgtaggtcatacatactcactaatttgtgggagcagagaacagataactgggtgaatggttggtaactgggtcctttggttgtataataacttgctcctcatagagctctaggctcctgcctctcctgctctggcttgtcctgcatgtctcctgatacctgtcttgttaatttgcaggtcaggagtttggaatagctccctccagtccctttcacactcttccactgggtcacgctgaggcaataagtacctgttgacatgtcctgtttctgggcttgcaacagagttcattttgcctgatctcttcactggtggctacagtatactgtgttcacactactgccacatttgtgcccaaattctgctctgggcacagctctgtaatccccctgtgctttctttcaccttctctgtgcctaccatagtgaagactgttcttggtaggcctcctcttttacaagaataaaggagggtggggactgcctattttgtaagttcaaggatgaacctcacatcactaatgtcagccttatccaaatattggcattctttcacttcttgcctccccatcccagtttcattttttaagtccaatacaacttttggttttcttactaagataaaatttatttctacaaaaatgtaatacctacattcataaagactcttttaagagcatctagacagtagtaaacaaataaaagatatgaacagacacattatgctatgagaaatacaaataaacatattgcaaaatatttttccttactagtagtcaggataatgtaagataaagcatatctgataaattaaccccttgtctttaaccgtccgttattgacaattttaaaagaccttgttgatgacactcaataattgatcagaggcttatataagaaattaagtgagtacctgcagattcttggaatcattcctcacttttccttttttttttttttgagatggagtttcgcgcttgttgcccaggctggagtgcaacggtgtgatctcggctcactgcaacttccgcctccccggttcaagctattctcctgcctcagcctcccaagtagctgggattacaggcatgcaccaccacgcctggctaattttgtatttgtagtagagatgaggtttctccatgttggtcaggctggtctcgaactcctgatctcaggtgatctgcctgccttggcctcccaaagtgctgggattacagacgtgagccactgcacccggccttttttttttttttttttttttttttgagatggattcttgctctgttgctcaggctggagtgcagtggcacaatctcagctcactgcaacctccacctcccaggttcaagcaactcttctgccttagccttccaagtacctgggattacaggcacccccgaccatgcccggctaatttttgtatttttagtagagatggggtttcaccatattggccaggctggtttcgaactcttgacttcaggtgatccacccgccttggcctcccaaagtgctaggattaggattacaggcatgagcctgtaatgtgcccagccacaagatctcttttaaactagtgagtttgattatttgggagatacctttggttaactatggttaagagcccaactttggtgttgggccagctaggtttgagtccttgctctgctacagtgccatctgtgaccttagacgacctccagtaagatagctagccaaaccgagatgattattaattcatgcttaagctgaggggataaaatgtacctaagagcattgttacactggctcaataagaggcatctgataagagacttatgaaaagttcttggcctctggggtgaagattttcttaaggccagagccataagatggaaagttgtttcatggtagcctagaactctgtgtttgaacctcccttgagcctgtgccatgtgcaagaggtaaaccgtgagggagtgtccttaggcttctggattgtctagtcctgtggacttacgtagggagctacgtattttgggacttcacattcacattctcattgggctgaggctcaaacatatggaatgtgttattttgcagcgtctacattagggaaatcaagcagggcattggtgatgggaggaagtgaacaggaaccaggtaggatgatggtaagtggacagggtttaaaaacccagggcttttggcagtctgcccaaatctatgtctttagcccttgtttgtgcacctagtcttatttatttaattgcctcctggccatttacacctggatgccccagaggcacctccaccttctcacttgcctccacactagctttgtgtggactgtccatttcattgcctagctttagcattcttctctttcacctccacttccaggcccttcggtgctcccaacctttttctgcctcatcccttcctcagtgccacttattcctgcctaaattcagcctcttctatcagttcaatcattgcaccagcctcccggttgctatctctgtctttaatcttccccttgcatagaatcctttatggagtttcctttgaaaataaagtcaagccgactgggcacggtggctcatgcctgtaatcccagcactttgggaggccaaggtgggcggatcacgaggtcaagagatcgagaccatcctggctaacatggtgaaaccctgtctctattaaaaatacaaaaaattagccaggtgtggtggcgggcacctgtagtcccagctactcaggaggctgaggcaggagaatggcgtgaacccgggaggcggagcttgcagtgagcagagattacgccactgcactccagcctgggcaacagagcgggactccgtcgcaaaaaaaaaaaaagaaaataagttcaagccgggggtggtgcctcacccctataacactttaacaccaacgctttgggaggctgaggtaggaggatcacttgagcgcaggagttcgagacaagccttagcaacatagtgagacatcgtctctacaaaaaaatttaaaaattagccgagtatggtgggacacgcctgtagtcctagctactcagaaggctgaggtgggaggatcatgattcagagaggtcaagtccgcagtgtgctgtgatcgcaacagtgcactccagcctgggcaacagagcaaggccctgtctcaaaaaaaaagaaaaagaaggtcaaatttcttagtctggcatgcaagactttttgcaaaatctcatttccatctaccatctcaagcaaaacacatgtcttgattctcccctgcccactgaagagctgatcacttttctccttggaactctagtctcttacgatgacatacacgatggcacctgaaacactttcatacttggtcacaagcagtcaggagagtgtggcctgtgtctagtcacttgcgtccacagccctagctcggtgcccacctccatctccgtacccagccagcacctgcatggatggacacatgagtgtgaagatcatgtgttcctccctgtggagttttagaaaagatcactttgtgtcagctctctccttacttagaattgccgtgggatgggagggaaaagatttctcggccagttgattttactgtcactttcttctagaagaagctgtgaataaggtgaaaattcaggccatgtcagaagtacagaaggccgtcgctgaggcagagcagaaagcctttgaagtgattgcaacagagagagcacgaatggagcaaaccatagcggatgtcaagcggcaggccgcagaggatgctttcctcgtcatcaatgagcaagaggagtccacggaggtcagagctctgcgccctgggggctggggtgagcagctggagtgaccacgcccgctgccttcctctcatacgctgggcaggaagacacaggcagtccactcttgagctcaatgaggataatttttatccagtgccaggagagttttggttctcatgctaagactcttttacatgccaagatagtgaattattacattgtatttttacatacatacatatatatatagagagagagagagaggctcagtgtattggtgtaaattttgagaattcaccctaaagacagagtttgtgtgattgcacgatgatgatgatgaccagcattgacggagtgggcttactgtgtgccagacacccagcaaagttgtatattttctttttgagtctcacaatggccctaatttgcagatgaggagactgtggctcagggaatgcaactaatatacccctttggtgctgaagtcaggatacaggagtaagaaagtgcagggtcctatagcacctaggctttttttttttgagacggagtctctctctgtcccccaggctggagtgcagtggtgcaatcttggctcactgcaagctccacctcctgggttcacgccattctcctgcctcagcctcccgagcagctgggactacaggtgcctgccaccacacccggctaattttttgtatttttagtagagacggggtttcaccgtgttagccaggatggtctcgatctcctgaccagcacctaggctttttacaaataggatagctggtttgtggactgaagtaacaggttgggtgtatctgcctgattgtccaggacccaggatccagggcccaggacttggtgatggttctatacaggacgcttgagtactacagtgaggagaaaaatcaacaaactgaaaaagaatctgtgacaacatgagaacagcccttttgaatttaatgcagtttttctgtaaatttcattttagtcatttttcagctttaaaacaagaaaccagtttctttctgtaagtaggtagatctcatctactggatgggagaccggctgtctttgggacattctcttgaagttcagcactcactctgtcaccgaggctggagtgcaatggtgcggtctcggctcaccgcaacctctacctccgggttcaagcgattctcccacctcagcctcccaagtagcttggagtacaggtgcacaccaccgtgcctggctaattttcatatttttaatagagatgggctttcgccatgttggccaggctaatcttgaactcctagcctcaagtgatccacccaaccttggcctcccaaagtgctgggattacagatgggctttttttttttttttaacaaacaatagaaatgttattttcttgtaatttaaatggtccatttcagtattgtactgtcacacatggcaatgtgcagatgaaaatgcctaaataccacgtggctatcacagaggatgtggtgaaattccttattacagctcttcaatacagatactatggattgtgagaaaatagtttctttaatccccctcccttttcgttctctcctcctcctttgtcttttttttttttgtgtgtgtgtgtgtgtgtgtgtgtgtgtgtgtgtgtgtgtgtgtgtggataacagggtctcactatattgcccaggcaggtcttgaactcctgggctcaagctatatatactcttgcttctgcctccctaagagctgggattacaggcatgagccaccacgcccagcttctcctcctcctttttctttagaattgtttttgaggctgggcacagtggccaatgcttgtaatctcagcactttgggaggccaaggtagtgtgaacacttgagctcaggagttcaagaccagccttggctagatggtgagaccccatttctgccaaaaaaaaaatttaaaaattagccaggcatggtgtcatgcacctgtagtccaggtactttggaggctggggcaggaggatcgcttgagcccaggaggtgcaagcctgaccatgatcgtaacactgcattccagcctgggtgggagagcaagaccccatctctttaaaaaaaaaaagaaaaaagaaaaaaggtgatgacgatggcaagatgagggggaaagaaaagagaattgtttttgagagtgagatatctgtttctcttctctatgtttaactgtgtatgtatagccatccatatcagtatctgtatttgtccttatttatctacttttatctctgtttatctttaactatgtctatctccaaagaaagagtatagcttttggcttagagcatagatcctggatctggactgcgtaggtttaaatcccagctctccattttgagcattgtgcttttaaggaattgtaattttaaataagccacaaagtagcctccaggtgaggtgcacacctggacctatccctgcaaaatcactttcaaaagcagggaagggatagagggcctgtcctttggatgagtttgcattggaccaaaacggctgattctcgtccatcaagaatgttcagctagaatatccttgttgaaatttggcaggtattcctggagtttcttgttcatcttgtgaaaggtggtctggtgtgggggaggaaggaggccaggactggaggttaggagccctgacttctagccgagttccctctcatactggcagtatacccttaaaggagtcagtctccatctctgttcaatgagtatagcagctcctatcctattggtctgatagttattagggaacaggcacagtggcccatgcctgtaattccagctctttaggaggtcaaggtgggagggtcctttgaggccaggaggtcaagaccagcctgggcaatataaggagactctgtctctacaagaaattaaagaatcagccaggcatggtggcacatgcctgtagtcccagctactcaggaggctaaggtgggagtgtgggaggatccctggagcctaggaggtcaagtccagcttgggcaacatagcaagaccctgtctccaaaagaaaaaacaaaacagcagcagcagccttcgttgagtcagattatcagtaaaaacaatgaagattattctctaatgagggaagcaatatcagctgggcgcttataatcctgacactttgggaggctgagacaggcagatcacttgagcccaggagttcaagcgtagcctggccaacatggcaaaacctcatctctactatatatatatatatatatatatatatatatatatatatatatatatatatatatatatatatagtatataatgtgtgtgtgtgtgtgtgtgtgtgtgtgtgtgtgtatataatgtataattacaaaaattagccaggcatggtggcacatgcagaaaggagtaggataaatgttcgtcttaacacatgtggtcttaggatagatggctcttgggggagaccctggcacagagtttggtttggtttctgactattaaaatgagccaaaagatgagtccatgccttaggcaggagagatggccacctgccctaggctggtgctgtgtaaggtattttcacacacacatctcatttcactgttcctgtcatcttgcagggaagtagttttcttgttttacagatgaaggaaactcagaaaggcagtgtgtatttctcatagttaaacagcagtagagggcggagttgaccacaggtgtatgtagttccaaagctggggttctctacatacagccccttgctttactgtgcagggaatgaatggcaagcctgcccctcaatcccagcaaccactaactgatgcctgtgtcttgcagaactgctggaactgtggccgcaaagccagcgagacatgcagtggctgcaatatcgcgcgatactgtggctctttctgccagcacaaggactgggagcggcaccaccgcctctgtggtcagaacctgcatggccagagcccccacggccagggccggccgctgcttcctgtaggcaggggctcctctgccaggtccgccgactgcagcgtgcccagcccagccctcgacaagacctcggcaaccacatcgcgttcctcaacacctgcttctgtgacagctatcgacaccaacggactctgagccccggactctgcttaccctgatggctgctcagcaccacagagtgcttgggctgagggactgactgttggaacccgtgcatgtagctgccgggtcatcagcaagaaatgaattggaggcaggaagagtccaagcctgaataataacaccccacagcctctctgtgcacttgctgtctgcggagccagtgtgccattctctgcacatgggcagccagcctgagctgcctcctccatggctttcctggtttgttcctctctccactgaagctgacttagccggccccttttcagtgtagaccaccagctcccctccccatctccttgagtcagcagactgtccaatgtgctcagccaggctggaggcggcaggcggcaggcagcaggctgtggaggaggcccctcggtcagggagcggcctgcctcacccctgaatagctccttcggccccatctccatcctcagcagatgacactgattggcctcacggggacttgggtaagcaacaggcggcattcaggactcttctcaaccctgctgttcagacttgataagatctcagagtccacaggaaagaagtcactgttgcaataaaagcacccgtagtagcaaaaacataaaacaaataaaacttcccccacatcacagatgattttggacaagattttccaaccttgctggctactttagtttgggacctgttttttttctcatttgattttgcttgtgcagaaaatagtttccagcacatggattgatctgagagagaatgaggctcagttgtggatagtctgttttctctgagcatgttggccaactagtatcgtcaaattattgagtggatcatctcttggaaatgcagaacttctgccaccacttggctatttgcacagtcatcttgttctgtgtccttttatctctcagaccacacacatctggaacgctgtgggcatcttctgcccatgggctccatttggcacctgctgagccacagttgtcctgctggatgtgctgtgcaggttggtaggacttgcccccactgtcaaggcctggtctcatctgaaaagccctcctggacctcaaagaattcttcagacctcatagttacaggtcattatatctactatgttgatttatcatcaggcacacaacttctgtttccttctcttgtgttatctgatagcgtccctccttgagctcatcagaaaggttttatgaaatgtgaaccattttgggaaaagctgatcaatttttcttcctagcttcccattttcaaatgggacatcactcatatccctttcagaatgttaggaactgcctcccacattcttccctgtctttttgggttttgttttttgttgttgtggtggttttttaacacaaagtctcactctgttgcccaggctggagtgcagtggcatgatcttggctcactgcaacctctgccttccaggttcaagcaattctcctgcctcagcctcccgagtagctgagattacaggcgcccaccaccacgcccagctaatttttgtatttttagtagagacagggtttcaccatgttggccaggctgatctcgaactcctgacctcaggtgacctgccttggcctcccaaagtgcagggattacaagcgtgagccaccatgcccggcctgtctttttggttttgatgggagtctgaggaccccgacccctcctgctctccatctttgagcctctggcatcctctcacacccagaaatcagttggagtaagtttaattggccctgctccagctggcctttgaagcacaagtttaaatctccaccttctgtgcactgaccagagtctaaaataaaagttgtcagtaccataaaggaaaagggatccacacaggtagccttctccttggatacaggtacatcttactgtaagaatttcaagtcctggctgggcgcagtggctcactcctgtaatcccagcactttgagagaccgaggcaggcagatcacttgaggtcaggaattcaagaccaacctggccaacatggtgaaaccctgtctctaataaaaaaaaaatagaaaaatcagccgggtgtggtggcacacacctgtaatcctagctactcaggaggctgaggcaagagaatctcttgaacctgtgagccagaggttgcagtgagccgagattccaccactgcactccagcctgggcaacagagcaaaactctgtctcaaaaaaaaaaaaaaaaaggcaaaattaaagaatttcaagtccctaatttactctaaccaagcattttcagtcttacaaagaaatctagtgcacgacacctttaaaatgcctagatttccattgcctaaagtaaggtgtgaccagtgaaacaacagcagagaatcatgttcctttgctgtggaacacataagccccacagttttccagtcagcctaatacatgggtatcccccgaccccatctgcctccttaagccacagtccttggtggggaactctaagggggacggagtcagtaccccggacagggccacatttgcatgagacatggctgtctcacaggtcacagagccattacaacagcttactagtttttcatggatttgttggattaacaccttaagcaggttttttattgttattttgtttgtttgtttgttttgagacgggagtttctctcttgtctcccaggctggagtgcaatcgcgcaatctcggctcacggtaacctctgcctcccaggttcaagcgagtctcctgcctcagccttctgagtagctgggattacaggcatgcgccaccacgcccaactaattttgtatttttagtagagacggggtttctccttgttggtcaggctggtctcaaaccccggacctcaggtgatccccccaccttggcctcccaaagtgccaggattacaggcatgagccactgtgtccggtcttgagcaggtttttaaaatctccagtggccataaaactagccagggtagctcatgcttttactggttggaataaggagccaaaaccaacaaaataatatttattagggctcgatgcccatttctgtggctaaggcttaggtttggtgtgcagagcctggcctgctcttgtgggctgtggttgctgtgacagtttcgttttctgaatctttgtaatgctcttccaccctgctcgtgctgcccagaggctgatctgcaaacctgggcagtattccacactgaagctcagtttgcaaaccttctgctgtgttaattctggtcagtttcacacagaagtcacgagggcctctgcccaggaccttctattcacatttcaagaatccctttctgaaattctccaactctctggtcaggaggaggagcaccattggggcggggtaggcagctagaggcgcaggagcgaatccaggttccttgcgtggttcccagcctctgctgacagcacctcagctaccaggtggggagtggaaattcagcctgcttagaggactgacctctacagttcatatttgcagtgacataaaaggcaaagaggagctggcatggtggtacagaaggtatcagtcaagcgcaggctcttcagaaacctagaaactaaaaagagatgcaacatgtgactggccatcagccagacatgtctagggtgagaccagtgctcagcaccacccgccaaggaacactgatgagttgtgggacattatggtcggccaagtgaggaatgattgcagggaccagagaagaccaaagatgccagatgtccccagagtttcttgagggctgggtttcacgtctttgcttgtcctttttgtccccacttgcctgcaccgtgcctgactcatccagtggggaaggtgactcaagaagttgtttaagcctaggcctaggcagtccacttcgggaggtgggggcactccacactggggggccctgcagctccagggctggtgctctagcagatccgctcaggcacggttgggtgaccgtggggtcaccgattgcgtagattatttctagggcagtgctgggttagaaatgtctgtctggaaacaggacacatcttgccaccacaagtccacacctggccttggctgctgcccgctctctgcagcgtggatttcctttgcccatttgggccagaaggtcaccaggagttcatcactgcttagtgtcaacttgacatcttcagcttccagacagaaaacccatgctttactttgtacagccctgtcccagagttagtaagcctcggcttgtcacctgcttgcaaagggtatagacatcattctgggtagttctagaggatatcgcaacaagtgcgtttgaaggttcagcacagctggaattgtacggtagtgagctcttcaaaatgaaaacagaatgaccggatggccatctgtcctggaaactgtagaattgaataaatcactgaaaatagaacacttcttggaggctttcttcagaactgaactagaaacaaggtttccaggctcccaggtcagtagaccaaaccaacttccttagatttttttttttaagctgtttgcagaaaactgggtggtagcgtgtctgaaccaaacggaagaatagccagcggagcatggactgttccagcacgggccagatggccagctgtcgagagcagccctgcccagattgcggtgggggctgtgccagcggctccgcagggcccttccaactctggagtgtctgtagttcttgtgaaaccaaaacgttgactacctgcctctttcctcgggcatcgacgtgctcatttccaaagatgatggtgcaggtgaccttttccatcgtgagctaagagaaggttaggaggcctgaggggcgggccttgtgtcccctcctccccctccacagcccctgaggtggagcttccctcacagaccccatctggtcgagcctacggctgcccagtgtacactcagtgatgcttataccaaatagggcatgtgcgctggtgtctgttggggacagccccatccctaccttggagtcggcagagaagcagcaataagcattaggcgaatgattgaaagggctgctgcgccaagaggccttcagtccccttaacgtggctttccaacttcctgacgaggctacaaaggctccgctcacaaaagaaagccaataatgtaaataaatagaaaacgaagcctccacgcgtggtttttaaagggggatgatgaatgtgacaccacccacagaatgcattagaatctggtttttctgtgctttgtcattttactctgataggaatttttgttacctaactctgtgcataacttatttaatgtactgtataaatgaaccaaaactgttaaatatgtatttagtttgttctacttaaagtagtcaataaaaaggctatattccttttctg

SEQ ID NO: 360 - DNA, 15084 bp, Homo sapiens
tgtgcacagaagttatatacatatatgggtatatctatgtaacaaatcgcagcacaggagtcccctgggctccctcaggctctggtatgacatatttgagccatataaattcagcttctcctctggcatctgttagccgactcacttgcaactccacctcagcagtggtctctcagtcctctcaaagcaaggaaagagtactgtgtgctgagagaccatggcaaagaatcctccagagaattgtgaagactgtcacattctaaatgtaagttgattcatattttttcccttttgagcagaagcatggtttcacagatttatcatattgcaaagtgaacattagaaagtggaatcaaaggtgactttgaattatggcttgcttattgagatttattgtgtattgttttattctctctgttctttggttaggcagaagcttttaaatccaagaaaatatgtaaatcacttaagatttgtggactggtgtttggtatcctggccctaactctaattgtcctgttttgggggagcaagcacttctggccggaggtacccaaaaaagtaagtaaatacacatcataatctgatgcttctgttctgagtttgattgaatttaattagtaggcatataaattattctgaaaatgaaaatcattaagtctcttttgtgtttattttctggtggtatgaaaaactgaatcaagatttttctctccttcatttgcctaattattttggtaagggaaaaaaatttatcttctatattttggttagtaatgatagggtgtagaattacccattcttctataatgcttatatttaaggagttaagactcctcctaggagcaaagtttttaccttaagaaaaaatacttttaatctttctttcaattatctgggcagaaactgatggaaaagtaattagaccaccacataaggagaaaccacccaaagtggcagcaaaggattttcagggattatgtttctgacttaatgcatctgcagtgagaacaggcagcaagctgcttttcaggaggagcaattctcatacctgacttcacatttatttatgactttaaaaagaaactagagcttttcagctccttgccagctgcaatcatcactgtcccactgagatagcaatgccacaaggtagaagcatgcgacaccaagtcattaatcacagataactcagaaagcttctgatactggggtcatttggtgaagcttggctagccactgtagtttatatttctgtaccttagtgttattgttattcctgggctcataggcaatgggcaagtttagatataaaataaataaataaaaccatagtcccaaataaaaccatagtcccttcatgctcacaatttccatttgaaagataatcaacaaatatacaaactacaagttgtgaagatagttttctggctttgccatgtttttctgttggtgtgtggattgctgctgaagttattgttattactgttgttaattggttgtcataagatgctcatttctatttggtaacagatgtagggagaaaaaagcacaaatccaggaaggaggatgatacaagaaaatgggttggcatggaccgttaggagccaaaggagcaataggagcagagagaaaaaaatatgggtcagtggggagagagaggcagagcaggaaaagcagaaaataagctggctaagtgtctgaaagataacagaggtataaagcataaccacccttgggttctccacctctgctgtcatacccactttcatttagtcccaaaggatatcttatcaggtttaagtaggagggagagcaagccagcctactttgtttgcctttttatttatactttgttccagaaaagatttcaggcatcacccaatgcctatagttagccctatcccctactcctcctccccttactgctccttgcttctgaactacttaccgttcaaatgtccttctagagaagccacctgtgttcaggctggcagggtgggtaaagcaatcgagatcaggaaggaaacagcaaattaataagagagccaaaatgcattccaatacaattctggtaccacttagctaattcccaaggtgatatgtcaccccacaagttgaaccttggatcctcttgaaaattatccatgagttaaagggccataaatcctttgttctccacagccataatgtacttaactgggcatggtggatagctagtccttttgaccacccttagatgcttgcctaaataaggggccaaatggcctttcttgttttattgttgtcattggtactgcaaatgctattccaaaagagtatatgtgtttttataaatttacagtgctatttgcctcaacgcagctataaacgactaggtggagaccttgcctttttattgcaaagtgtcaaactcacttgcagcttcatggtctcctctctttccctattatatcatctttacatctcattctagttctgtttttaatgattataaggagcaatcctatgatacctcaaaccaaaataaaacttggtcagtgcatgcacagaagaggtgggatatgctgctgaataaagtttatcaaaaatcaaacctcttgtgaagtaatccattttgggatgtcattttcagcaaagggactctcagaaatgaacaaagctattatgaagtaatccagataaagacaacaggtgtcccctagggcaagtttctctaccatgaacaaatattgttggttttccattccagtggggagttatgattcattgtctttgatatttaagtcatggccttcataagaccaggtttggttcattgaaaactaagaaatcagctggaaatgaggatgctttacttagtccactactaccttcaggtcccagacaaagatctcaagagaccatctatgtttccaatgggtacgcctatcaacaagcctgccttagagcagacttaagaattctgggaagagactagcagtcagattagtcttggaagagttgcataggaaagggacacaggcatcttacataaattaaagactctccccttaatggtatggcctagcaagaaacaacagcagattaaaatccaggctctttgggctttccttaacaaatctatgagacttgttgggactctgtggcccttggtagagagagctgtgcatgcaactgtgcttattggtggcagtgatttgtttgcagtcctgggatttcctccaagctcttagtgtttgctctcctagcctccaccacgcctcctttttattttgtctttcaacatctgtgtataataaacagtatttatttaacatcccacatctggtgttgacatttccatgccaataagtccttctcctcactcccgctttggtgtgtacaaaagatccagattcctgtatccaaattgagaacaagccatgcttgacctcctcccctcacatacctcaggtctgcgtgcacacaggtgtgcacacgcacagactcacacacacacagacacacacacacacacacacagaccagagagagaatgaaatcaaaataaagtgaaacaaggacgactaactctgggtgagctgctgcattttcttacaggtcccaggcccctgacccacagccacatacaggagccacctgagctaaatgaaagccaggtccatccagctctgaattcagctttcttaaacaagcagaagagacctattcagtcccagcaattttgagaaagcatcgtaatgaggctccccttctaggcagtgactgccctgggatcattgaagcagaatcaccaaagaaacattcttgcttaaagccccctgtattacacattttactggaaacagtcagaagccaactcctcagctaattaatccaacatgaagcaaacaaatcagaaaaatcctagcccttaaaccaacagtttagaaacttagcacagaccttgtagcccatccctgccaatcctttgtggagcgaggcagaagaatcatacatttaataaatgaaagagtgtccttactgccttacataggagctgcctggtgactttagggttgtttgaaagccatcaggaccacagtaatcaatagattcgtgaggatgttccttcaacttctatatattaccagagcaatgaggagtggtagggataagcgggcacttttctgccctcctgccacacctcagttgcaggtgatcactaaaacagtctcccccagcgttgtgagtccactatcattctaggttgaaaatcctttgctcagaagaagcactttcttgacgagtctgattgcaacattttgtgcgtgcctatttcttggcacgcacaattgggcattagcccaatattaacttttttcgctcctctctaggcacacaaggaagacaacttttttctccaggtcccctgggctttcctacaccacagtccggtgggtgaaatgtgggtctagagaaacattaatataccctcaaggaaaaagttgaaggagtagccggaatatttttggcagggagactgagctttaccagatggtgccatgttggcattttcaaaaaaaaaaaaaaaaaaaagacctctcttcattttcctcttaaagcattgtgagacccaggtccacccttgtacaactctcactgggccagctcttattctgggctactcaagggcagctcccagcaattatgtggagccaggctgtggctgtgatgggcatgttcttcttagtcagtctcttcattctcctaaggcagcatttgctgaacaacttatatgacaccaggatgaagagcctgggccttcaaagacagctgttctggagtggttgagagtggaattggggctgtggaggaagtagcctggatgatcaacagatagtggcagtaggcgtagtccagtgatcaacctgacaggttgatctgagcaaatctcagcagactttgctaactatctaacattacagatgaaaaggggtaaaggattaaaataggaactgagtccctagagacactcagtgatttgcccaaaatcacacagcttgtaagtggtggggttaaggttagaactagaggctagtctgaagattctttccactattcttcagctgcatttaagaatcagggatggggataatgggtaggagaaaaacttactggtcagctcaagtctgtagataaaagaagtagctttttcttgttgaaaaagaatgtctgtgctgcttatgccaatattttgcatattgccaaatggtgattgaagatgcagaactctaactttgcataaggaacaatctgtctgctctgtgttggtaaagaaatacccagaggccctttaattcccccaagttaggttaataataatatggtacagtgcattctcttcccttccttccagcctaacacctgctagccagctattctgagcatgtatttcacctttggagagtgtacctcataacagacagtaagggatgaagatggagtgaagagcagctagattaatcacaggcttcaaaaaacaaacctaagccaaatgtcctcaaatccctgtcaggacaggctaaagcttcttgcccctaaaacagatccatcacactgaggtctgagatagctttaccttttctaaatagctttcttttctgatctcagggactgccacagaggcaagaaaacaaggaaaactgtgaaagagggatgttagggctcatttgctgcctgaatggaggatttaactggactgaagacagaattcctgggcagggaagaaaaatgggttgtgtcctctacatattttgtcagtgtggtcttcttacacttctcactgcctggacttaaccacatatctgtctcatttcacttctgattcctattccactccattggcttccttgttccattccagtgttctggttcttatagttaaggccagccttatgtgtgggtggagtaagagcccatttgagtggtgctggaaagatgcccttgcccccaaatatctcccattcctcgtgccactgtgcctattagattggtgcaaaagtaactgtggttttagccattgaaagtaatggcaaagtaataaagtaataaaatccactattagtacttcattcctctgagtgaagtattgcactcaaatttttaaacagacaaatattcatcactaatatctaagtgtgaaatcatgggtcagattgatttcttctttgtcataaggtacctgaagcaccacgagattcctagatgtctagacaggagacaaagggacagaaatgggaagagaaaggggaagggctatgagggtatagaatgaacagaatatgaaaatagagcagaaaaggaaagctagaagcaccaaaaattaactctctctattttccaattgggcaggggtgtactcctcatcatattctgtccttgctctatcctccctggaataaagctgagttggaggcagctgagatgagctacttgtagcccactcacacctctcttcaggccagtcatcctgtctctgctttagcttgctcctggagaggacaaagccatttattctttcatctccagaaagaccttcaacccctgagccaggaagcttagtagagagcaaagtacttgtgatgccaaaggcatgagctcagtcttcatacgggccagtgaagcttgcatagccattacccaagcaatgtgctccacagggacccaggcgagacagtgtgtctggatttgctcatacccatctccaaacagtccaaagtgggccaccagcatcatcttcctagacgaagaacagtctgttccaaaaggacacctttgatagtggaattctgtctgggtgaatatatagctccccactcctaccccctaccaaggattcacacataaacgaagtcattctgttcccactctagtaacttatcattactaacataaagccaacaagttggttaatgaacacaatcagaatggaccccttctcccctaccaaaaaaactctttgcaggaatgttgaaaataatcaagatctgctgagcttggcagtttccaatagttttcatctagcaaggtgtccaagtaaagtgcattgccaacagtgcaggaaaactcattccacagaagcacactgaaattctaaatgtcaccagtaggttccatagtcttctaccagtgattgaaaatacagcctgtattttctctttcgcccaggtaggcagtgttccagcatcccctagtctctaacctcatttttccatacaataatccatcagtggtgctactgatgaaataaacaccccaccgcagcccccaatggctagtggcatcaacatttgtctcaaaaatggatagtatttctaacaaaattcccccgttgggagagctgacaggactggatctgaagtggatgcctctcttttctacttaggtcagacagactgagagctcaatttgttgccacaggtagaagtttctcttctcaagctggctgcagagctggaactgaggacatatttattgctagaagcaaataacaaacctaaaggaatttgctacctatcacaaaccaggccagacttcctgagttaactctgcagttgccagagagttctaagtattgtttttctttcacttttaaaatggtttttttaaaagaccttgccaatactcaaaaatgtctctttaggaagataaggatgtgccattggtggggacaacttattcaacaaatacttaggttccaaccatgtccaaagcactgtagggctaccaagaggtaaatgacattgtctcttgtttttctcttcagcagctacattagacttgtcacccttgaagtaacacttgcttctacaaatggttccaatttgtttttctctagttgagttggtgaatatttcaccaggttaaactaacattcagtcaatggcatcagcagagactaaaaaatgacccaacctggtgtaagttctctataaggctgccactgggaaccgtatcattagaaagcaatgtgggctctgaagaagacttgctttttcaggcttttagtttcccagatttttttcataaggaaaaatgaacatggagaaactcgataaacaaaggtctcctaatgacagagataagatagacttccaaaaggcatcatcaggtctggcctggtttgtgacagataacaaattcctttatgcttatttgcttctacctataaatatgtcctaaaactataagttatgggcttactcctaaactgcagtgccatatgggactggtcctcttggtctttagaaatacaattgcctcttttagagtgcaggagaaaatctggggttttgttttagccactcaagaaagacctgatgagcagtctttcttcttgggaggctccatgttacttaatgcaggacacttggctcagttggcttaattccatatacacaaaagaatccgtagaacttgaaaacaactgaatatggcttgggaaacagaacccaggaataaactgggtggggttggttgccgtataaagagaaggctaagggaaggcaataaatgtttcctggagtttaaggggcaaaaggaagcaaacagagcagggtagggctctaatattggcaaggagaaagtcttcagattctaaaaggaatagactcaaggctgttgtggcaatattaaagccctggataaataaggagacaaaaaacacttaaccattttaagtgtattcaaatctctttctaagccctaatgaatttcacgggtgaggggcggggcagtaaggggggggtcgtgattacttagcacttggaaagggaagtggtagcttaaagaagcagcataggttttaggtgatccctcagcttaacacaaggggaaaatactttataggctggtttgcaaactatcatttgctgtttagtcaaggctgccaagaaaactgttggaattcttagtaattagctcagcagcttggcttgaattcaaaataccagctctgaagggatccccatatcagctccagcgccaaaaagcacctcactttagggacacactgagtatcttagagattgttttcctctgttctcccaggcctatgacatggagcacactttctacagcaatggagagaagaagaagatttacatggaaattgatcctgtgaccagaactgaaatattcagaagcggaaatggcactgatgaaacattggaagtgcacgactttaaaaacgtaagttggatgttttcctcctaaggctttccacttaaaatattagagcagttgagtcaagttaaaaatagcctccatctaaaatttgaattcaaatggaaagctagcctcctctagctttccatttgaattcaaattttgctagtctgggaccccaacagatcatggaacttactaatagtggctcttttgggaagctttattgttgttttgtctgttttatagggatacactggcatctacttcgtgggtcttcaaaaatgttttatcaaaactcagattaaagtgattcctgaattttctgaaccagaagaggaaatagatgaggtatgtaagaagaataattgtggtggcaaaagacatcatttattggatgctagctatgtgccaaacattgtactaaatgctttacttttctttgattctccaacaaccttataaatagatactattgttatcatcattttcagatcaggaaactagaactcagagccaaaaagtgacttgctcaaggccacacagctagtgagtagcagattggggtcttgaacttaggcctttcagaaaactcaagtgcataattttaggtgcaatgctatactcttatacccgggcacccattaacattatgttgattttctctgaaaccaaagatttctagtaagagggatgagccagagaaacaaaatcaatcttgcctcagataaagcgtttttaaaaaagaaagttccaaagccacctggggttcttgccacttttgtcacacttcagtattcacctattttaaagattgtggttcattcaccttaccattttatgctgggctgctaatggaataattcacatttaacctcagtaggaaaggcaaaagcaaagaaggtgaacactgcaatgggatacaaattctctgaaaacaccctgctagaccaaagtaaggcaacctagggtgctggtgaaatcactgaatggccctttaaaacctaatgggagatggatgttattgcctaaaatacaacgatctgtaaggcccttgaggctctttattgttccctgatattttgtctataattacagtatggttttattagtgggaggagaagggggacctcagttaaggtcatattgtgacagcatatccccactatagcaagaaaaaacaaacattggtttggtttggtttagtgcttagttgccaaatctaaagtggaattatggcaatggtagaatgatctttcttcttcttcttcttcttctttgtatttttagtagagacggggtttcaccatagccaggatggtctcaatctcctgacctcatgatccgcccgcctaggcctctcaaagtgctgggattacaggcatcagccaccgcgcccagccatggcagagtgatctttctataaactataaaaacctctttctttctttctttctttcttctctctctccctgttctttttcacttttctcccacccagctccctccatcttgattctcaccaacccatttatcttttcctttacctttttctttacctttttctttatttgggggcggtgggtggggaggactatttttctttcccttacccaagtcttagagctgtcattggctcccactttactctttcatgctactggtctcctcggggccagaggagttacagacccttgttactagaatttgcaagaaaaaaaagaacgttctcccaaagatgatgctctgctcccaaggtctacggtagtgacaaagtttggagactttttttaaagtaagcataagttagatgcatctgaggaatagatcgacgttcaggatattaggaatgactatagaaggcaaaggtaagataaaaggaaaatcaataggattaaaaagctactatacacaataacatatgctgattacatacagaaaataatgtaagcatttgagtaggccactcagcaatgagaacctgaagtgatataataggatttatttttttgaaagattaaggcaaaggaggcggggcacggtggctcacgcctataatcccagccctttgggaggccgaagagggggatcactggaggtcaggagttcgagaccactctggccaacatggtgaaaacccatctctactaaaacaaaacaaaacaaaacaaaattagccgggcatggtggcgtgtgcctgtaatcccagctactgaagaggatgaggtgggaggatcacttgaacccgggaggtggaggtttcagtaagccgagtttgcgccactgcactccagcctgggtgacagagcgggactcagtgtcaaaaaataaataaataaacaaaaaataaaggcaaaggctcataatgtctcattttggccctaatttagtcttcagttaatttcaccaaatattttaaataacgcaaattcatttcatgatagtaagaacactgtaccttcaagtaaatcttgttttttatattcacgccacagatttttttttaatgagacaaatttgtggtcctgaatgacaaaaaccttcttctgtaattccctccacactgtatccatggcatgtgtattttaaacatgcagagcaggtatataaatagccctgattttgctaacaaagctagtcagcataccaacctcattttatacaattcctttcaatgcatctcaaggtcgttacagactcaaggacaaaggtgctaagactttagaattgtaaatgattccgggagaaattagtaagaactaggtatacaacacaattacctcaatactagaaactgaagagaaagtggcatccttcacaatataaaaaaagctgcttaaaggaaaaacactctgtgagataaactctaagcatttacaatgaaaggaatgcaatagtaggaaggccagtgaagtcataaactggagacttgcctttaaaacataaaaggaaatcttttgtactataactagctaccatcaacaggcaaatcttgtaaaaccaaaatattagattacattgttattgaattgatctcaccagtttggattataggagttttgtcagcttcgggtcaaatcctgcttgccacccaagatgcaaacctaaaataaggcaggctaataaaatgtatttataaaaaagaaaacaaatgtaaatcacttagggttccagaagctcaagttaaaacatacacagacccagggcaccctgaaaataacgaagcccctttctgactttgagtgaaatggtaacagagaaggctcctactttagtaagcagtcttgctgttagacccaggaaggaggaaggatcagttgttaactcccccaagggcacccactgaatgcaaggcacagagctagttcaccagcagccctaggattaaaattgttacactcaaaatatattgctttccagcatcccataatgtctcacttgttctactaatttctctgccaatccctaccctaagctactttcttctttcagaatgaagaaattaccacaactttctttgaacagtcagtgatttgggtcccagcagaaaagcctattgaaaaccgagattttcttaaaaattccaaaattctggagatttgtgataacgtgaccatgtattggatcaatcccactctaatatcaggtatgacattcttatcctcatcctcctcctattttctaagacagtaacaggttaatgttcccagcatttagaggctacatttctaggaaaacaaatgatcggtttatatcttcttggatgagtctatatatgctgactgccagtgaggagggaatttttcacagccaagttataaatcagataaattaatgttgacaggcttttaaatatcccagcaaaggtaacaccaccctaatgtgactagtgatagcaaaaaactaatctgtctctctttgcacatctatattcattgcagtcggtatgccagactattgctcaaaccactgtgggtccaacccaagaatagaggagagaagggcaaaaacaatgctctgctatcaagaaggattccctatgtcaaatggtggcattttccttagaagataggacaatcactgcaatacaaatttctttgttgctgttttaggaattactataaaaatagttgagggcttgatgtccagagtagaagagtccagccctcaacttccagtcagcccatagagaaggtaaaggcccctggatgtcttagtctgtttagctaacatggaatttggcctccctcattctgcacagcatagattactctattacccaagagaggttattctcaccaatgtaagcatctgtgggtactctttagagatattaaaaaggtgactaaatgcagtgtggtatcctggactggatgctggaacagaaaaaaacattagtagaaatactaatgaaatctgaataaagtctgtagtttagttaataacattgtaccaattctaacttctgatttttgatcattgtaccatggttatgtgaggtaacattaggggaaaccgggtgaagaatatgtgaactctgtactatttctgcaactcttccataaatctaagattatttctaaacagaaagtttaaaaaaaatttaagacaagaaacataagggaagtgggaggacagaggatgtcaaatcaattcaggcaaccaagaaatatttattgagcatctacatgggtaaaatcatcattgtaggagatacagaagtcccttgtcctcagtttttaatttagtgtgctattaagtcaaagcagtaaatgtttgatgccaaagaagcaaagaagtttgtgtatgtagaaatgatcaggcttgttttggaaactactctaaaatatcagctgaaggagcttggaaaagtggtccatgcctaaatgatgccagttagaagacacaatgaaaatctctatccccagctgctattctcccaagcacttctttcaggaacatttgcaaagcagttgcatcacaactttgcatttattatcttagtttctgagttacaagactttgaggaggagggagaagatcttcactttcctgccaacgaaaaaaaagggattgaacaaaatgaacagtgggtggtccctcaagtgaaagtagagaagacccgtcacgccagacaagcaagtgaggaagaacttccaataaatgactatgtgagttatgtttatgtaaactcttgatagaggaggaaaaaagagccctcacaaaacttactacccctcagatcacaatcattggaaggagaacgatcatggctttaacaaaaaaaaaaaaatgtttaagaaacttggaatctccaggaggctcattcaaaatcaatctcgatctctgtagatatatctccatgatcaggctaaggagcttaatttctcacaagcccccaactcatacagtcttctagttctcccctgcttggtgagaactcttgctagtgaaccttcctctcccacccccaacactggcttcttcttctttcagactgaaaatggaatagaatttgatcccatgctggatgagagaggttattgttgtatttactgccgtcgaggcaaccgctattgccgccgcgtctgtgaacctttactaggctactacccatatccatactgctaccaaggaggacgagtcatctgtcgtgtcatcatgccttgtaactggtgggtggcccgcatgctggggagggtctaataggaggtttgagctcaaatgcttaaactgctggcaacatataataaatgcatgctattcaatgaatttctgcctatgaggcatctggcccctggtagccagctctccagaattacttgtaggtaattcctctcttcatgttctaataaacttctacattatcaccaa

SEQ ID NO: 361 - DNA, 51369 bp, Homo sapiens
gcgacaacaaaacagattactttgaagggactagaaggaggacacagggtcctggaggaaggcagctggcaagttacagagcagaaaggtgaagggactgtccagggaagaggggaggctccagaagttatccttgaggaaccaacagcacggggtgggggttgggggggagctcatggaagggtggggaaactggggaaagggaaaactcgagtcagatcaggagtagagccctgacttgggggaacaagggtgcaggtgatggaagctgggagctgtgggaagcttgagcctgtagtgctgaagggtctacccattccatcaacagttcctctccagcaactgttctgagctgcacccttaaaaatatttgctattatttatttatttatttatttattttttgagacagtttcgctcttgctgcccaggctggagtgcaatggcgctatctcggctaaccacaacctccgcctcccgagttcaagcgattcttctgcctcagcctcccaagtagctgggattacaggcatgcaccaccatgccaggttaattttgtatttttagtagaggcagggtttctccatgttggtcaggctggtctagaactcccgacttcaggtgatccacccgcctcggcctcccaaagtgttgagattacagacgtgagccactgagaccccggcctgctaatattttttatttctccaggctacaagagagggaatctcctgaattcctctggggcagccctcccaattcacccgggagaaaagcaggcaggggccgggctaggattccagaggggcgggaagccctggtggaatggggtagctggagccaagcaccccaggaatgccctcccggcctctcctcccgattccttatcagctacaagctcgagtttcctcagccacacgcgatcaaatgctgcttcagagctctaggaagctgggtgtgtcttctgtgctttgtaaaaaagaaacgaaaaaaacattagcaaatccccagcccaggtagccggctggctgagggcggactcttggaactgggcggtgggaggtgggggacgggggagggattggggggcccttgctccaaagccaaagagcgggaaacaggaactgcagggaggccactccgcaggcgcctcccctttcccgctggggagaggccgccgccgcgcggcgctcggcctgcaccgaccctccggggaccccgctaaacggaggagaccccaggcccggaggtgtcgcccctgggctgcgacccccgactttggccggcttctccctgcggagaaggaggcagcgccgggaccgggctgttagccacgtgctgggtggccttgggcagattgcctcctgtctctgggcctcagattttctcatctaaaaagagggggctggactcatttctgcaaggcccctcccggttggagcggttccctgcaattcccttccttctctgaacttgaaactcttccctcccccatccccttggggtggcccctggattatctgggtggtgcttatccagtctgccgccttgagagaaaatgttgccctgcagctgtgatttacagcagggctctgcaccctttttctttttttgtttttctttattttccctccttctttcctttttacatctagagtacacactttatgcacccttttcctataaagggtcagagagtaaatacttcgggttttgcaggccacactctctgtcacagctattcaactccgtcattgtagccaaggcagccatggataagacataaacgagtgggcatgatgtgtttccatgaagctttgtttattgcagctgacatttggattctcacaggtcaagaaatcgtattttacttattatttattttttttctgagacaagagtttcactcttgttgcccaggctggagtgcaatggcaggatatcggttcactgcaacctccacttcccaggttcaagtgattctcctgcctcagcctccctagtagctgggattacaggcgcccaccaccacacccggctaattttgtgtatttttagtagagatggggtttcaccatgttggccaggctggtctcaaactcctgacctcaggtgatccacccacctcagtctcccaaagtgttggaattacaggcatgagccaccgcgtcaggccaagaaattgtattcttctttttatttttttcagccttttaaaccttggctgggtgcagtggctcatgtctgtaattccagcactttgggaggctaaggcaggaggatctattgagcccaggaattggagaccagcctgggacaacgtagagagaccctatctctacaaaaaattaaaacattaaaaaaattttaagatatactactgacatacctcagagcatagttgtgggaatgaagtgagaatacagatgaagctatcgcataaaggatattattctttgggaagttgttggtatgtatgctcagcagaagatgtggacttagagatttggatggtgtcttgctggccatccactcccaaaatttcgtgagcaaaggcactgtgtgtgcccactgtgcaatagctcatttaattatctcaggcataggagataaaaatgacatattcctactttacaggagctcagagccaaggtttgaactggctgtattagatctgccttcagagcccctactcatcttcctcctttctctctgaacaaacttgcctctgaacaaacttggagttgcttatctatccagcaacaagaccttaaacagaacgctatttttctggacatctataacctctttggtcaagggacaagaattaacaccttctatgtgcaactgtcatcgtgtcgtagcttttttatttttatttttgagacggagttttgctcttgttgcccaggctggaatgcaatggtgagatctcggctcaccgcaacctccacctcccgggttcaagtgattctcctcccttagcctcccgagtagctgggattacaggcatgcaccaccacgtccagctaagtttgtatttttagtggagacgaggtttctccatgttggtcaggctggtctcgaactcccgacctcaggcgatctgcccaccttggcctcccaaagtgctgggattacaggtgtgagccaccacgcccagcctgtgtctcagttttacagaagagaaaactgaggcttgagattaaagtaaggattgaaatctaggcctgcctgaccccaaaactgagctctttctactgggaatagcttcagagtaaccagttgcatgggccctaagtctaggagcccttgagaactcctcccttcccttaacctatgtccattatactggcaagttgttttgattcatccatgaaaatatatcctgaatctattttggggctagagggaaaccatagaatgctttggaagttattgtgatcttttaaaaatgcaaatcaggccgggcacggtggctcatgcccataatcccagcactttcggaggccgaggcgggcggatcatgaagtcaggagatcaagaccatcctggctaacacagtgaaaccccatctctactaaacatgaaaaaaaaaaaattagccagcgtggtgtactcaggaggcagaagaatcgcttgaacccaggaggcagaggttgcagtgagctgagatcatgccaccgcactccagcctaggcaacaagagcaagactccatctggaaaaaaaaaaaaaaaagcaaatcagatcatgccacatccctgcctagaggcttggaagatttccttgtttacttggaataaaaccccaaacctggccaggagcagtggctcatgcctgtaatcctagcactttgagaggccaaggtgggtggatcacctgaggtcaggagttcgagaccagcctggccaacatggtgacaccccgtctttactaaaaatacaaaaaattagccaggcatggtggcgggcgcctacagtcccagctactcaggaggctgaggcaggagaatcgcttgaaaccgggaggcagaggctgcagtgagccaagatcatgccattgcactccagcctgggcaacaagagtgaaactccatctcaaacaaacaaaccccaaaccttaccttactagggctctgtgccacctagaccctgcccatctctctactgtgttcccctctcatgccctcattccttttgcttcagcgtcaatggctttctttctgtttctctttttatttattaaaaaaatttttttaattgagatggggtctcactatattgccaaggctggtgttgagatcctgggctcggccgggcgcggtggctcacgcctgtaatcccagcactttgggaggccgaggcgggcagatcacaaggtcaggagatccagaccaccctggctaacatggtgaaaccccatctctactaaaaatacaaaaaaaaaaaaaaaaaattagccaggcatggtggcaggcgccttgtagtcccagctactggggaggctgagacaggagaatggcatgaatccaggaggcggagcttgcagtgagccaagatcacgccactgcactccagcctgggtgacagagcgagactccatctcaaaaaaagaaaaaaaagaaaaaaaaagaaatcctgggctcaagcagttctcccgccttgacctcttaaagtgctttctatttctctaacttgccagggagccatatcccctttccctcacctgaccccttgaattttcctgccagtattcacaagggtaaaggccccaatgtcacctacccagccagccttccctggcaatccccactggtcctctttttctaaattaaacattttagagatggggtcttgctatgttgccgaggctaatcttgaactcctgggctcaagcaatcctcctccttcagcctcccaagtggctgatactacaggctcataccactgtgcccggcctcgccagtcttatccctcaccctgtgttctcctgtttccagcagtcatccctatctgacatttttctgcacacactgcatcttccccagggcaaggttagctccattcctgcagaaaccttgcgtgtttactctccactaagtccccaggcttcgcccacatctggcacatagtaagtgctcaacatatgtctgatgagctaatggcccattaggcctggatcccctctctatgggaaatcatgaacttgcagcaaacagaatcatccaatagacactgggccctactatgcgcctggcaccgtgctagacagcagggcagccacagagacacaggctcagtcctggctgaggaactcactggcccactgggcagagataatgtgcttgtacagtaaggccaggcaaggcgcatgcgcccaggttctactgaaaggccgtctggggtcaaagggtagctggagataatgccagtgtggctcctggatcatataagaaatcccacgctggggttgatggctcatgcctgtaatcccagcactttgggaggctgaggtgggaggattgcttgaagtcaggagtttgagaccagcctgagcaacatagtgagaccctgtctctacaaaaaataaaaaataagccaggcatggtggtgcacacctgtagtctgaactacttgggaagctgaggcaggaggattgcttaagcctgggagattgtgtgtccggaattggtgggttcttggtctcactgacttcaagaatgaagccacggacccttgcggtgagtgttacagctcttaaggtggcacgtctggagtttgttccttctgatgttcggatgtgttcagagtttcttccttctggtgggttcgtggtctcgctggctcaggggtgaaactgcagactttcgcggtgagtgttgcggcacgtctggagttgttcgttcctcccggtgggctcgtggtctcgctggcttcaggagtgaagctgcagactttcacggtaagtgttatagctcataaaagcagtggggacccaaagagtgagcagtagcaagatttattgcaaagagcaaaagaacaaggcttccacagtgtggaaggggacccgagcgggttgcgactgctggctcaggcagcctgcttttattctcttatttggccccacccacatcctgctgattggtagagccgagtggcctgttttggcagggtgctgattggtgcgtttacaatccctgagctagatacaaaggttctcctcatccccatcagattagttagatacagagtatccacacaaaggttctccaaggccccaccagagcagctagatacagtgtcgattggtgcactcacaaaccctgagctagacacagggtgctgattggtgtgtttacaaaccttgagctagatagagagtgccgattggtgtttttacaatccctgagctagacataaagattctccacctccccaccagactcaggagcccagctggcttcacccagtggatcccgcaccagggttgcaggtggagctgcctgccagtcacgcgccatgcgctcgcactcctcagcccttgggcggtcgatgggactgggcgccgtggggcagggggcggcgctcgtcggggaggctcgggctgcacaggtgcccacggaggcgggggaaggctcctgcatggctggctgcaggtcccgagccctgccccatgggaaggcagctaaggcccggcgagaaatcaagcgcagcgccggtgggccggcactgctgggggacccagtacaccctccgcagccgctggcccaggtgctaagtccctcattgcccggggccagcagggccggccggctgctcccagtgcgggacccaccaagcccacgcccaccggcaactccagctggcccgcaagcgccgcacgcatccgcacgcagccccagttcctgctcgcgcctctccctccacacctccctgcaagctgagggagtgggctccagccttggccagcccagaaagggactcccacagtgcagtggtgggctgaagggctcctcaagtgccgccaaagtgggagcccaggcagaggaggccccgagagtgagcgagggctgtgaggactgccagcacgctgttatctctcatttgaggctgcagtgagccatgattgcaccattgcactccagcctgggcaatggagcaagacccggtctcaaaaaaattaaataaataaaaaataaaaataaaaagagagagagagaaagaaatcccctttctgagctgggcctctcaccagggacaccctctgcgtagaacacccctatccaccgcactccaactctcccaggctttttgttcattcttttgattccagtgtccacctccttacctccaggcctttcctgacccctcatgtcccaccttgatggcagtccctttagatcccctgtcctgatgctgaccactgctctgatggccggtttccctgcctatacctccatattccccactccctgcccaccccatcagtctatttgttcccggaaagcagggaccttgactagcacccagtgcagtgctcagtacatagcaggagctcaaggaatatttgttgtctgaatgaacaaatacacagacagagtatttcctgggaaggcagaatttaatctccttcctggctgggtgcagtggctcatgcctgtaatcccagaactttgggaagccaaggcaggtggatcacttgaggtcaagagtttgagaccagcctggccaacatggtgaaaccccgactctactaaaaatacaaacattagccgggcatggtggcgggtgcctataatcccagctactcaggaggctgaggccggagaattgcttgaacctggaggcagaggttgcagttagctgagatggtgccactgcactccagcctgggcaacagagcgagactctgtctcaaaaaaaaaaaaaaaaaaaaaaaaaaaagactctcctttctgaggccagcacaaggggttgagaacaagagcccttccacatggtcacagcccgttcttagtgtgtattcactgctggactggccactgcctcattcagggctctactgccaagcctcaaactttttttctgtctctctctctctttttgagacagggacacgttctgtggcctggctgaagtgcagtggcacgatcacagctcactgcagccacagcttcccaggcttgagagatcctccccatctcagcctcccaaggagctgagactacagtcatgcaccaccttacccagataatttttggtagagacagggttttgccttgttactggtctggaactcctaggctcaagtcatccacttgcctcggcctcctaaagtgctgggatcccaggtgtgaaccagcccacctggctattttttcctttattattatttttcttaggtccatgaaggttcatattgcaagaagtccacagggtatagagcaacgtggctccctctttctcttccccagagggagctgctgcatggtttccgtgtgctgtcttccactttgctgcatcttcacttcagggaggcctgcagtctgcagccctcttgggacccgagggcaccactccctgttggaacagaagagtcagttctggcatcagcagtatcactctgtagctgggtccaggcagaggggacatgggccaggaggatttattccaggctgtaagatgcccaagtgcagggcagctggagaagcccatgccgagagagcaggcagtgcccacagtcctcctttacagggtgtctactggatctcatgtcaaagcaccaagatgccaggtggcttgatgatgcctggggagccaccatggcactcaaggggaaagggtctcactccacggggagacctggagagggacatcccctatccaaccccttctgccaggtctagcccaagccttccccaggagggttgagaaggcggtgacaacctcaactacagcttctctgcccaaacatgaatccaggtttagataaagatgaacaacaggaggccccaaaaaggaaacctgatggggctctggggagagaggctctagggttagggaaggctttcctgggggactagtgtatatacgagcctcaggtcttgtaaggttttggaacgagggttggcagcttcattgttgagtcgctgctaagttgcaagggtggggagtgtcaagatatctcctagtccaattccattttcttttctttttgttttttgagatggagtcttgctctgttacccaggctggagtgcagtggcacgatctcggctcactgccagctctgcctcccgggttcacgccattctcctgcctcagcctcctgagtagctgggacaacaggcacatgccgccacgcccggctaattgttttgtatttttagtacagacggggtttcaccgtgttagccaggatggtcttgatctcctgacctggtgatctgcccacctcgacctcccaaagtgctgggattacaggcgtgagccaccgcgcctggcctccaattctattttctattctccatattttaggaccaggaaggcagatgctggccactcagccactctcatcccgctttcctactccagaccttattaggctaccgtgacaccttgtctgctaagcaacacatgtctgcaatgggagaaatcccatttgccacccttccctaaaggagctctgccttacctcaacaggccccacgaagaagcccatgggagtggcctctcctagagttttgcagtgcacaacctgtgcagccctccacaggggccctgcccggctagacagatggcttttggaggctccataaggtgggaagaggggtgggcccagggggttcataacctcccacactgcttcaccctaggcagttctacgctctctgtcttacacagtggacttacattggacttctgaataagacttcacttgagacagcgtgtcccattgctaataacaatgacacaggctgtgacaaccccttcagtagagagagaccagttaaaccacaggcttcacagtcttaatcccagctctgcctcttactgcctgcatgaccttgggtgaataatactatgtacctcacagtgtggctgagaagaccaatagagataatgcagggacagtgtggccagtgtggtgatagtgggaccacaaggaagaggacagtcccttccagctctgccggcagagcctagggagggctctcagcactgttggcgccgatcattctttgttatgggggctgtcctgtgcatctctggtctctacccactccatgccaaccctgccccctcctcagttatgacaaccaacaatgtttccagatattgccaaatgtcccaggaagacaaagtggcctccagttgagaagcgcgcgtctggagagaaatgctgcaggaagcgagaggcagtgggagctggaaggaatggggaaggcagggaagtcagcctccccctgctccggaaactcctgtcagctcctctgctctgtccctggagaccgcttgtctctgctggaggcttcctcctgataaggctgcttcgtgtgtgtgtgtgtgtgtgtgtgtgtgtgtgtatgtgtgtgtgtgtgtgtatgtgtgtgtgagagagagagaaagaggagcaggaggtgggggaaggagctggagagggaagggagaaggagagaagaagggggaagggggtagggagagggattgcagaagacagaaggagagagctagaaggctaaaaatacctctggcccccacgtccctagtttctgcacagacccaagatatagccctggggacctggggctatatctggctacatagtctggagtcctttgccccctcctcttagttacctgagggagatgattcaggccagaaggggtgcaaagcgggaagaggaaggcaggaagaggaaggcacccagtctttgctctccctgtcccccacagacaatcccccagcaggtttgccttctgtgcctccaaaatccaccagggtcaggctcctcccactcgccccatcagccgccacctctttgtttctggagttaccacctcactggtctccctgcttccacgttccttcttcctatcatgtgttctccaggaagcagatggaatgacatgaaaaatgtaaattggatcgtgccatccccatgcctaaagccctgtaatggtcccctcagtcctcaaaatccaagccagatgcccggctacagccttcaagtgtgcacggtccccaggcccctctttcactcaccaccaaactcccaccacactgtccttccttctattccttgcctgcaccatccccctagctttttaccaactgaggcgttatctgaaattcctctgcctgcttttctcagccccatgtcctaagcattaaggtgtccacaaagattcctttctcagacatgccttccctgcccaccccatctgaaaacgacctcttcaaatactggcccatcatcctgttgttctttacagcacttttgactttatcttcttaattcctggagggcagggacctcacgtgtttcttctgtatctccagggcccatgtgtctggcacacagtgagcagtcaataaaatggattgaatagacaaatgaatgaacaatgagatggtctccagagcccctcccagcgtgctggctttttgtgtcattgcagactttgcacctctggctccagggagctcacaggcaggggctggtccagcccagaggcgatgaagacagtgacgatgatgatggtggtggagatgcaggcgctgactcaggtagctccgtgaagctggaaataagtcatttgaggcaaatgaaaggatgacccaggtcacagtggggagaacaccttgggtgggggacttgctcgcctttctctgtgatgctaataacagacttgtcatggctccaaagcccttttcctcctttcagctgtctctctgtgactgtctttgtgacagtctcattgttgttgttactaagatggcttccctcagaggacggacacttggagtagtggcaggttcggccacccctagagacgatggcggtggggaccggggcagccccctggccccctgggctcaccccctcctgcgccaccccgggccgtgccgtgccaagccggccaccagagggcgcgccaggtcgcggcatcccggctccccgtcggcctggggccggcgggcggggctcggctgtctcctactgaggcctcgcacttcctctctgtcttgccattcctgtctccctctctccctacctggcatctccccctgctatcttcatcccctgccccctccttcgtctccattagcaaacccgcatggtagcctatcttgtggtgagccccagtgtccggcgcggggagggacacagacgcgtcccagtgggatctccgctcactagggagttcacagcctaacctgaacccccgcaccagcccagagcaatgaagcctcctgaaaggactgctgaggagagacaggccgtcctacaagaagtggggcaggacatggtcttccccacggaggtggctccacatccctcccacctaccccagccaggggccctctgactgtgccactcaccgtgcaggcgcaccacacaggacgtcctgtgatggaaaaggcttaggcagagtctggctgccttatctcactaaggggtaaactgaggctccagcagtgaaactagtgtgaagtctgggttcaaattccatctctgctgcttaatagctggacgaccttagacagccttcctaacctctctgagctcaagctgcggaagtggcagcctcttaggattatgggagaacacacatgcaacatgcttagcactgtgcctgcagttagtcattattcttaagaaagtggcctacccatggccacctattgagcagaggtggcagacctaggcccagaatccccatctgacctctgaactctcaggccctagttctttctgccgttgtgggcagaggctgcagggaacagcagaggatgcaaacgcccgttgagtccttttttttctatttttttttttttgaggcggagtctccctcttgttgcccaggctggagtgcaatggcacgatcttggctcactgcaacatctgcctcctgggttcaagagattctccttcctcagcctcctgagtagttgggattacaggcgcccaccatcatgcctggctaattttttgtatttttagtagagacggggtttcaccatgttggccaggctggtcttgaactcctgacctcaggtgatccacccgccttggcctcccaaagtgctggggttacaggcgtgagccaccgcacccggcaagtctttagtttgaggagaggtctgtgttactgtccccagctgtctcatctgtgttctcctgccatgggcatctcttgggatggctccacacttcctcctggcctggccacacctaatccttcaaacctagcccttgggtggggagaggggaaggtggccttagcattgccagggaagtatgaactggcacaatcttcatggaggcttcgtcagtgtctggcaatcctctgacccagttgttctacttcaggggatttaaccctacaagagggtcatatatatacacatatgaatgtatacatatttgcgtgcatttatacatatatctctgaaggatacataagaaactagtagttttgagttgggtgccatggcttacacctgaaatccctacagtttggtaagctgaggcaggaggatcacttgagcccagaagttccagaccagccttggcaacatggcaaaactccatctctaaaaaaaaaatacacaaattagcagggtgtggaggcatgtaattgtagtcccagctacttgggaggctggtgtgggaggatcacttgtgtccaggaggtcgaggctgcagtgagtcaagatcgcgacactgcactccagcctgggcaacaaagcgagaccctgtctcaaataaaacaaaaatccccaaagaaactagtggtttcgtttgcctagggtgggggggtagggtggaaggggatgggagtgaggtgaggtgggagattttccccatagctcttttgttattcttggatattaagagaagtgaatgtattacctatttaaaaataataatttaaacgttttttaaataggaatggtagccaaatgcaatgccatacaattaaataacaaaataataagtaaagtcagagttgggggaggagccaggtgggattccctctccccttctcatttctcacccttcttctttcttcctctttcccctccccctcctctctttcttcaggaagccacctgtcctgttttctccagcccacagtgaggtttctttgaactcattcattcattcacttatttatttattttttgcgacagggtcttactctatcactcaggctggaatgcagtatatgatcatggattactgcagcctccaccttccaggctcaagtgatcctcccacctcagcctcctgagcagctgggactgcaggtgcacaccaccacacccagctaatttttgtatttttttgtagagatgagatttcaccatgttgcccaagctggtcttgaactcctgggctcaggcgatctgctcgccttcacctcccaaagtgctgggattacacgtgtgagccacctcacccagccattcattcactgattcattcttcatttattctttcaccaaatgtgctcttgggtggaagcagggatttaggcagactctactttctgctctctacaggggagatggatattgagacgacacaatcctcagtattgtcattatcattcatcgaagtgccatgaaggagaagtggcatggcagcatagaaaagggacctgaactagcctggagggccagaaaggcttttctgagaaagtgactcctttatttccacttaactcttcaaaaacttttttctcttatgaagaaactcaaatatatacaaacatacaataccccatgtacccacagcccagctccatactgatcaacatggccaatcctaccttattttatcccacctactcccccacttcaccatgtcaaaaagcaaaatgtcaacaaattgagtttcaaaaatttaactggcttggccgggcgtggtggctcacgcccgtaatcccagcactttgggaggacaaggcaggcaaatcacgaggtcaggagatcgagaccattctggctaacacggtgaaaccccgtctctactaaaaatacaaaaaaaagaaaaattagccaggcgtggtgtcaggcgcctgtagtcccagtgactcgggaggctgaggcaggagaatggcatgaacctgggaggtagagcttgcagtgagattgcaccactgcactccagcctggggaacagagcgaaactccatctcaaaaaaaaaaaaaaaattttaactggcttttcttagcgattcatgaattgggcagaatcccatatacaaaacagaaaggtgctccaatggggtaaccagagaagctgggcttttttttttgagatggagtttcactcttgttgcccagactagagtgcaatggcttgatctcagctcactgcaacctctgcctcccaggttcaagcgattctcctgcctcagcctcccaagtagctgagattataggcatgcaccaccgtatccggctagtttttatattattagtagagatggggtttcactgtggtggccaggctggtctcgaactcctgacctcaggtgatctgcccaccttggcttctcaaagtgctgggattacaggcttgagccaccacgccctgccagaagctgggcttcataggcagaaaaatgttgaagaaagcagaaacggggaacaaaaagtggattggttatttcaaagttacattccttgtagggttaaagcagaggggacctccttatcatgctgtctcaggttgactggggcattttagctagctgctgtgaatatcctattttttggaaaactggcctatttctaagttcagtttgattatatggcccctcagaatgagtgactccagtttggtttggcctgatttgttaggacctagtgcagaagttcagtccaaaacaatggcatctcataaattttatttaacgatgctcacctcatttttttttctttgagaaaaggtcttgcaatgttgcccagactggtctcagactcctgggatcaagcaatccttctgccttagccacccaagtagctgggattatgagtgcaaaccactgcatccaactccacccaattattttgaaccaaatctcagatattatatttctttttttttttttttgagatggagttttgctcttgttgctcaggctggagtgcaatggcacaatcttagctcactgtaatctccgccttccgggttcaagcaattctccagcctcagcctctcaagtagctgggattataggcacgcgccaacatgcctggttaattttgtatttttagtagagttggggtttcaccatgttggtcaggctgatctcgaactcctgacctcaggtgatctgcccaccttggcctcccaaagtgctagaattacaggcttgagccaccgcgcccagcctcagacactatatttcatctgtaaatatttcagtataaatttccaaaaaataaggacttttaggccaggcagaggttgcagtgagccgagactgtgccaccacaccccagcctaggcaatagagtgagactccatctcaaaaaaaaaaaaaaaaaaatacccacagggttcttgctgtggagcatgcacctgtagtcctgtagtcttagctacttgggaggcagaagcattgcttgaacccaggagttggaggctgcaatgagctataatcctgccattgcactccagcctgggcaatagagtgagactccccatctctaataaaataaagataaaaataaaaataaataatacgtttttttaaaaaagctcactatggagatggagtgaaattccacgaagggcacacaatgagtgatgcatgaacgtgctcagcccatgtctttcctccccagctccccctcatcccctgcatcctattttcttttccttttttagggggggtggggatggagtttctctcttgtcatccgggctggagtgcagtggcgcaatcttggctcactgcaacctctgcatcccgggttcaagcaattctcctgcctcagtctcccgagtagctgggattacaggcgcccgccaccaagcccgactaattttttgtatttttagtagagacggggtttcgccatattgggcaggctggtctcgaactccttacctcaggtgatccacccgcctcggcctcccaaagtgctgggattacaggtgtaagtcactgcgcacggccgcatcctattttctttactgggaaacacactgctgtggagagggaaagaagccaagtgctcagggcctatccaaggtaggaagcctcaccctgctagcagccttgagctcaggcttcctgctttctgagaaatactgtcccgaggtctccagctccatagctagggatggtctgggggttggaaagaaagggggcgtaacagctaaggttttccattggctttttggggaccagtggtgcctcagatagagaagcccaaaactgaaagtttctcagagaattataaaaaatatatgtggtagtctcgtctcccactgccagtattgtggttttggcagagttatgataagggccgagtcttccatctggcatgggacccaaggcctcccagtcaaagacaagataccattaatgattagattgtcatcttggccaggatttgctctctcagcaggaagcagaggttgcagtgagccgagatcgcaccactgcactttagcctgggtgacagagcaagacttcatctcaaaaaaaaaaaaaaaaaaaaaagcaactgaaatacccccacacattacatatttgcatgttcatacatgttcaaagtcgtgtacacttataaacagacatgcctgcacaagtgtgcacactcctttatcacaggtgctgctggcttcccccttcctgatgaactctgtcagatgcccatttctcctagcaaccttgttttctgaaaggctgactccaaccctgctccaggagagggaccttcattagtctaagccaaccctggtggtcttagtccctctgatggagattggtttacctttgggctatgtgaccacgttctagccaatgacatttggaaagaagttggcttggggcttctgtgaaattttccttattcttaagaaagtcatctcagaagtgaagactcatttacctgtcattggattctgtaatgtgagagtgtggggtatggaaatgctgcagccatttcgtgaccttgaggatgcagaattaagcagagtggagaagtggaaatgacccagggcctctaatgccgttactgatccacacaatcagtcaacttgagagtcctcccttcccatctctggaattctagtcatgagagatattaacttgatttattgttcaaggtctcttttcttttttcttttcttttctttcttttctttttctttccttgtagcctaaggcagcaaaccgataccctccttccataaacacattatctcacatatacatatccatatatctgtatataaacaactagagccatatatagaaagtcacagctgagcacatgtgcacgctgtttacatgtatgtataataaaagcaggctgggcgtggtggctcatgcctgtaatcccaactttgggaagccgaggagggcagatcatgaggtcaggagtttgagaccaacctggccaacatggggaaaccccatctctactaaagatacaaaaaattagcggggcatgatgcgtgcctgtaattccagctacttgggaggctggggcaagagaatcgcttgaacccgggaggcagaggctggagtgagctgagatcatgccactccactccagcctgggcgacagagcaagactctgtctcaaaaaaaacaaaaaagcaaaaaaacccacataatattctacatgtatccacagtgattcaaacttaatatacacagagaaaagtatacatcctcctaggtacacagatagaaggacacatatacatcatgtttcatacatgcatgcaaatctatgtatagtacaacagacataaatgcacacgggcagtatgcatttctacacagagccacacatactggttacatcgatggcaacattattttttcctacccacgtctaaacagccacaaagtgcatacccacagctctgagggctgcttggctatgagcacccaggactgaagaaagttcaggaaatagttaggagagggacttacagaccagaacaccactgaggagtgaggaggtcaagtccagggtggcttggacatgcacggcagcacctgggtcatggatgctagacacagcaccaaggcaagctgtgattagagtgtttccaccttcaaaggcgaaaaaaaccttactctcacctaccccaggaccttcgtccatacagaagaaaaacctactttgcccttcaaacagctctttttgttttcctcataggcaaataattgagttagacgttgcatgaaagtcaatttttttcccatttatgccactgggcattctaggtagaaggaaaagtgcaaaggcaaagaaatgcaaaatagcacagtgagtttaggggattccagtggaaatgagtttgcagcagaaactgaggatatgacagaagatgaggtagggaaatgggcaagggccacgaacctagatttacctctaaactcccatggcccaatccattcatccgactcccagggtcacatgactttgctcccaggcctgcatcttccatccatcagctttttcatgccaaacacccaaattaaatggataaccaagacattttaggagacaaggtagcaatagtcagattttctttctggcttttgtatggggttatttaggttttctgctctaaattacccttcttttgtttcttttttataacagagaggagttaccaaggacattcttgctaaattagtttgtatttattattcaacagtgtaaatcatctttcaaaaatgtcatgtttccaagtttaataaaaagtatttccaaaacagtacatatggtatgttcccattttggataaaatgtttgtatgtatatttatatgtgtatataataaggtctggaagtaaatacacaccaactgttaagcaatagttacatatgagagacgggactgtaggtcatctttacctcctttttttttttttttttgagatgaagtctcgcttttgtcccccaggctggagtgcgatggcatgatctcggctcactgcaacctccgcctcccgggttcaagcgcttctcctgcctcagcctccccagtagctgggattacaggtgcctgccaccacgcccagctaatttttgtatttttagtagagacggagtttcaccatgttggccaggctggtctcaaaatcctgacctcaggtgatctgcccgccttggcctctcaaagtgctgggattacaggagtgagctaccgtgcctggccatctttatcttctttagacttttctgcattttttctcaattttatgtaaaaaatttctgaattttatgcatttttctgaattttatgttacttttatcatcagaagaaaatgattttaaattatttttaaagtttaaggctgggctcaatggctcatgcctgtaatctgagcactttgaaaggatgaggcaagaggactgcttgaagccaggagtttaaggccatcatgggcaatataactagatcgtttgtctaaaaaaaaaaattagtcaggtgaggtggtgcatgcctttcatcctagctacttgggaggctgaggtgggaggatcgcttgagcccaggagtttgaggctgttgtgagctaaaatcatgccactgcattccagcctgggtgacagaacaagatgctgtctcttaaaaaaaaagaaaaaagttgaatctacattgcaatagtttgaatgtttgtccccttcaatctcatgttgaagcttactaccccatgtaactatagcaagaggtgataggatcatgaagactctgccctcattaatgaattaatccactaataaattaaaggattaatgggttatcataagagtggattagttatcatgagagtgggagccaggcactgtggcttatgcctataatctcagaactttgggaggccaaagcaggagcattgcttgaggccaggcatgcaagacaaacctggccaacatagggagaccccatttctttttttctttctttcttttctttttttttttttgtagggagtctcactctgttgcccaggctggagtgcagtggtgtgatctcggctcactgcaacctctgcctcccggattcaagcaattctcctgcctcagcctcccaagttggtgggatttcaggtgcctgccactacacccaactaattttttgtatttttggtagggacggggtttcaccatgttggccaggctggtctcaaactcctgaccttgtgatttgcctgcctcggcctcccagagtactgcgattacaggcgtgagccactgcacccagcagggagaccccatttctaaaaaaaaaagaattagtcaagtgtggtggctcacacctgttgtcccagctactccagaggctgaggctgcagtgagccatctttgcatcactgcactctgatctgggcaacagagcaagaccctttctcagaaataaataaaggtctggtgtggtggctcatgcctataatcccagaaccttgggaggccaaggcaggcaaatcacttgagcccaggagtttgagaccagcctgggcaacatggtgaaatctctctccacaaaaaaataaaaaaacaaaaattagtcgggtgtggtggcccacacctgtattcctagctacttgggggactgaggcaggaggattatttgagcctgggaggttgagggttcagtgaacagtgattgccccatgcactccagcctgggtgacaaagtgagaccctgtctcaaaaaattaaaataaataaataaagccagtttggctctcagtgagctccccttgccatgtgatgctctgtaccgtcttggtattctacagagagtccccaccagcaagaagcctctcaccagttgtgccccctagaccttggacttcccagtctccaaaactgcaataaatcatcgtcttttttgtctttttttccttttcttttatttttagagacgggggtctcactatgttgcctaggctggtcttaaactcctggccggaagtgattccccagccttggcctctcaaagtgctgggagtacaggcatgagccactgcgtccagcccttttctatgtctatatatacagtctcaggtattcagctgtagcaacagaaagcaacctaagacatacattttaatcaaaagtataataagaaaatttcaggaagaagtgggaaaaggagacatacaatcaacctgtgcacagtagaatcctcctggtgtcttcaggagacccgacgtgatctgaccaggggagtcttgcagctccattctctgtaccaaggcaagtcaaacaggtaaagcagatcacagaaagggctctgacctcaagaaacatgtgatctaggtggaagcatgagtcacatatgcatgaaaaacacagcaggcaatgaatgacaggtaagctggaaagagaattcacctggttaccaggagatatgggctctgttcctagttctggcacccagtgatgaccttgggagcccagtggcttcacctctgtgaactttaatctccttatctgtcaaagggttttaatgacaataattgagaagctgtgatcatcagatgagataacctatcagtgactgctctctgaactgtggtacaagttacctttcaacctggaacagcacctcaaacatgaaggaatctatccctatggtggaaattcaggcccaagcagtgggcaagtggggtagatcatgtggggacaaggccacctttggttggcccttaaaaataccagaacacaggggcagcctgcacagctctaacactgcagaacagaagtcaaggtgggcattcttgcctcagctcgaagacctgcacagcctgctcacctttgtagagcagtgcaccccagggagaaaacacaggagcagccacgtctcagccttctcagaatgtccaatccttttcataatttaaccgcttgctctgcataattacttttctcctgcttatgagcttagagcaatagtagttcccaataactagagatttaataaggctaaattacaacgagtgtcctgcagaattacacaccgcattaacaccaaatgagttcattagaaattcattaggaatgatttctgcggctgccacaggaattaatcacggtttgccagtggcaggagagggggcaatgaatgattgcatgggagcgggacgaccttttgccatctgactttcttctgaagcaatatctttcaagggtcatgggctgctttggtagggagattgcttggacgttgttagacatgcctctcaatcttcttccttcttcccagccactgccctagatcaaacctgtagatgttggagtcggaccctttttctgtcctggggagctgagaagtcatcatgggcacttatgttcttgcctgcccagtatcctttcccccttcttctgtcagtgtacttctgtgtttcttggagagctgctccttgaagatactgctgcatgtgggtctctgtgggactgtcagttaagagcctccactggcctcacccacccccagagggaatacatgtcctcggctgagcccattgggctttctctcctggtattttttagtagctgatatttatgaagtgcttgctaggtgctggccccctttctaaggatcttcatgtactgagcatccaaccctcccattgccagttaaggaagtgggctttatttttagctctattctgtcaacgaggacaccccagtacagaggttaagtgacttgtccaagtgacagagcctgtaactgtccaagctgggactttgagtcatgagtgcagtactataaggatgaaggattgttgaaggtaatcaatgggttggcagtgccccagggactgtcccttccttcttgcttcctggtgctatgtgctatctggaggcctggtggtggagctttttcatcctttctatgagttactccatacgtttccaaaaattttattttttggtttgtcaccaagagtccgtgtctgctacttagatctgtaagagctttggctgatgcctgagccgaccaacaagtatgtaaaggcccaggtatagacactgcacagttataggccctgccctgcacaggccaaacagaaacataaggcaggcttcctgccttccagctgcttatatctcagatagaaaaacaacaacaacaatttcatcctgtgccttcctatgcaagttctttttttttttttttttttttgagatgcagtctccctcttatcgcccaggctgtagtgcaatggtgtgatctcagctcactgtaacctccgcctcctgggttcaagctattctcctgcctcagcttcctgagtagctgggattacaggcgcctgccaccacacaactggctaatttctttttcttttttgagatggagtctctctctgttgcccaggctggagtgcagtgtcacaatctcggctcactgcaacctctggctcctgggttcaagcgattctcctgcctcagcctcccaagtagctgggactacaggcacccgccaccatgcccagctaattttttgtatttttactagagacagggttttaccatgttagccaggttggtctccatctcctgacctcatgacctgcccatctcagcctcccaaagtgctgggatttcaggcatgagcttctgcgtctggccctacaactggctaatttttatttttattttttggagacggagtctcactctgtcaaccaggttagactgcagtggcacgatctccgctcactgcaagctccgcctcccaggttcacgccattctcctgcctcagcctcctgagtagatgggactacaggcacccaccaccacgcctggctaatttttttgtatttttagtagagacagggtttcaccgtgttagccaggctggtctcgatctcctgaccttgtgagccgcctgcctcagcctcccaaagtgttgggattacaggtgtgagccaccgtgcccggccacaactggctaattttaaaaatatttttggtagagacagggtttcagcatgttggccaggctggttttgaactgctgacctcaagtgatctgcccgcctcggcctcccaaagtgctaggattacaggtgtgagccactacgtccagccctcctatgcaagttctaagtggaaaagagccaggatgggatggattgggaggaggaaagatttcatagaaggcacatgagctgggtagaatctttggggagaggtaactgtcacggacactctttgggcacctatccagcccacagtcccttcttcaagaactgtccacccagagcagttggccctcacggtcgagatggttggtaccacatgacgcttttggtgggatcaagcatctgtacccttttctatgtttagagaactttccactacatggggcccaacgaaaggtgggcccaccttctagtacaaagctgaaaaggccagtactcatgtcccgtttgtcccatcgcccgatggcaatgagggtgcatggacatgaggtgggctcagcctctgcagctcatgatacaaataagcagggacaagagaatccattctggtggtggtggccatattctatgcccagggaaatggtggctgcagggtccgcatgcagtgctacccttgataggggtgcaaattgcccagtccagcctttggcagcagaatccttacaaaatcatttctgtgatgtgattgtggctgtggttctagctgtttgtcctgtcctgtctctgtctgttttccaagcctgaaaagtctgtgatccagtcgatatccttttgataaatttcttttttgctcaaatcagtttccattgcttgcaattaagagcgctgctatgaggagctctgcctccctgcacagagctgattggaccagagatgcccacttgactcaggataggccaatcagattatttctcttctgactcaggttctgagagctgtgttgtctgcgtgcacatgggtgagccggaaaggagacctgcagagaatgaaacagacacataaaggaaaggtatggggtagaagaagggagggaagggttcctgacgtttttcagattctggttctagttcctcatgaacctagactttgtgtcctatccctgggctccttgagatccttctgcattgttagaatattaggttgcaccatctgaaattgttgtttttataggtcaaaaaggtcaaatatcagcagttatacatgctgatggttcaactttataaatcaccttttttattttttaacctaagctagctcaagtaggttttgcctgcctttctctttctttctttctttctttctttctttctttctttctttctttctttctttctttctttctttctttccttcttctctcttataatttttattacagggtctcattctgtcacccaggctgaagtgcagtgatgtaatcataactcatagcagccttgaactcctaggctcaagtgatcctccagcctcagcctccctattagctgggattacaggcacgtgccaccatgcctggttaattttttaaattttttgtagagacacagtcttgctatgttgctcaggctggtcttgcactcttggcctcaagcagtcctctcacctcagcctcccaaagtgctgggattacagatgtatgtcaccacacctggcctcaagtggatttcgttttctttttaattttgtagagacggggtctccctgtgttgcccatgctggtctcgaacttctggactcaagtgatcctcctgtctcagccacccaatgtggctggcatgagccaccatgcctggcctcaagtggatttcttgacttgtgactcaaaggaccttgtctacaacagtcagaaatttcatcaactggccaggtgcagtgtcttatgtctgtaatcccaactctttgggaggctgaggcaggaggatcacttgagcccaggagttcacgaccagcatgggcaacatagggagaccctgtctctataaaaagaaagaaagaaagaaagaaatcccatcaactcaactcaaaagtgggttgtggaacaggcagagacacaaaacagaagcagaaaataaaggttttccctgtctggcagatactgttcctagtgaggtggctgccctgcagaacttcccagcttgtccctggtcaccatctcagaggtcactatcctccactagtttatgacccatggccatccagtggaacttcagctgtattccagttgcctcaaataacactgttcatgttaacacatagttttgaataatgctattgtttttgttttccccatgttgtggtgtttcctattgatgtatacaattttattttcctaacctcactgtccaacaaaaggagaatggctgagtaagttgtgatatgtctgtacaatggattacaatatggccattaaaagtgatggtgggctaggcgcagtggctcacacctgtaatcccggcactttgggaggacaaggtgggcggatcacctgaggtcaggagttcgagaccagcctgaccaacatggtgaaaccccgtctttactaaaaatacaaaattagccgggtgtgttggcaggtgcctgtaatcccagctactagggaggctgaggcaggagaatcacttgaacccttgaggcagaggttgcagtgagccgagatcatgccactgcactccagcctgggtaaaaagagtgaaactctgtctcagagaaaaaaaaaaaaaaggtgacggtggccaggcatggtggctcacacttgtaatcccaaaactttgggagactgaggcagaaggattgcctgagcccaggaggttgaggtggcaatgagccatgattttgccactgtactccagtttgggtgacagagcaagaccttgtcaaaaaaaaaaaaagaaaaaaagaagtaaaggcatgaggaattagaactggggaagtggaggtggtgggaattttgtaagagacttgataagaaggtaaaggttatttcaaaccagctgctgttgtgaggaatggggtgggattcatccaacaaggagaggaaagaaccagtgagtatcccaaagccctgctgagggagggtcatgaacttgaggtggtgttaccctcctccccagttgcgccacttcttctggctgcaggtgtaagtcctgcagatgggaggtagaaggacaaatgctttcttgtgtgtaaggatggggcctgggaagccaatgtggcggaaggacattgagggtcctggcagagtagggatacatccatgggctggataggaaagcagatgaggctgagtaggggatgaactggggaaaattgatgagctgcgaagctggaagcttcattcaatggggtgagacaattttgtcttctgctgtgtatctccatcccctaacacatagccttgtgctagtaagtacttattgagtgaatgaaatgatgaatatatgacttacagttctcattgtaatttttttttttttttgagaccaagtctcactctgtcacccaggctggagtgcagtgacacaatctcagctcactgcaacctttgcctcctgggctcaagtaattctcctgcctcagcctcctgagtagctgggattacaggcacgtgccaccatgcctggctaatttttgtatttttagtagagatggggtttcaccatgttggccaggttggtctcgaactcctgacctcggatgatccacccacctcagcctcccaaaatgctgggattacaggcatgagccaccgtgcctgcctggccctcattgtaacttaacagactggcattccactgctggatcagacagccagcaggatgcatggtggtagcaagcaccacttagttcagaaaaaactgaattcctatccaaacttaatcaatgactggttgtgtaaccttggacaagtcacctaacctttctgaacttagactttcttttctgtaagtagggattattacagccctctcagaagtttgttgcatggattaacagagatgccatgtgttgagtgcttagcatggttgtctggtgctttggggtcattcactaagtaccaaaggagcaatcagtctccaagaccctgattggttctgaaggctacatgtaatcaaattgttccttttagttagtggacaagagtgcaggacctgtagccagacatcctcctccgcttaccacctggacatgttatttctgagcctctgtttcctcatctacatgatgggggtaatatcaggactgacatacaagactggttgggaggataggatgataatttatgtaaagcatttagcacaggacttggcgcattgcaggtccatgttagatcttggctctcagtattttccatcaactgagatgctccatgggggcagcaagttttgttgagggcagaacaggacttttggatgtcagttagaaatggcataaggcatagagtggagctgttaggcaggcagttggatatactaagttcagagtagagatctgagatggaggaaaaaaattagagtcatcagcaaaagatgatatttaaagctattggctggatgaaatcaccaagggaatgagggctcagagaaaagacaagaagaagggctgaatgctagtacatctgacacttggagatgagggaaatgattaacactgcaaagctgggaattggacagagcatcgtggaagctgcacggccagcctgccccaacagttacttaacacactcacttaacacactcttatatactctgtgccaggtgctgcgaaaagtactttacaaaaatgaactcatttatttattttattttatcttatttatttatttattttattattattattatttttggacagaatctctctctgttgcccaagctgcagtgcagcggcatgatcatggctcactgtagccttccactcctacgctcaagtgatcttcccacctcagtctcctgactagctgggactacagacacatgccaccatgcccagttgatttactttattttattttttgtagagatggggtctccctatgttgcccaggctcatctcaaactcctgggctcaagcaaatctcccacctcaggctcccaaagaggagggattacaggcatgagcctctgtgcctggcctatttatttattttagagtcaagtcttgctctgtcacccaggaggtagtgcagtggcacaaacatagctcactgcagccttgaactcctgggctcaaacgatccttcttttagcccctcgagtagcagggggactacggacacaggccaccatgcctagcttaggttttctgtttgttttttttagggacaagttcttgctgtgttgcccaggctggtctccaattcctggcctctggcctcctgagtcactgagactacaggtggcagccaccacccctggctgaactcacttaacattagtaacatccccttcagataggcaccattattatccagattttgcagatgagaaaactgagacacaaaaaaataaataaggtgcccaaggccacagaaccagtaagtgacagagctgggattcaaacctaggcagcctgtgcctagagtctctgtctctttcgtgtctcattgtggataaacaaagcgccaactggattttcttatcttagtctttgactttttttttttttttttgagatggagtctcactctgtctcctaggctggagtgcaaaggcgcgatctcagctcactgcaacctctgcctcccgagtacaagcagttctcctgcctcagcctcctgagtagctgggattacaggcacccgccaccatgcctggctaatttttgtatttttagtagagacggggtttcgccatgttggttagggtggtctagaactcttgacttcaggtgatcctcccacctcagcctcccaaagtgttgggattacgggcatgagccactgcgcctggccttttttttttttttatgagttggggtctcattctgtcacccaggctggattgtagtggcacaatcatagctcactgtagcctcaaactcctggactcaagtgatcctcccacctcagcctcctcagtagctaggactacaggcgcaagccaccatgcctagctaattgttttttaatttttttagagccagggtcttactatgtaggccacactgatctcaaactcctggtctttgattcttgagagtaaaactagaagtatcatcatgggaaaatattgttctcagaggctccagttagctctgacattctagggatcgatgccaactagtatttcagattttagtggaggaaagaggaaggggagtttaatcaaggaattgataactctgatagttcacttactctatgcaagacctgtaaggtcctggggatggagagaataggagggtgcccagggctcctcctcacccatggactcaagaacctgtattcccacccccttctccaggcattactctgagaataatggtagctggctgaggcaggggccagagttcaggtggaaagctggggtggcccaggggaattagccttgggctcttctttatctctattggggtatagttgttctattggttctattgcctcataaaacttcactgtgatatggaggcagtttgagttcattcacccctccggggaggttctcaatgagggtctgaacaaataggtaaacccaggagaagaggggaagaggcgggcatgggtggatggaaggtggagggtcagatgtacacttagactctagggaaggggtgggagcatggctgagtcagtcagctgagtgccaatgtcatcctttcccatagccccaccactcccatcctgccttggacactgaccttggaagagtagcaactaaggaaaaaaacagctctgaccgtgcagaaggaaatcaatgggaaagggagttaagcgggggcctggagaagccacttggtccttcttgcccacatcccctggcctagagcttctcaaggctgctgagcagtacaatcactggggagtttgtcaaaatgcagattctagggccccaccccagacctaccaaaccagaattttggggggtcaggtcacagggatttctatttttcacaagccctcccttcctacatccccagtagcgtatgaacacagccttacagcctattccacatagatctgaacaaataaagtgaaatcaacactatcccagtacccaccaggaatacatacagaaggaaaaatgaaatgcagcttgaggcctggaagggatcacaatgtagttgggagataaaagactcactttgtgaagggttaaattaatgctgcaatatataaacagtagttcaaaataggcagctaggctggacgaattgccagtgagtgagaataacagtagatatccttcaacaatcacctgtgaaatgctagatcctgtactaagcacttttgctatgtactttcatttaatctcattaaaactctggaagatcggtatttttttccccatataataatgaatgaggccaggtgatggctcacacctgtaatcccaggactttgggaggccaaggcagaaggatcgcttgagtccaggagtttgtgacaagcctgggtaacaagtgaggcctcgtctctactaaaagttaaaaaattagccgtgcgtggtggagcatgcctgaggtccctgccacttgggaggctgaggcaggaagatctcttgagcctgtgaggctgaggctgattgtgccactgcactccaccctgggtgacagagtgagaccctgcctaataataataataattattattaataataaataaggctttgccttatttgttaattcttctcatattagccttccctcatactcaggaagtggtcgggtaatgtttctgtgttccaaaaatatccttatgttacagtctttatttctttgatcacatcatgttgtaactgcctgtttatgggactgtgtctcctacaagatttgaggacagaccgggcgccgtggctcacgcctgtaatcccagcagtttgggaggctgaggtgggtggatcatttgagatcaggagttcaagaccagcctggccaacatggtgaaaccccgtctctactaaaaatacaaaaattagccgggcgtggtctatgggggcctgtaatcccagctacttgggaggctaaggcaggagagttgcttgaaccctggaggcggaggttgcagtgagccgagattgtaccactgcattccagcctgggtgacagagtgagactttctctcaaaaaaaaaaaaaaaaaaaagacttgagacttgaggacaggtacttggtatttccagaacccagtgaactagagatgctcaggtgatgtttgttgaatgaatcaatggtgtgtctgaagtctcagagctaagacatgagaaggctgagtgactctaaagcccaggttcccccactgagtcattacaaagagaaggtacaggctctggggatttttgcaagggacaatctctacaggttggactaatcaaaaaagcctgattggaggaggcgggggtgaaggacaattagaattcagaaagactgatgaaaggtgagcagtcattccaggcaggccaaggcaggaaggaggggttttacaaggtacgaacttcctccaagacgagagaccccagaagactccaggagactgtgcctcaccccctaaacctttctagctcactcactggctgtcaccttctggctgacttgcatctccattaccgtggtaaaattatttcccccaaggttttcagggagatggtgaatttttcattgtttctcatgcctagagcatggcgacaaaacatactctattagtggatttgtccatttggcaagtccctttgaataatggatggagttttttttcagtttccatgaagaaataagactcatttatgtccatgatgtatatctatgtatatagctatgtgaaaaagagcaagacaaaacagtgtctccgaatttcattttggttaaaaccagtaggaaaaaaggatatgcacaaatatgtttgtgtccatgtggaaaacatctagaagtttatctactgaatttaacagcagctggctctggaaaatgagatgtagtgggatctgcggttttaacctttacaaagtcttaagcttttgtctttttaaacaatgagtatgcattaattttacaattgaaaaataagattgtttggaaggattataggtagcttcaaatttatttgtgttttgttctttccaaattttttcttttctttttttttttttttttagacagggtctttctctgtcacccaggctgaatgcagtattgcaatcatagctcactgaagcctcagtctcccaggtgtaagtgatcctcttgcctctgcctccaaagtagctggtaccataggcacatgccactacacctgctaatttttaaatttttagtagagatgaggtctctatattgccccggctggtctcttcctacattttcttttcttcttcttctctttcttttcttttgagatggagtcttgctctgttgcccaggctggagtgcagtggtaccatctcagctcactgcaacctccgcctcccaggttcaagtgattcacctgcctcagcctcccaagcagctgggactacaggtgcccaccaccacacccggctaatttttgtatttttactagagatggggttccgccatgttggccaggctggtctcaaactcttgacctcaggtgatccacccacctcagcctcccaaagtgttgggattacaggcatgagccaccatgcccggccacagattttctactatgaagatatgttacttttataatcagaaaataaaccccctttttattataaaagttgttaaaaagaaaagaaaaattctcaagatggcccaatttgttatgttgaggggcaggaaagtaccaaagatgtttgaaactctgagtcccagttaagctgggtgtaaagtaattcaatcccaatttgacaaaacattgtatgagttgtaagaatgttctagaccccttaagtttgtagtcccatcctggggctttagctcaaggaaatataggcataccttgttttattgcacttcacttgactgtagttcatagataccgtattttatttttattttttaggttttttagagatgggatctggctctgttgcccaggatggagtgcagtggcatgatcatagcttacttcagtcttgaactctaggctcaggtgaccttccagcctcagtgtccctgagaaactgtgtttttcacacatcaaatgtttgtggcaaccccatgtggaacaaatctgtcagcaccatttttcactttgtctctgggccacattttggtaattctcacagtattcaagctttgttattatttttatatgtgttctggtgatcagcaatctttgatgttaccattgtaattgttttggggtaccataaattccactcatataagagtgaatttttgcccgcccttccttccttccttccttccttccttctttccctccctccctccctccctctctccttccttccttccttccttccttctttcctttcttacttcttcctttttttttgacaaattctcgctctgttgcctaggctggagtgcagtggcacaatcttgactcatgcagcctctgcctcctgggctcaagcgatccttccgtctcagcctctcaagtagctgggactacaggcacacgccaccacacttggctaatttaaacatttttttatagagatgattttttgtctcactatattgccaggctggtctggaactcctgggcccaagcgatctttccgcctcggcctcctatagtgctgggattacaggcgtgagctgctgtgccctgccaaaatagtgaacttccatccattccccatctctctttccctcctcaggccttcttattccctgagacacaatatcgaaattaggccaattaggctgggcacgatgctttatgcctgtaatcccagcactttgggaggccaaggtgggaggatcgcatgagcccaggagtttgagaccagcctaggcaacaaagtgagatcccatctctacaaaaaaaaaaaaaaaattggccgggcgcagtggctcgcgcctgtaatcccagcactttgggaggccgaggcgggcagatcacgaggtcagaagatcgagaccatcctggctaacacggtgaaaccctgtctctattaaaaatacaaaaaattagctgggcgtggtggtgggcgcctgtagtcccagctactcaggaggctgaggcaggagaatggcgtgaacccaggaggtgaagcttgcagtgaactgagatagcgccactgcactccggcctgggcgaaagggcgagactccatctcaaaaataaataaataaataaaaattaaaaaataaaaaaattagctgggcatgatggtgaatgcctgtgatcctagctactcgtgagcctgaggtggaggattgattgagcctgggaggttgaggctgcagtgaggcgtttttgtgccactgcactccagcctgggtgacagagggagaccctgtctcaacaacaaaagaaattaggccaattaataagctgaaaatgtcttctaggtgttcaagtgaaaggaggagtagcacatctttcagtttaaatcaaacattagaaatgattaagcttaatgggggaataatgagatagaccaaaagctgggtctcttgagtcaaatagttagctgagtggtgaatgcaaaggaaaagtttttggaggaaattaaaatgccactcaaggctgggtgtggtggctcacacctataatcccaggactatgaaaggctaaggtgggagaatcacttgagcccaggagtttgagaccagcctgggcaacatagtgagactgtctctacaataattttttcctttttttttctttttttttttgagacagtcttactctgtcccccaggctggcgtgcagtggcatgatctcggctcactgcaggcttagcctcccaggctcaagtgattctcgtggctcagcctcccaagtagctggaaatacaggcacgtgccgtcatgcctagctaattttctgtgttgttagtagagacagggtttttgacatgttggccaggctggtctcgaactcctggcctcaagtgatccgccggccttggctttgcaaagtgctgggattacaggtatgaactaccatgtctggtcaaacctgatagcagttttttttttttgttttttttgagatgaagtctcacactattgcccgggctagagtgtggtggtgtgatgtcggctcactgcaacatccaccacctgggttcaggcaattatcctgcctcagcctcccaagcagctgggactacaggtgcccaccaccacacctggctaatttttgtatttttactagagatggggttctgccatgttggccaggctggtctcgaactcctagccttgtgatcctcccaccttggcctcccaaagtactgggattacaggcatgagtcactgggcccagccccaccttttttttttttttttttttgaggcagagtctcgctctgtcccccaggctggagtgcagtggtgtgatctcggctcactgcaacttttgcctcctgggttcaagcgattctcctgcctcagcctcccaagtagctgggattacaggcacctgctaccatgtccagctaatttttttgtatttttagtagagatgggtttcactgtttagccaggatggtctcgatctcctgattttgtgatccacctgcctcagcctcccaaagtgctgggattacaggtatgagccactgcacctggcccaacctgacagcttttcagaaacatgggaccgtgtttacaaactaatgctgggtgaagaaaaatagaatacaatattgtatttatgtggcgtgtggttattgtatatctgttacagttgataagaaagaaaacaataatgagggagaaggagagaaatagcaaaagagggaggaagagagtagaaaatataaggccgggcagggtggctcacacctgtaatacccgcattttgggaggccgaggcgagtggatcacttgaggtcaggagttcgaaaccagcctggccaacatggcaaactcctgtctctattaaaaacagaaaaattagccgggcgtggtggtaggcgcctataatcccagctacttgggaggctgaggcaggagaatggcttgaacctgggaggcagagggtgcagtgagtcgagatgtgacactgcactccagcctgggcgatagagtgaaactgtctcaaataaataaattaattaattaataaaagcagtttgcttgtattagggttatgggattatagggattttttgaaaaaaagacgttgaaagctattttaagagtaaatataggccgagcgcggtggctcacgcctgtagttccagcactttgggaggccgaggcgggcagatcacgaggtcaggagttcgagaccagcctcgccaacatggaaaaccccgtctctactaaagatacagaaaattagccgggcatgatggtgggcacctgtaatcccagctactcaggaggctgaggcaggagaattgcttgaacctgggaggcggaggttgcagtgagccgagatcgccccatgagactgtctcaaaaaaaaaaaaaaagtaaatataaactatacactggggctctgtgactttggcaaggtatactttgtcaaggtaacacttcactgaacctctgtttgctcctaggtgaaatgggggcaataacagtacatacttcatagagctgttctgaagattaaataagatcattcatgtaaaacactcagctgagtgccaaatgcataataaagatccaataaatgtgagctattcttgccattgttattattatcagtcattgttgtatcatcattattattatcagtgaggggaaattctcacatgctctaggcgggagtgtaaactgctatagcttttctgaaaggcagtaaagtaatagatatacaaattttaaatactacaatcctttgttccaggaatttcatgtctgggaattcatccttagcaagcaatcttagcaaataatctgacatgtacagtgaaaggtgtgaacaagaatatttttatcactgttatttataataggaaaagattggaaacaacctaaaaatccagcaatagctaagtaagttatgagacatacatatgatagaatactctggagctgttgaacaggatatgatatacccttttgtaatgatatagacatgtgcccatatcattacataaacaggaggtaacagagcaatatagtctcatttataccagaaaataaatatgtgcatttaaaagcctaaaagggctgggtgtggtggctcaggcctctaatctcagcactttgggaggccgaggtgggcggatcatccaagttcaggagtttgagaccagcctggccaacacagtgaaaccttgtctctactaaaaattagctaagtgtggtggcaagcacctgtagtcccagctactagggaggctgaggcaggagaatcgcttaaacctgggagcggaggttgccgtgagccaagattgtaccactgcactttggcctcggcaacggagggagacttcacttcaaaaaaaaaaaaaaaaaaggcatggtggcatgtacttgtagtcccagctgtttgggaggctgatttgggaggatcactggagcctgggaggttaaggctgcagtgagctgagatcacacacggcactccagcctgggcgacaaagagagaccctgtctcaggaaaaaagaaaaggaaagaaaaagcctagaaggagaggtaccaaactactatcacaggccacctctgacaggactctcacttgctctgaattatttgaaatttttatatatataacttaaaaaaatccatgacgtgtgtgtgtgtgtgtgtgtgtgtgtgtgtgtctgtctgtctgtctgtctgcctgttagactaaagtaagagtcctggctggagttagaaattccaagattggagattaaagcctggtaaaatgtggcagagttggtttttcatcagttcagagaccgcttagtcccaggtctgggagtcagcaactgtattgaattcagctttagatggaaatgaaggagattcatggagagcaagcctgggaaaaggaaatagacgtgcagaggtttcctgaattaataataataattggccgggtgtggtggctcacgtctgtaatcccagcactttgggaggctgaggcaggcggatcacttgaggttgggagtttgagaccagcctaagcaacgtggagaaaccccgtctctactaaaaatacaaaattagctgggtgtggtggtgcatgcctgtaatcccagctactctggaggctgaggcaggagaattgcttgaacccgggaggcggaggttgcagtgagccgagatcacacctttgcactccagcctgggaaacaagagtgaaactccatctcaaaaataaataaatacataataatcacgagagcctttgcagagtgttttatactttgcactgtcaattttgcccaatgcagaggacattctcacaagatgggtaggccggagtgatcacggaggagatagagtccctgcatgtgaagtggtactgagagacacagcaggaaatggaagtcaagattctgaacccctaaccccttccagctctgaagcttgaacaaaataaaactcatccagcatccagcccagtgcctggtgcacaggcatcttcaaggcacctggcaccttctcctccaggtgcgctgcctaggcccatgggtggctgctttactctggttgcattatctgcacccttaggagcatctgttctccttcaagtttgctttgctccagctaaactcattgtttcctttcatcatggccctttccatcttcgtcacactgttccctcgtcctagaatatcgtctccctttgttctcagcctcctccaaccttcctgcttctctacacatccaagtcctattggtcctccaagacgggtgccaaatgccacctcctccccaaacatgcactagccctgcgctggacaccattgctccttccccatgctccaggtcagccatctgcttttctcctggggcacatcacatcctgcttacacaagaactctctgcaggtgtgtgcttgtctctggactaaaccaaaggctcttttgggaaaggtgtgtgtctcgttcatctgtgtttcttcagtgctggccctgcatgcagcaagtgctcaagtgctttggctgcagagttagagggtgcaagagtgatgagagatggtgagagcatgggttgagggcagggcatgcgggaacggagggagagatgggcagagaggtgatgactcctcaaacccgttgccatcctgaccctgctggcaatggggtgacagcacttccccagggtgaataacctcggggctctgtccctccaggtcctgcccacatcataaaacagcaagtgcttcctcttcaggacaggagggagaagaagtggggtgacttaggggctgagcctcagcaactgggagagtttataagctgggatagcagacccctcagcaccacccattctcctcatccctctgctctctggcctccagcctcccagcagcatggctttcaccggcaagttcgagatggagagtgagaagaattatgatgagttcatgaagctccttggtgagtgagctcctgggtatcccttcctcggggttggtttgtcacagccagctctgggccaggaaccctaaagtagaatgggacaggatttcatccattcattcactcactcactcattcattcattcacacatttgttgagcaactgctttctcccaggctctgaggataataagaactaagacactctttaacttttttattttattttattttattttattttattttattttattttattttattttattttattttatttttgagacagagtctcactctgtctcccaggctggagtgcagtggcaccatctcggctcactgcaaccttcggctcccacgttcaagtaattctcctgcctcagcctcccgagtagctgggattacaggtgtgcaccaccacgcccggctaattttttttttttgtatttttttagtaaagatggggttttaccatgttggccaggctggtcttgaactcctgacctcaggtgatccacccagctcgacctcccaaagtgctggaattacaggcgtgagctgccgcacccagcatagacactctttgactttaaaacacacatagaatatattagtatttccactttactgatggaaaacttgaggcccagggaattaactagtccaaagtcacacagctagtaattggtaaagtggagacttggttggtgaagtagagatttgatgtttatttagtcaaacatgtatttatttttattcatttatttttgagacggagtcttgctctgtctcccaggctgaagtgtagtggcatgatctcagctcactgcaacctccgtctcctgggttccagcaattctcctacctcagcctctcaagtagctggaactacaggcatgtgccaccacatctggctaattttttgtattttcagtagagacggggtatcaccctgttgctcaggctggtcttgaactcctaacctcaggtgatccacccacctcggcctcccaaaatgctgggattacagacgtgagccaccgagcccagcccatcaaacatttattgaacaccagctatatgcaaggctatctcagtgttaccaatggggactcagcgtgacttgcccaagtcagtggcagaggccattggcacccaggaccctgtgatgagtggtgtcaccacatcctgcctgggagaggaaaccaaagggttagcatggagaccaggtttgacaagtcacttcttcacacagtcattcagcaaacacaggcctcttactgtgccaaacactgtgggcagagagaccagtgatttcattccttctctcactgcttgacttgtaacaccagtctgttgtgaggaaccaatgagacagtggatctgacaatcttgtggaaatctcagtatctcactatctaaaaagtctcaggcagtgtaactctcaaggttcagaggacagctcaaggggacccgtgccctccctcttggtggccacttcttgcctgccagctggctcagagcaaccctgagaccagggcccttgtgccttggggccttgaggagtcgagagtccctctgagtcatgtattggcagtggccctgaaggagcaatgacttggcttcacctataacagcctcgtgttgtgggatgggaagtgagcccactttggttctagacctgattcggtcattaaatttcagtgaaatactgggaagtccctttcccattctgggtgctcacttccttatctgtaaaataaaagtattagaagacacagtctttctctggcagggaggaggggacggagtcctgctctgtagcccaggcggaactgcagtggcgcgatcccagctcactgcaacctctgcctccagggtttaagtgattcttttgcctcagcctctcaagtagccagtattacaggcacctgccaccatgcccagataatttttttgtatttttagtagagacagggttttaccatgttagccaggctggtctcgaacttctgaccttaaacgatctgcctgcctcgggccctcaaggagctgggattacaggcatgaaccaccatacctggtcttgaaagtctcattcattccagaacttcgcgagcttggcaagattcagttatatttatattactatcagaagcttggttattattgatgagcacccaccatgtgccaggagcttcacaaacacactcacattgaatataattcttgtaacagccttttgggatgggccttattatctccatattgtggatgaatagactgaagctcagagagatagggactttccccagccacatggctcacagcacgtattagctgtctcaggcactgtgctcttaacctgcaggctagcctatcatgcacaagggggtagggcggtgggggtgggcaggaaagctcttttcccaaaccacagggttaaaagcagctcttatatggctactctgcttgtccccgggtccagggatctccagcgatgtaatcgaaaaggcccgcaacttcaagatcgtcacggaggtgcagcaggatgggcaggacttcacttggtcccagcactactccgggggccacaccatgaccaacaagttcactgttggcaaggaaagcaacatacagacaatggggggcaagacgttcaaggtgagaggccactggctgtccccctccttccccaggcctccatctgacttctccttctcaaacatggcctccccgctcccgagctgaggcttctttctccagtttggcctccagcattaggagcttgagttacttggcaatttaatgctcctgatttttaatggtcaaacatgggcactaaaacaataagaaaaatagctaatacttgctggacacttattataagctagacacttgctgaatagtttttccatcttaatgcagttaatcctatgaaattgctacaattactctctccagattgatcggggaggctaaatcatgagattaaaaagcttgctggccaggcacagtggctcatgcctgtaatcccagcactttgggaggccgaggtgggtggatggctcgaggccaggattttgagattagcctggccaacatggtgaaaccccatctctaccaaaaatacaaaaattagctggacatagtggtgcatgcctgtaatcctggctactcaggaggctgaggcaggggaatcgcttgaatccagtaggcagaggttgcagtgagctgagatcatgccactgcactccagcctgggcgacagagtgagagtccatcacacaaaaaaataaataaataaaaataaaaaaaaccttgccttagttacacaacaggggcaggcctttacaccaggcactagagagcataagtgtttttttttttttattcgagactcactctgtcacccaggctggagtgcagtgtcatgatctcggctcactgcaacctctgcctcctgggttcaagcgattctcctgcctcagcctcctgagtagctgggattacaggcgtgcaccaccacatctggctaatttttgtatttttagctgagatagggtttcatcatgttgaccaggctggtctcaaactcctgaccttgtgatccgcccaccttgacctcctaaagtgctgggattacaggtgtgagccaccgtgcccagccataagtgctttttttatgctgcctctctgtgtagcacagagataaagacactgggccctggagtgagccttggctgggtttgaaaccatgatttcccaccagcaattgtagggccttgggcaagtcatttcactcccctgagcctcatatctctagtatgcaaaaggagactacatacaatctctagctccaagagctgtggtgaagattaaacaagacagtgcatgaaagcacctggcatgttgcctgccacataatgaatgctagaagaaaaaatgcagtcatttgcttttgttttagaagtgaagaaactggccgggcacggtggctcacgcctgtaatcccagcgctttgggaagccaaggcaggcagatcacgaggttaggagttcaggaccagactggccaatatggtgaaaccctgtctctacaaaaaatacaaaaattagccaggcgtggtggccggtgcctgtaatcccagctactcgggaggctgaggcaggagatcgcttgaaccctggaggcggaggttacagtgagccgagatcacaccattgcactccagcctgggcaacagggcgaggctccgtctcaaaaaaagaaaaaaaaaaaaagaagtgaagaaaccgaggctcagggagaccaagtaatgtgtctagggccttgcagctagaacatggtgggaccagggatttgaaccccagctatttgcctctatcattaggcctctggtgacccatgtggagttctaataatagaaaaggagtcaggttggcggcagcagggtaaagcaaaaaaggagagcagataagctgtaagtctgcctttcttcatggtccagaacacatagccctcctgtgcaaataactcacaatcttcctgtgcccagctatcatcacctccactgatagaaaaatgtaagttatctcaccataacctttgctttgtcagtactgcacaaaacccgcttcagcacacagcataagcaacagtctataaactctccagcaagactttgtctccttgcagtcagctcctctcttgctgtcctgcccagtgcacccttgcaacatattttcatactttctctaagaaatctgacttttttttttttttttttttttacctacaactgtcttggtaaattcatttttttttttttttttgagacagagtcttgctctgttgcccaggctggagcgcagtgccacgatctctgctcactgcagcctctgcctcccgggttcaagtgattctcacgcctcagcctcccaagtagctgggattacaggcatgagccaccacaccgggctactttttgtatttttagtagagacggggtttcaccacgttggccaggctggtctcgaactcctgacctcaagtgatccgcctgcctcagtctcccaaagtgctgggattataggcataagccaccgtgcctggccttggtaaattcttcttactgcccgcgccaccagccccagatagttgccaatcacctgcaacaacccaggcttaatgttgtgcttccattccaggccactgtgcagatggagggcgggaagctggtggtgaatttccccaactatcaccagacctcagagatcgtgggtgacaagctggtggaggtgagtgtcatgctgattcctgggatgattattggatatttgtctgcctcttggccacagcccctcagaagtaggcctctacgcagctggctttaccagcacttcccttgtaccaggctctatgctgagtgctggatgcacatgatgtcatttggtcttcaaaataaccctgttaggtggggatttttatctccatttgaggagactgaagcacagggataagtgagggagcacacagatttgacgacagagctgaggtttgatgctaagtagcctgactgcagcactcacactcaaccgcttctgggacacgagactggaagcccggaagatccttcccagaatataaataaaggaggtggtccaggtgggctcctcaaaggacagccaccactccattccttttccatgagggacatcaggccccttctaccagatcttctgatttatcaagagaagttggaaatttgcacttccgtgtgaaatctccacactattaaatattggcaactaattaaaaaaattctgtaaatattggcaggtcccacacacacatctggggacccactcctcctacactggaggtggtgccctgggaggcccttcctctcacttctgttgctttcccgtgggtctccaagttttccccaggtggaaggaatgaacgtgaggttaaaagggaaaagaaggcatttccatacttcattccctcactgtgagcctgtgacctgggccagagaccctctggggtcccgtgtaggtctagaaagggcccttccctcctccctgaagctctccagcagggaagacatgatgagggaggcagtgtttgtgtgacccctttgcttctccttctttgatccttctctctctctctctctcattctcgctttcttgtgcccacatctcaagccctgtcaagaggaaaggagcacactgcctctctcagacactgtggtgtaaatgatttacaccacagacacttatttcacacagctctggaagcaggaaagtacaagatcagggtgccagcatggtcaggggcttatgagggcccccgtcctggtttcttcacatggcagggagacgtcatctctctcatgtctgttttttttttttttttcgaaacagagtcttgctctgttgtccaggctggagttcagtggcatgatcttggctcactgcaacctccgccctcaggttcaagcaattctccttcctcagcctccccaagtagctgggattacaggagcccaccatcacatctggctaatttttgtatttttagtagagacagggtttcaccatgttggccaggctggtctcgaactcctgacctcaagtgatctgcccaccctggtctcccaaagtgctgggattacaggtgtgagccactgcaccaggccttgtgtctgttgttatgagggcactaatccttcatggggactccactctcataacttaattaccccctaaaggtcctatctccaaataccatcacactggggctttgacctttatcatatgggtttggtggggggacacacgcgcagtccataagatggcccaagaggttccgtgccctcccattatacttattttacagagcagcattacaaggctcagagacagcaagggacttggccgtggccacacaactagtacatgcagaggcagatctcatctgctgacttctagactaggccccctgcctcttctgcccaggcccacgggtctttttatccccctttaacatttttgtttaaataatctaaaaattatctgggtgtggtggctcaagcttctaatcccagcactttgggaggctgaggcaagtggatcacctgaggtcagaagttcaagaccagcccagccaacatggtgaaacccggtctctactaaaaatacaaaaaaaaaaaaaaattagccaggtgtggtggtgcacacctgtaatcccagctacttaggaggctgaggcaggagaatcgcttcaatccaggaggcagaggttgcagtgagcaaagaatgagccccctccagcctggacaacaagagcaaaactctgtctcaaaaaaaataataataataatctaaaaactaatagatgtacagtgttgaaaaactgtaaaaagaacaaaagtgactatatccctcttctcctgggtgaaaactgacattttgaaggatctgatgaaagggcttttgatgcatttttacatgaaatgtcagtcagtaactcccagaagaagcaaagctccccagcctgtgaggtgtgcaggaagagcatagggcaggagaactggaagcaggtttgggcctgacaagagaattgatcttcccaagctgagcgaacctgcttgtcaattcccagagattcctcatcatggagcccatgtggtgtgggcagtgaccagagttcagggtcatcatgcacacacacacatgacacagccaggaacacacacatgtatgcacatagacccaggcacgtgcacacataaacaaagttgcatgactaggccccgagaggagctgtcttgattgcaaatcccccatctctagaggcccagaatcatcctggcacctccccacttctccaccaatagacagtgcattttgtaagcatccctcctgccttccgccaccagcacccctgccatgttctcatcacctctcccctacaccaagccccagcctcctctgattccacctctcccccaccttccatccatcccatatgcaaatcacacatcacctcccactgctgccctttgttatgaatcaggaccaaactcctccgcttgaccttccacggccttactgcccaattctacaggtatgctctccccagcccctctggaccagctactgctcctgagctggacagagccattcctatctccctttctgtgccatgtgcttcctctgctctgaattccctttctcctgtttgcttttccaaatccaattcttcaggattctgtccaacagccaattccccctcctgttatctagtcagtggctccctgcctcctctgggctctcccacagctctctgtttgctacccgcccttctcatggaaatgctgctttcttctgctgggtgtcagaaccagctgatgacacgtgcacatccaatggcagcacagctccacagcatggagcctggggcaccgcacactgtgggccttcaaagaacagcatcccccccgcctgcctctcccactaaaccttaggcttctcgagagtagggactgtatcttcccatcaccgagcatgtgacaggtgctcacaaacactgcatggtgcagccatggcgtgtggccttggaaggattacttgacttctctaaacttcaattttcccatctgtacaatgggaacaacctcacagggctgttgggaggattaaatggaatcatgcagggtaacagcctgacatgggtgaatggagaggaaaagaggtgcagggttccacacccagagccacatcacccctcacagctggttaccattcatcacagggagtcttcacactgactcctggaacaaattgggaaactgaggccgaaagaagtggtgcgcctgactcttatctactcaaggccggggttggagactcatcttccttcagcggtgcctcctggctaccttggggtggggcactgactccctctgtcccggctgcttctttcaggtctccaccatcggaggcgtgacctatgagcgcgtgagcaagagactggcctaagcagccaggcccggcccagggagctacaaacccaccaataaaactgatataaggacagacgctgctcgctccagaa

SEQ ID NO: 362 - DNA, 16785 bp, Homo sapiens
aaaagagacagaaatgagaggggaggggatagaggattcctgaacagagaccgcacccatgacccacgtgaccctgggaaatgcttctatccctgagaggaggctcagcacagaaggaggaaggacagcagggccaacagtcacagcagccctgaccagagcattcctggagctcaagctcctctacaaagaggtggacagagaagacagcagagaccatgggacccccctcagcccctccctgcagattgcatgtcccctggaaggaggtcctgctcacaggtgaggggaggactccctcggagtggatgggaggagggagcacagagactggctagggtctcctggggaggacaaggctctgagaggagacagagggcttttgttgaagcctgaggaaacagaacaccagagagggacaggggtcacaacaggaaagtcacactaaactgggattgataaaaagggaggaaaatcaattgatcatgttttccaagttaatcatcatttgtcattaccatttgaaaaaaaagaaaaatgatagaaatcagaactgcattaggatgacactccaaataaaaatataacaaggaaactaaatgctgcccttactcaccaatcagaagttgaaaaataaccaccagatacactcattaactcatccacaagcatttgcaatcaattttagtcaatggcatacaacaagcatcagacaagtctcagtcatcacagagcttatgctgtcatgaagaggaaaacacacacacaaagagatatagaatgtgaggtcaggtgttgacaagagccctggaaggaacagagcagggaaaggtcagaaagaaaagacccagggtctgtagagggggtgtcagggaagggatctcccaagaatgccctgatgtgagcaggacctgaggccagtggggagggagccatgcagacccctggggaagagcattccacacagggaaatgccaaggtcaaaggtgctgaaggaatgggggtgtcacactgctgactttgactcagtaggacacacacacacacacacacacacacacacacacacacacgctccaacgtggaggggtgaagagacctgctcaggacccagggccctgtttttccaccctaatgcataggtcccaatattgaccgatgctctctcctctctcctagcctcacttctaaccttctggaacccacccaccactgccaagctcactattgaatccacgccgttcaatgtcgcagaggggaaggaggttcttctactcgcccacaacctgccccagaatcgtattggttacagctggtacaaaggcgaaagagtggatggcaacagtctaattgtaggatatgtaataggaactcaacaagctaccccagggcccgcatacagtggtcgagagacaatataccccaatgcatccctgctgatccagaacgtcacccagaatgacacaggattctataccctacaagtcataaagtcagatcttgtgaatgaagaagcaaccggacagttccatgtataccgtgagtatttccacatgacctctgggtgttgggggtcagttctacttcccacatacgggattgtcaggcctgggttgtgcctgtggccctctctgcattacatcctgtatcagggtttggacatttagtgcaggacacacacgggggagacaaacttccacagatcagaattcctttcctggatccagaccctgcagacactcgctgcagaggaaggacagtctgatggggggactcagcagggcgaggtcagtgtcagacaagcaccccatggtctccccatggacctgaccctgagaaagaccctggagaactggatcagggcctggcctgaggggtccccctagggacccctcagagagaagctcaactcttccctgaactgagcccctgtacaaagccctgtccctggttcctgattccaggtgatcctggggagtctgtgccagggctgtgtggtggcctcttgggcagggctggctgggagcaaggatgtgagctatccaagggccatgactcctggagttggtcaccagccaggtccgagcacccagagcctcatctagctgaggatagggcctcctccttcacttgaggctcagcatggaaaggacagatggaaaaaattactagtgcatgagcccactgccctgggggacacaggttactccctgggaagttcagagtccccaaggggaggaacagagaagagaggatgctcctggcagctccatgtccaccagggatcaggcccagggccctctgtcttggaagcaaataatcatagataactgttcacttgggcagctcctctgtgcagagctgagatcaagtaattgtaaatattttgaggttaactcacaaacaacctcacagccaaatagcacttatcctacttatagaaaggaaattgagggacagggagacagtcactaacaagggtcacacaggccataggtggcagattagagacatatgaggtctgtctgcagccacagccccctcctctcctcaaccgggggtgatggggctgtttgttgttaggcatctgcatctgaggccagtcatgggttcacttccttttgtcttgtgcatccgcagctcagaagtggagattctggtctggaaagtaagaagcaaacagagaattaatcagttttactctagaactaaatcacctgcctcaaataacagagtcagtgctgggattgtccaggcctctcccttcgatccacagtcccctcactgcacctgaaatcctgtttcccgatgtgtgggtgtcactcccatgggaggataaaagagaggactttgctttctctccccactcacaccctgcaccagcacaggcccaaagtgagacacacgctcgctcaggagttctctcttgaaaaagggaagaaaggaagaaggaatgaaaaaaggatccataacctctttagagaccggctcctggatgcagaatcctatgaggttctggccacacctgtttcttgtccctcaggggctgacacccatgttccatccctctgaacccctgtccctaaacctaccccatctcatgtgactctggggttccttggtcattagagggttttcaggtctccctggtcctggtctggggcagccaagaggctcctggtccctggggtctctgaggtcactgtatcccccactgctcactgccatgggtatctctggctctttctgctcctctctgtccctcattttcctcccctttcattctagctgggatgccctgccctgcacagcttcctccacccttaggccttccccagaaaacccctctaacaaggctggctgtcctgttcccttcctgctcacactgtgtcctggcccacatcccaggcaacagagaaggcacagaaatcagccggagcagccgcccctgccgggctccatcacgagccaatgtccccaagtcaacaggagaatgagcttccactgtgtccccatccagggctctttcccccagtgaggccgacatgtggaacaggccacgggacagggacaagcgactcctccatacagtctctactgactcaccaggcagtcagaggcaggatgacaggtctgctttccccaaggcccagaggctaatttcatccattgacttccgtcctcatcttggtgtgaggctcacatcctccagtcattccccaggaccttccccaggtggagccggccaggcaggtgctgtctgatgggtttgctgcccattccacatacactactgtgtcctcatgatgatgccattgtcataaggtggggtcccttggactgagaagtgcaccagccactggagtctcacatagactctgcccagtttagatgaacttaaactctcattgtgttttctcaggttaacaggagaggaagaaagcatttcacatgactgtttggggctccttccctatttgcctaactgcacaggaattaggggcagggagctctttctaaatttactaacataacacacgttgcttctaatttggcatcgttccttcctttatgtaactgacacacacctaagacttcctctcctactggttctatcctcctaagaggactcatatgcctctctctactcaaggagttgctaatttcaaaccaacttcagcatcttcatttgacgacaatatgatcctgctggaattcacagcacacctaaaccttagtatgttatcaagaaaaatactacttccagcccttgatctttgatctttaggacattagtaacgatctccacttatggaaaaaattaaatgtttcccccaaagttcttttattttttactatattcagaacataacatgaggtctaaactcctgacaaacttttcaaagcaaattacaacactacaggtcaagcatcccacatccaataatccaaaatctgaaatgctcccaaatctaacactttttgaccactaaagtgatgctgaaaagaaatgctcactggagcattttagattctgggttttcaaaattagggtgctaaacgggtaagtctactgcaaatattcaaaaatccagaaacagtcagaaatccaaaacacttttggtcctaagccttatgcgtaagtgatactcaatccgtatgaactataggtaccaagctgtacagcaaatctctagaacctcatcctgtgtataactgaaagcgcacacccattgactaactccccattctgcctctcccaatccctggcaaccatgattctactctgattccatgagtgtgactactctagggacctcatataagtggaaccctacagtatctgtcctgtgagtgacttattgcatttagcataatgtccaatgggagaaaatatttgcaaaacttctcctcaaatttctgtctcatatctgtcaaacacacatggtccttgagagtcagatttgcagcatttcatgctccccctttccaccactcagctgtgcatttgcaaacatccacatgtgtttatggagagagccacagggtcctcacctgccctccgcagagggagaagaaacattaaaggccaaagaaaaggaacacggttctgctgggaaattcaggcagctcctgcctgtccccctcactgtcttctagatcattctctgaattctgctctatctgtaggtgtcacaggctcaagtcagtcattattaaacacctgggaaaaactgccccacctgtggttccactgcctgatgaccgaactgacctccaggcttgcccctggtgtcccctgtgttatttctgctgaaaggtccaatcccaggccaggctgcacagtatccttggggtttaaggacaataagaagtcccatcatcacccatctctagaatgtccttagaaaaggaagccacacagaaaatacagctaggggggcaaagtaggactaaagcttgaaaagacccagcacctgaatgtttcaggtgaggactccaagggaagccaggcaggcagctggtcagggagaaaccaggagaagcacaaggggctgtgaccccgggtcctgtgtctgtccatgacccaatgctgctgctcaattcacacttgagaaagactgtgcttctcccacacagagcaggtgatctcacacaatctcagccctcaaatcatcgtgcatctgttgtgtgacacacacacctgccaggggcttttaaggactcaagggggctgagaggtgagagatgccaactctgattgaaagatgcctgtggaggaatcaaaggtgccacacagggcaatcttctctctgttttctgcacagcggagctgcccaagccctccatctccagcaacaactccaaccccgtggaggacaaggatgctgtggccttcacctgtgaacctgaggttcagaacacaacctacctgtggtgggtaaatggtcagagcctcccggtcagtcccaggctgcagctgtccaatggcaacatgaccctcactctactcagcgtcaaaaggaacgatgcaggatcctatgaatgtgaaatacagaacccagcgagtgccaaccgcagtgacccagtcaccctgaatgtcctctgtgagtatcttctgttcctctgtggcccaggctgccagcccaaatccacacagccagagtccaggtctctcagtccctctcaggtctaaggactcagaccctcacccaggctggccatgacttcctgccctgagcaaacctgggcagaccaggccttgaccaagaatgggaggggaggggctgtctcctgtgctacttctgctcaaacacccattcccatcatcactcatctccaggatgtccttaaggctcagggttcacattttctgatgggagaaacaggtgaatgtctcagactttggctcaggggacatagcgggggtttggttgagacttcagggttgtgacatggctcagggggacaccgtggcccttccacagaccaggaacttatgcttccctctgacaacatcacctgtggctttattctctttcctccagatggcccagatggccccaccatttccccctcaaaggccaattaccgtccaggggaaaatctgaacctctcctgccacgcagcctctaacccacctgcacagtactcttggtttatcaatgggacgttccagcaatccacacaagagctctttatccccaacatcactgtgaataatagcggatcctatatgtgccaagcccataactcagccactggcctcaataggaccacagtcacgatgatcacagtctctggtaagtggatccatgaagcactagcatcacattttcaggtggagtctggctctcagagaagagccaggaagaaattttctttcccaacctgtgtccaaggggcacacgcaaatcccaaattctcccctgaaccctcccaattcacctctgcagactcttttccccttgtttttttgttttttgttgttttttgttttttgatttctcatgtctgactttgggtccatcctggaatgagaggagggggctccctcagcactgagccctgtgtagtgaaaggggcttcacagagaaaaaaggaggaagggtcctcagggtcaagttcctgctctctgtcaccaacaattccctttctgtcacttctttgtgttcttttacctactccataagctacaagggacaaggaggttttgaaatgagctcacactttttccttaaatgagaagaggaagccccttgggtgatggaggagcagctcagactctgcccccatctctgctcccagcacccccagtgactgactgaccccaccctgaagccacctaaggtggaaccagggcatatggagaaggtgcccaggtgtctgtcctgaatcaggctaaatcaagatgctaatcaacaccaaagcctcccctggatcaggccgcaggaaaatgggaagacatggagcctcatgacagactgctgagctgtgtcctggctctgaagtcactggctgtataagactgtgggcacagcacatgggacacagcacagaggacagcaagtgacgcacacttggagacatagggagattcagccatggggactctgcatggcagggaaggggcagtgccaaaaagtgtgtatttatagagaggataagactaccagccactatgtatctaatataggacttaccttttcaacccttccacgtgtgcaggtccgtagtattaaacacattcccgttgttctgctaccatcaccaccacccacccacagaactctcttcttcctcccaaaatgaaactctgttcccatcaaactcctgggcagagctgcccacctgtgacccacagcctgacccctgaactcacctctagacttgcttctggtctcccgctcaaacccccatccccatcatcacccatctccaggatgtccttaaatagcaaagcctcagaaaaaacacaccttggctgggtggtgtgggactgtgcagctgaaagaaacagcacctgcatgttccaggtgagtaccccaaaagaccaggcagtcagccagtcagggaagaaacaggagaggtgccagaggctgtggctgtcagtcctgtatctgcccaagactcaatgcttctgccctattcacatttgagaaagtctgtacttctcccacacaaagcaggtggcctcgatctccgagccctcagatcgttgtgcatccgtcttctgacacacacacctgccctgggctcttaaggacttgggtggactgaggggtgggagatgccaactctgattgaacgatgcctgcagaggaatcaaaggtgccacacagggcaatcttctctctgttttctgcacagcggagctgcccaagccctcggtcactagcaacaactccaaccctgtagagttttctacatataagtttaagttatctgtgaacagagataattttacttctttccgatttggatgtctgtttatttgtttgtttgctgcctaatttctccagctaggacttaaaatactatgttgaagagaagtggggcaagcaggcatccttgtcttgctcctggtcttacagggaaagctttcagtctttctccattgagtatccctctattatgttgaggtggtttccttccattcacagagtgtttttatttataaaagaatgttgaattttgtcaaatgcttttattggctaaatcttattactaattataggtctattcagatttttttgtgtgttccaggaatttgtccgtttcatctaggttatccaatttgttggcatacaattatttaccgcactcttttaatctttattatttctgtagaattggtagcaatgtcatcaatttttttgagagtaggtctcactctgtaacccaacccaagctggagtgcagtggcttgatcatagcttacttgcaggctgaaccccctgggctcaagtgatcctcctacctcagcctcctgagtagctgggactacaggcatatgccatcatgcctggctagtttaaaaaaaaaaaaatgtggagactgtgtcgccctatgttgcataggctggtcatgactttctggcctcaagcaaccctcatcctctgacctaccagggtgctggaattaaaggtgtgagccaccatgcccccattttcatttctgattttagtaatctgaatcttctctttttttctcagtcaacctagtaaatgattgtcaattttgttgatctgttttgaagaaccaacttttggtttcattgactccctttattgtttttatagcctccattttatttatttcagttataattcttattgtttccttcattcactatctttgggttgattttgttctttttctatatcctgaatttgtaaagttaggttgttgatttgaggtctctctttaatgtaagtatttaccactatcaatttcttgcacaagattcttaacttctctgagccttcaattcttcaactgaaaattgcaataattctcatcactaagaaatgggtggaaaaaatgaaaattgaaataacaatgcctgtttcatagtatcgttttgaagatttaatgtaacatttgattaagccttcagcaaaatgccacacacaaagaaaagcttcacaaatattagctattattattactactgttaccattaaccttaaagtcaggtagtcctagagtcaaattctaaatccacttgtcactaaccatgtgactttggataagttttctcatcaccctaagcctctgtcttttcatctgtaaaatggaaataatgtctacccaagagagttactgtataaatcaaatgagatacaggtaaagtatttagcacagggcctggtatctaggacatgcccctcaacagtagctaacctagcattaaccatcgcactgagatgactggtgagggctaagcaccaaatggaaactcactaggacatggttactggctaaacatgggagagaggaaaaacagtgcaaagaatcaagcctggtatgttagctttcatccactgagatgcagccaagatgggattagaggtacaagataattcactgggtaaaacagccatgagggaaggtggagcagcagtgacaggagagcctaagagagccctcagaccacgatgcagatctcattcctgagaaggagaaagagaaggagggaagttttacatagcagtgcagttctgagtttccccaagaccgatggggagtccttgaacccctcacccatgagagtgaagcagggtctcacagacctgggcttgctttctttcccctggtgggagcccatgggaagtgagttctctgtgcaaagaacatagtaaattcagaatgcactagcctgggccttctgtccatcaagtccctgccatagagctccaacaggctcttattcatggctgccacaattgagacactgagaaaaagatgcaaacataaaaatatagaaagttctaatgacatgcaaaaatagcaatcagactttctcaaattttcaaagccttcaaaaatgtctgagtgcagaaagaacaggatgaaattgacagaagactgatcaccaacctagaaacgtggtaagagagaaaaaaaattgcaactttcccacaaaactagtgtattccttgaaggaacaagtcaagcctacttcatgttgacagctagttcttggggaccccactgtagaataacatcaccttcattccttctctcttcttcccacaaggaagtgctcctgtcctctcagctgtggccaccgtcggcatcacgattggagtgctggccagggtggctctgatatagcagccctggtgtattttcgatatttcaggaagactggcaggtatgatcgcctttcctcttgccatgtttcctgcagggctgaccaccatgcttgggaaaggaaaaaaacttcttcacctgtatctgggactggatctccttctaccgctaaactcctgcttctcagcactaattcctgcaggtctcttcttccctggtcttcatgctccctgtaccccactgtctcctagatataattatccccagcctctgctcatttgtttcctagagtcaatacattgtcaaagcctcttcgtcctttttcaacatctctcacttttgtcagtctctccattcccatcaacctcaataattgttcaacatcctgcttgaccccttgttgtaaggttggaatccttcttgcatatgactgcctcattatcttcctaaaatctagttcactcacctacttaaggagccaaagggggccaggcacagtggcttatgcctgtaatcccagccccttgggaggccgaggtgggcggatcatgaggtcaggagatacagaccatcctggataacacagtgaaaccccgtctctagtaaaaatacaaaaaattattcaggcatggtggcgagcacctgtagtcccagctactcgggaggctgaggcaggagaatggcgtgaacctgggaggtggagcttgcagtgagccgagatcgtgccactgcactccagcctgggcgacagtgcaagactccgtctcaaaaaaaaaaaaaaaaaaaaagaagccaaaggaacctgctctggcctactagttaagttcaaatttcttctctttactaattcttcttacttcctttccctctacttcccagtataattcctccatcttaattagaatctgactctctacacatccctgcccctttaccccggatgcacatagaattcttagtttcaatgttacacctaaaaacagggtgatctcccctccactacctgccctgtggacttactcacacccttcatcacaagcaacctcttatttcatggagaacacagactgtgtagtattaatatgtgaactttggacacatcctgcatgtggctgagaaccttttcctgacaatcaattcatgtgttcataacagatacagaaatgaagaaggcaaggtccctacccccagggaacataaagcccaagacaggagataagacctgaaaaataatcatgataccaaagtagaaaggagcgaatgccacaaaaattcagataaatctgatgggaaatatagctacacattggaatcactccgaaacatttttaaaaacggatgctcaagccccaaccataaattctgatctactgatctggagtgggacccaggcattggtaatttttaagcctctccagacgctactaatgtgtagccacgatggaggatccctgttctaataggtaggacttggggctaaacccatggtttttagctaggaggattagaattacctctggagctttttcaacatacatgggcctatactttgttggcctaattcattaatgggctccaccaagaactcagtaatctaactgagaaacagaaactaaaaggaaaagccgccttatttgatatgttacattatatgggaagcactgtcaaatgataagtgatgctaaaccttctctaagttatatttatggttatgttattgatgtgagtgttccaaaaattataagagattcccagaaatctaacagattataagccataatgtcatatgccacagaagtaactaaatgtctatgggagatgcattctttttttatttttatttttatttatttttatttttttttattgatcattcttgggtgtttctcgcagagggggatttggcagggtcataggacaatagtggagggaaggtcagcagataaacaagtgaacaaagaaacaagtgaacaaaggtctctggttttcctaggcagaggaccctgcggccttccgcagtgtttgtgtccctgggtacttgagattagggagtggtgatgactcttaacgagcatgctgccttcaaggatctgtttaacaaagcacatcttgtaccgcccttaatccatttaaccctgagtggacacagcacatgtttcagagagcacaagtttgggggtaaggtcacagttcaacaggatcccaaggcagaagaatttttcttagtacagaacaaaatgaaaagtctcccatgtctacttctttctacacagacacggcaaccatccgatttctcaatcttttccccacctttcccccttttctattccacaaaactgccattgtcatcatggcccgttctcaatgagctgttgggtacacctcccagacggggtggtggccaggcagaggggctcctcacttcccagtaggggcggctgggcagaggcgcccctcacctcccggacggggcggctggccgggcggggggctgacccccccacctccctcccggacggggcggctggccgggcagaggggctcctcacttcccagtaggggcggccgggcagaggcgcccctcacctgggagatgcattcttatcataatgaactctcatcagatgtttaaccatactcattttcaatctttgtcattcactgacaattgttttttgttttgttttgtttggtgggggggttgttttttgtttttgtttttgttttgagatggagtttcactagttgcccaggctgaagtgcaatggcgtgatttcggctcaccgcaacctctgcctcctgggttcaagcgattctcctgcctcagccccctgcacagctgggattacaggcatgcgtcaccatgcccggctaattttgtatttttagtagagacggggtttctccatggtgataaggctggtctcgaactcctgacttcaggtgatccacccgcctcagcctcccaaagtgctcggattacaggcatgaaccaccgcgcccagccccgacaattattttgattcttccttccttaaagcatttgcaatcagctaccatccaaaattgcttcttcattgaggatatttacagaaaatactccgacatgtactcttgaatacaagtttctgataacattaaaatcataccattagactatttaagaatttccaaaattttaacaaactgatagcttcatgaaactgccaaccaagagcaagcagagaattcatttcatgagactaaaagataataatgaaaataatatttttatgattttttatttgaaattttgtggattctttgttttgtttcccagatttcaggaaacattttttctttcaagctatctagagcttcaacaattttgcgaacaaaaattgaaacatctatattttctccctacctgactgctccagaattcggaaattattcatgaatatttatatgtttataataatatcgttatttgcacaaaaaatatagttattaatattgttataaaataattattattgataaacaattatttgatgatcattatttaataatttattaatatttattaataaattaataattattatttaacgactaattgtaattgttaattaatattaatattatataataaatataatagtatagttatttgctcaataaaaatctgctccctttataacaggatacatttgaaaacactggttatattacccaggctttgattgggatgttatatttgggaatatacatagatgaacccataggcactgctggcaaagtctgaagtcggccttggtttggcttcctcatgtcaagaggtttctaaaagtttaatctgagattccttataaaaacttcctgtaaaacaaacttgaaaagaccccaggctgggcacagtagctcacgtcgataatcccagcactttgggaggccgaggtgggtgaatcatgagatcaggagttcaagaccagcctggccaacatggcaaaacctcgtctctgctaaaaatccaaaaaaaaaaaaaaaaaaaaagctaggtgtggtggcgggctcctgtaatcccagttactcgggaggctgaggcaggagaatcacttaaacctgggaggtagaggctgcagtgagctgcgctccagcctgggagtgcatacataggcctatactattcatgtgcgtacatgggcctatactattcatgtgcatacatagggctatacataggcctatactcctattcaaggagaatcgcttgaacttgggaggtggaggttgcagtgagctgcactccaacctgggcaacagggcaagactctgtctcaaaaggaaaaaaaaaagactatgtggtcacctgctactcttgttgcacttatataaagaatgaggccaagttcgatgagactaaacttatttggaaaacaaatatgtcttactgggattatctttggtagaaataaagatgcctatgaagagaaaaattatgttgaaaaaaactatagtacacctgttatgacatcacagctctgcttattgttttttattttcattatccacctatagattggaccagaccctgaattcttctagctcctccaatcccattttatcccatggaaccactaaaaacaaggtctgctctgctcctgaagccctatatgctggagatggacaactcaatgaaaatttaaagggaaaaccctcaggcctgaggtgtgtgccactcagagacttcacctaactagagacaggcaaactgcaaaccatggtgagaaattgacgacttcacactatggacagcttttcccaagatgtcaaaacaagactcctcatcatgataaggctcttacccccttttaatttgtccttgcttatgcctgcctctttcgcttggcaggatgatgctgtcattagtatttcacaagaagtagcttcagagggtaacttaacagagtatcagatctatcttgtcaatcccaacgttttacataaaataagagatcctttagtgcacccagtgactgacattagcagcatctttaacacagccgtgtgttcaaatgtacagtggtccttttcagagttggacttctagactcacctgttctcactccctgttttaattcaacccagccatgcaatgccaaataatagaattgctccctaccagctgaacagggaggagtctgtgcagtttctgacacttgttgttgaacatggctaaatacaatgggtatcgctgagactaagttgtagaaattaacaaatgtgctgcttggttaaaatggctacactcatctgactcattctttattctattttagttggtttgtatcttgcctaaggtgcgtagtccaactcttggtattaccctcctaatagtcatactagtagtcatactccctggtgtagtgtattctctaaaagctttaaatgtctgcatgcagccagccatcaaatagtgaatggtctctctttggctggaattacaaaactcagagaaatgtgtcatcaggagaacatcataacccatgaaggataaaagccccaaatggtggtaactgataatagcactaatgctttaagatttggtcacactctcacctaggtgagcgcattgagccagtggtgctaaatgctacatactccaactgaaatgttaaggaagaagatagatccaattaaaaaaaattaaaaccaatttaaaaaaaaaaagaacacaggagattccagtctacttgagttagcataatacagaagtcccctctactttaacttttacaaaaaagtaacctgaactaatctgatgttaaccaatgtatttatttctgtggttctgtttccttgttccaatttgacaaaacccactgttcttgtattgtattgcccagggggagctatcactgtacttgtagagtggtgctgctttaattcataaatcacaaataaaagccaattagctctataact

SEQ ID NO: 363 - DNA, 246331 bp, Homo sapiens
acacaagctcaggagtagctgccatgcacatcagtgtccattaaaatgacttgtagcaaatctctacgttcaaagtctaactttgacagacaaccttacttccagcgaagtctactcccctccctccggagggaagaatgggctgcggttaagcgtttgccctggtgtcagggccaactgcttcgaagcgccagactttcggagactgtgggtaagagaaaaaaaaaatccagtccgggttttgtctgagcggggggaccggagggttgtgaggaatggctcgcgaagaggggggcggtggtggaaaacatacaacacaaacagctcgcgccgaggcacggcagcggtaggcccggagcgcgcgggcgcagccggccgggagaggcgcgcgcgggctcggccgccggccgcatggagcgcagcgcggcccgcggctcccgggcggcggcggcggcggcggaggcggcagcgcgccgctcgctcacacccacccccgcccgcggccgccgcgccgccccgccgtagccgccggccgccggcgtccccgccggccggtccagcgaaggcggcgcccgcgcctctgcagccagtggcagccgcgggtcctggccggcggctcctgcagccccttgcggccgcgagtccccggccctgcggccaccggcggaggcagaggaggaagaggaggtgacaaactctccggccccgcgccgcggcccgcaaccccgcgctcaggcatgcaggcgcggcgtctagccaagcgctccagcctgggcagccgccgggggggcgccgcgctgcagcctgccgggccggcgcccgcgcccgccaaggaagccgccctacccgggctcccgccccctgtcccgggcccggccccggcgcccgccccggagagctggaggccgccgctgccgccgccgccgcgcagcgccgggaccggcccccctcgggccaccggggccgccgccgccgcctcgtcgccggtgctgctgcttctaggggaggaagacgaggacgaggagggcgggagcaggcggcggagggggctcgggcgtgtggaggagaagccccgagggggcgcggaggaggaggatgacgacgaggaagaggaggacgaggaggtggtcgtcgaggtggtggacggcgacgaagacgacgaggacggcgaggagcgtttcgtgcccctcggacccggccacgcagtccccaggggcccggcccggggcgcgttgaaggtgcgtgttgggcgcggtggcgcgcgtgggacccgccagcccggggagggggacgggcccgggccccggggcaaggcgcctggccgaggacggtcagcggcgccggggagagacccggccaggaggggtgtgtcaggcggcgcgggcggccgcgcggggcagcgcgaggaactgttgatttgcctgcgccttgggcccctgcgtctctcccaggcggcggctcccgctttcctcaaaggccgtgtcgggtttgttgtttggtgtgggtgccgggaaagggcgcttctccccagtgaggtggggaacttgggtgatgggaccacggaggcgccggttcgtgcccggtggggacgggtgaggcaggggagagtgagattttattctcccccaaggaaggagtgtccccttctccttattttgagggctattcaagcttattgaaaccagaaagcggtgtttcttgtcaatctctcagccccttcttccaaccaagaacaattgtcgatgagtttccatcacaggcgcttgtgagagaaccggtaaacccagtacagcaaaatccaagcccttggtttccacatgcattttgctagcagtttttggcattgaccctcgccctcccgtgtttccactcgacatcatttagcgtttgaggtttttttccctcctcaaaattgcaaatgagaaaaaaagaggaaaccaggaaaagggggtggggggtagcatttaaattggatgtgagtttctgctgagaattctagcgaagtcccctgtacactgaagcgccgagagatttttccgtttgtgtatcttcaggagataaggggtttattattacacaactgactggttgggctttcaggcatgctattggacaaagcaaaccacgttgagattcatgcacggtgtatgttgctaagaagttttgagggcagcaagtggtaagcaatggagtgagtgatttttctcaagagtggttcctaaaatcagctgaataacattttaccagagttttcagaaggtattggtatttcaggaagaaaaaaaactcatgaacagctgagcttaatagttagagaccactaaaaaaagctttgggggctcaccaaaaaaagctcctcaaagcttgaagttgcatttccaaagaaatgttgaacatcggcaattagaatagccccagagtagatgtgggcagaaatttatttcctagaccaccctggaagtaccagctctgggagtgagaaattttcagcaagtagttatttgggatgatagtttttgacagctgcttgttgaaatccaaaccgtgaccacattcattaccatggtctgttgaaaagcctgcattgtatggctacaagatatagctgggtttgaaatgaagtcacatggtgtcagtgacattgaatatcaagagtagtgactccttagcatttttgtccagaaatactgaaagtgtgtcctgtggtttgaatagtgattgcacaatttgtgatagaaacaataataatttatgctctgtgatgaaaacaagcttaatatagggaaaaaatcaaatccgtaaaaacagaataatgagtgtgataattcacttgatcagtaaaggtttttcacatcttcaagtaaatttcctttaaattctttcaaaatgggcttcattttataacactctcatttgcccacaacttcagaaatttacacagaatgttggagtcatttgaggtttatcttttaaattactcttttaaagacactgtatctgaagagattttctaatggaatatcactagataattttattataatgcatatacgaatgttaacctcttacatatattcatgcattcatttattcaacaaatatttattgaacacctattatgtgctagcagctattctagaacatagcagtggacaccttcctgatgctcacatctagtgagaggcatcatagcaacaatcaaatacatagatgcagatgtacatgcataagcaagaataacacttcagattgtggtgtgtcctgtgaagaaaatcatgatatcttagagtttcaaaggaagaagagaaagctactgtgggtgagatctctctgaggagggaacatttgacctgagatatgagacatttcgcatgggaagagctttccaggcagagggagtagcagttgcaagtcttgaggtggaaaggagaaaagggtgagtgtggctggaacttggtaggtatgagatatgtcaaggaggctgggaggtgcctgcaaagagagcctggtgggccctttaaaaggatagtgaaatctttgaaaagttttaagcaataaagtcttacaaggtaatttgtagttttcaaaagatccatgctgtgtggaggacagtagtagaggcagggaggccagttgggtggctgtcactacacagaccaagggagggagagggcagcttggagttagagattggcaggagatggcaaattcagaatctattgtgaggatcaacctacaagaacttgtggatgggttggttgatgggtaatgaaggaaagggaggaatccaggatgagaccatgatgtaaatgttggttgaaggtaccatttactaagattaggaaaaccgagagaacaaaaatcaggttttctgttttgtgcatgtgaattctgagatgactattggacaaccaggtggagggtgtggttaggcagatggtggtgagatggggagtggataggagaggtcagggatagtgggaggaatttgagcgacatcagtatgttaatgtcatgtaaagcctgggggctttaagggagtgcagggggccaagagaggagagcctggggcctgattctggggcacagcactatttaagtttgggtgtaaatggagaagccagcaaacactattgagaagcagcagccaaataagtagaaggaaaactagaaaatctaaagtccaataagccaagagaagaaatagttccaaaaagtgggtggggagtaatgaactgtattgaatgctgctgagatatagaataagaaagagagagagagatgttcatttggattagataagatggaacttactagtgtccttgacaagagaagtttgagtgatgtgcttggagtaggctgagcagccgatgagaggtgtggacagagggacacaggaaaaactcttttgacaagttttttggaaaggagaacaaagaggaggaggaatagctggaaggcctatggcctaggtttttttaaaagatgggatacagtagaccctagtgttatgactaaagcatcatgggaattatgtggaagaggggttattagttttctattgtagtgtagtgtaacaaattactacaaatttttttttgctttaaaacagttcttagagtttctgtgggttaggagtctaggctcagcttaactaggttttctgtgaagagtctcacaaggctgcaatcagggtgctacatgggttgagttctcatctgaaggcttgaccagggaataattaacttgtaagcttacatagattgttggcagaattcattcccttgcatctgtaggactgagggtcctagcttcttgctggttatcagttggaagttgttctcagcttgtagagctcttctccccctccccttccctacttactgctgttttttgtcacatgggactccttagcttggcctcttacttcatcaagccagcaaggagaatcttagagcctgcctgccagcaagatggagccttgcataatgcaatgtagtcaggaggaataggccagaaacttggccatattctgttggttagaagtaagtcacaggttccacccacaacctaaggagagggaattttacaaggttataaacaccaggtggtgaggatcattgaggggtcatttagggaggaaccaaagatgtagagaaaagaaaaaactacaggaggaaagtccttggaaagccttagggagggaacctgaaacccaagtaaagggctggcctttgggaaccttcctccattagattggagagaagatggagaatatgagtccagatgtgggtatattttctatattgggtgatgatcagatgacagtagttttctgatggcttctgttttctccatgtagcagaaaggaaggtcatcagctgagggtgagggagatttgaagtaagagctgaaggcattgagagcaaatgtactagggagatgaatagagttgccagacagtatcaaggacgcaactgaggtttgtgattccacatttatagttcaagtagtctgtctgggtatgtgattttcccaactttattccatggcctcatgcatagagtaatataataaaaataatcccagctaaatttattgagtgcttaccagggccagcacaaatccaagtgcatagtctcatttaaatttcattacatatcctcgagtcaggcattattgttatcaacttcattctacagaagggatgagcgacttatttaaagataaaaagctgttaggcatcagagcaggggtttgaaccctgcacagtcaaaccccagaggtggcacccacatgcattacactacgttgcctcttgtagagaaagtggaggactggattgagcagaggtggggtttagcctgatgagtgagcaatagaaagaaagagatggaattattgttgagagagttggcaagtgtatgatgatagactgagtgacataagaagagtgagggcaggagggagtgagggaaggcagaaaaatcatgtgtcagtgggttggagaaaacaaagggtaagccaaaaaaatcaataaaagaatgggaatgaaatccacgacagtttgggttccgcagtaatattaattcaaacaaatatttgttgggtatttgtgagacaggaactttactaaatgctttatatgaaggaggatcttacaaaaatttatgacttgggaatcagtatagctcccattcgccatctgatgatgctgactggaggtgaaatatcacactccagtatgtggccacaagtggggagcatgggctcacatccatagcctgtgcctttaatcactgaactggcatctttctatatgtattgggattcatgtgcccatttatttccaggaagatttgagagggctgaggaaacagagatagatgctactaagtagctgagatttgttgcttgattactctaatggatactaatgtgggctttaaatgagataagagaaactttgtattacatggttttcaatttctgatcaaaagaagcttaagcatttatctgcagtggtaacagtcctgaacacacaaacccctccctactcccctgcctaccaccaactaacccctgggcgcctgtataaggaacattaccaaaaaaccagaaaagaaacaaacacacaaacagacgaaaaacaaaggcactgtcaaacataagaaggatacaataaattgttactcagtgaagggaaaacagtagcgaggctgagataacaagcacagggctgtgctctgcaatcctgtgcaacagtttagggataagaacacaagaatctagagggtttgataatttgctagtgtaatagacttatgaaaagcttggacacaaaagactgctagaagcctaccaagattttaactattgaaaaactgctgaagaaaggcttttaaatgagataatatatgttaaagttcccacttccagtgctcagtaaatattaattgaatggaatctgcttcctctgtgccagttcttcagggatggttaacacgtctattagactatctcttgaatatcagatgactttaagaagcctttggcaggaactgtgcagcaaacactgaattccaatttgctaacaagtatgtgtcttgcaaatggtctgtgttggctcgagcaaaaggcatatgcttaagataccagacaaagttgtcattcattgaatcgtggactgctggagttggaaggcaaacagatattatctagtaatccagtactttcatttgaccaccgagggcactgactatgcagggtggtatgcctggtccatctggggctgctagcaagtttgctgctgccatgatttgtgccctggtctgccaaccccaatttattgtcctcagttctgggttggtttcttatgctcaggaatgatctacagctcactcccttagagttgtgggttgaaaatccacaattttctgaagtggtctactacttactgcttatcaacttctatttttggaatacttgtcttttgtaaagtacctcagctagaggtggacttaacatgtggctgtggtgtgatggatggaaccctctgaatcctgcctgggccaacccccgctccctgtgagctttccaagggacacgtatacacagaggataacagatgagaaaagagccccatttcactgggaagtgagtgcccatagtccctggtgtggtgctgatagtaaacttgcctagaagatgtcattaccagtcaactgttagagcctcttctccttcaccagcattttactactggttgaccatggagggccccataacacaagcattagagaaaagaagagaaaaagcaagaagtcaagccctaccctgaatctgcttaccccctgcctcctagtagggaggagccaagccaggcctggtgcacctgtaatcctagctacttggaagctttaagcccaggagttcaaggccaacctgggcaacatagtgataccccatctaacacagcctgagagagccacagccctatgtgagtttgaccttctaaaattagtaaatctgtcccagttagattaatgtatcccccccccaaccccgcaagaggggcttagaggagtaagggagcctttccctccccatgtcattgtataatatccaaacttctgatgttcctgaaacaatcagccttgttacaatgacttgatatgtttgcagaagtcaagcaaacttgacttttagttgccctgtgccatcttatcttaaggtaaatacatgatttcccttagactttctgaaatatttgtgaatacttcaagaccctcataaccagccaaatctatgttgttgaaataaggatgattttctttgggtgtgaggtccatgttttggtcattccctctgttaggagatatttattgagccccactgtttaccaggttcctgctgtacacacaggatacaacagtaaataggccttcttccgctttcagggagcccacattctaacacattcctgccaagttgtctgtaaagaggtatgaagtcgcttttcctctttatccctaatgagatcaagattagatctgcccaaagccttttcttagctaccacaatttgagatgtaattctgaaatatacctttaaaacaactgtaaccaagtgatccatatgaagaagattctgtggtttggccaggaggtgattcctgaatagctggttaaaagatgagtttagatcactgaatttggcaaataactccagttgctcttatttactagatgaaatggaacagaatataagtctgatatatgtgttcatagaattagaatgattaaagtcttatacttcatggaagatacagttttggaaaaatctagagttacaatttatatgtaggaaacaagcttgactctagagttttcaaggagagtctgtaatgttcagactctccttgaaagtcagaactttgcagtaacacacaaggagggttcgttcatgttgcagaacaccatggagccttgaggagcaaagaagtagtagagtgctgcctgggcactgctccatggaggtctccgtgccatacctgatggtcaccagtgacaacgtttgctttacatatgttcttgtcataatggaaggttaaatgaaagtcatatctcctcgattcagactaattgtacgtggctagttgaagtaagtgaatgtcaaaagtgctccaacattttaaattaaacccagtgttttaaaaggttgtataccctgaaataccatctgataaaacctgcagaaaggataattttagttcataaatgtgaccctcattgttggcgcatcagtgagatgggagagaacaggctgagtcaaaggagatgatcctcccagctgcccccacccaactgttacttctctgtagatcaagaagtgatgtggcacaggctctgggttcagattctagcttctccactcacttgttgcatggctacatcaagttacttactgtctctacgctttcatgttatcttcaaaattgggataatatgattccatcagtggctatcgtttttttaatatggcccagagacctcctgaaattagacatgggtggcaatttattttgttttgggattcagaaaggaaacatttgtaaaactgtgctcaaggatcaaaaatcctgcagttattttgactgttacaacctccttattaatgctaccaaggcatttcagagagttgcttcctgaagtgactccattcatctgagctctgtggtgttccgtcataatatgtggtgagctttaatcttccctttcagctcaggaagctgtgagtcatttatctacttgtgcaaagaggacagagacatcctatctcttatgttcatcagtttgttcagatctatagtggttgtattggagaaacctggctgttatccaaaagggtaggttggaagaggcttaccacacacattgaatatatttcttaaagctgctatggaaataaagtgatgtcaccttctacctctaatttgcatgtggctggaatctctgaggcatgggtttgcccttcccaccctcctgtgcgttggtgtctcagacttgtaatcttgcttggtgaagaagtcattctttgtttttttgggtagatggaaatgggtggcccaaagtgtacctctaaactcatatctgcttgctcccactgttagggagatgtctagacacggagaaaagggcttggtaattaattgactttgggaaattccacttaaaagtagagatacaattttttttattttataaaatatttcaaacaaagaggaaattggaagagtaatataacacacacatgtatatgtaaaagttactgactatatatgccaagggccattttgagtttctaagagggtgaatatagattgtgatatttacatatttgttggacttttttctagagcatctttcctttgggatacattttgggaaatattggtttataatttattttcttggtgggaaagacatggataagtatcttataccttgagataaataactaaaactgcataattaaagaaataagttgtcaagtgaatttcacaagcacaagggagagttaaagtgttgtagtgggtcatataagctttgacatatttttcctcataaagctgataactcttcagtattgagtttctaaaaaaggaagtatttcctgtggtaaattttcacttgtgtatctgtgaataccattattgtgtgtgaaacttaaaaactggtagagaacactacctttctcaataaatcagtacccacgatgggtctagtgtggaagacaggagggtgtgggaagtgttgttgtaacagaatttaaaagtgccaagggagaagaaattcacaaggtgtttatatccaggaaagtgtatttaataatgttttttacattctctaagaaaaaaagattgaaaatatcaggagagtctcaatgaaaagaacatacaaaaagaacataccaggattctaggactgatacattttctgtcaacgctattgctattacaagtaaagggattaagcacttgtgaatgttgataccatgtataataactctaattggatattgttcaacgtttatttccatattacccaatatttagtgcattgtaactaatagaaggccctcatagccaaccttacttgatcttcttgataaccttgagaggtggatattattatccccattttatagatgtgtaaaataagcctcagagaagaatagaagtttctgttgaaaaatatatatgaagaattttataccaaatgacagatatttgtcaaacatttcagaaaacatttggagaccggcagagttttttaaataattgaaataattggaattggtacctaagcagcaaaggaaatttaaggagaaagaatattttgaagtaaattataaattaaaacaatgtgaaatacagttttcataggttgtcataaatgctttcatgtagtttgtgcatgctttgcaactcagctgcaagtgcttacagaaactaattttttatttttaacaattttttgcaagtttttgaaaatgttttgattgtcaggttcatagacttctaactcaaaactaatgtaacaaaatattagaaaaagtggaaatattagaaaggggatcttagaatttataaaaataaatatctgaagagtacctatttgaaaaaatgtagtcttgttttatcatatattagttacagtaaaaattatcagaaaagggggggaaatggacaactgagcctatgtaaacactgaacaaacactgtagcttagtgtgggaaagaggaggtgacagtgggaaagggggggcatttgaagggttgacatgacccaaggtagagtttatagaaagacagcaaggtctctatttgcatatcttatgacatgagtggctggtgggtgttcaagaggctctgaaagtgtgcttttagccatctgctgagtgacaacaattcttttagctccttattctttttttttttttttttttttttttttgagacggagtctcactctgttgcccaggctggagtacactggtgtgatctcggctcactgcaacctccgcctcctgggttcaggcagttcttgtgcctcagcctcccaagtagctgggattacaggcatgtgccaccgtatttgactaattttttttttttttttttggtagagacaagttttcatcatgttgaccaggctggtctcgaactctcgccctcaggtgatctgcctgccttggcctcccaaagtgctggagtgctgggattacagatgtgagccactgtgccaagtcctttttgctctttattctgattcaaaaaagatatctaaaagagatctccattcaaataggtcttcctctcagctccctgtattgatttttgtcacttgaatttttcttgcactctagcacaaggttgtttggaaaaattatctttatttttaaaactataatagaaatgatatagttttcattgtttgtaaactatgcctagctttatgtgttaaactgagatacctcaaagatcttggttaaattcatttacaagttaatggtttgatgtttgaaaaagtcattttttctacaaaaaagtagccagatgtggtggcgggtgcctgtaatcccagctcctcgggaggctgagacaggagaattgcttgaacccgggaggcagaggttgcagtgagccaagatcgcaccactgcactccagcctgggcgacaagagtaaaactctatctcaaaaaaaaaaaaaaaaaaaaaaaaaaaaaggttatttttttctatcttgttcaaccacatggctattttattgaactttagtaaactttgtggatagtggtgtattactgagatgggattgtatggagaaggagaagattcagattgaaaggagaatcaaaagctctgtcttaaacatgttaagtttgacatacctgttagacctccaaatggagacgtcaggtaggctggaattcagtggagaagatggagctggagatggaaattcaaaagacatgggccactagatgatatttaagtgatgggattgagggagcataccaaggggtacagcaggtagagaagggaaggtgactgggactgagctctggagcacttcaaatgcagtgctacatttctctgtctgtctctgtctcttaacagttttattgtatttaattcacataccgtataactcttaaagtgtacaattgagtgttctttagtatattcacagagttgtgcagccatcatcacaatctaattttggaacacttgtgtcacccctgaaagataccccgtacccattagcatgcaaccacagttgctttggctttccattgccaataacactttattcattcattgcatttttcaggaaaaaaaagaagtggaggaaaggagagggttaatgtgttagaaaacactgggggaagtaagggaaaggaagaatccagtacagcaaaatcaaatatccaataaatatactccagtggtggggtcatcaaagctcaagggggttgtcttctgcagttcagaaataaggggaaataaaagacaaagacaagttctcattttctttcctcactctttctttttgtaaactcaagataaagctttggtttctagcagtgaacagagttgaattacattcaatctgcatgctactagacagtcttgtggctactttgacattggtcttttgcatcagcagaagagtccctgagtgaatttgatggacattcttctttcatttctttgtcacccacttcaagtttctaagtggaagacttcctgcccccccaccacccatctctcatttctgtctactctaggatttgagagcagtaaacagacctggtccatacaaatccagcagtaaaagtgtttgacataaacacaataaggaatggacttcaatcattggggtatggattggaaatgaaagctacagagctcctaatttattcataattgtatgcaagtcttttataatttggagttgccccaagaattcagtatgtacatgcatcttgtcgttttggttaaaggtaggagaggagtcaagtttttgggacagaagatcttgtctaacataggaaataagggaaggagcataatgagagagtgggtaaagatgtccaccttgtggaaagggtcacacaggcttacaaatcagatcctttgtgtggtgcataatcttttgacaaaaatatttggtattttttccatacaaaatgttggtaaacaataccctaaaacaacaggagaaagaccaacacattatagttagacaaactagaccatgtagcagtcactaaaccagcaacttgtgaagttctacaaggctcagacatatctaaaagctagaaggggttgattttggaaagactggactcacagtcaggcacacatcacccagtgtgttctattccacttgccccatttcaacacagacacagcggtcaatgaggtaggtacacactgatttcatatgttgtccatcaaattttcctttctctgttagctccctaggctctgttatcactactgcagcagaagatgctggccctgcaccacaaagaagctcttgtttacagttttatctgaaagccacacagaagtacagaggtttgaaaggttaaggttccagtgtgtgtgcttcaaacatacatccccagcagcatgggatgaaaacagaggtttcgttcttacaatcttgtttgccccacactgtcttgggatttttgcacgagtgtgtgcacgtgtagggtagccttagcctcatccagtgaaggatgactcttgtgtgaaaagtgagccaatgacctaggattaaaggtttggttcagaaactcttaaatacatgtatataaatgcaagcctcattctcactgttttcattctggtcctttcaccaaccctgacctcttctaatctctctgtgtcgcttttctgttcaggctcatttccaatcatccagtagaaggaggcacagtcaaagtcattctgtggagtgaaagtctgcttgtcatacagacctggagtcgctgctgacttatccccgagattgctcatgtccttgagaacacggtgtaaaaataagggtctctcaggttaatgtattgagaaatacaaaagcaaaatatttgtattaagaaacataaagaattcacacaacagcatcattcatacgtggctagtgttgttggcatcctggtgggagccatcattcaggttaaggctaagcaaataaaatcatcatagaccagcatggcatgggagtgaaccccaggggagcaagcctgcagctgttactccaacacttgctttcccactatcacaacacattgcttaggatagttcctagcaccctgtaccaatagtggccatattagagacaagacagggataaccctttcctacccctggtagattaacttcaacacaaagtagtggctttttgagtctagcagtctggtctcatgtttcatctttttactttagcatagaatatatatcttgtcttagaacctaaaacctatgatcagagatgaagaaggatatcccacaatgctaagagtcaatttatcaagaagacataaaaatcctaaatatttatatatctcataggaaagcttcaaaatatatgaagcaaaagcccaaagagtcaagaagagaaatagacaaattcacaattatcattgaatatctttgttacattcaattattgatggaattggtaacaaaaagtaagattatagaatatttgaataacaccaccaaacagcttaatctagttaatacttgtagaatgctatactgggcaattttaaaataggcatttctttcagttttacaatgaatatgaatgtacactatatactgggggcacaccaagtctcagtaaattccaaagaattgaaatcatatcatgtagaggatatcctttgaccacaatggaataaaattagaaatcaataataaaaatttaactagaaaattcacgaatatttaaaaatcaatcactgtatttcttttgttgttgttgttttgtttgttttttgttttttttttgagacagaatctcgctgtgttgcccaggctagagtgcagtggcacggcctcagcctcccgaacagctgggattacaggtgtgcactaccacgcttggctaatttttgtatttttggtagagatgggggtttcaccatgttggtcaggctggtcttgaactcctgacctcaagtgatttgcatgcctcagcctcccaaagtgctgggattacaggcatgagccaccgtgcccagctccatcaatattcttctaaataaaccattgaataaagaagaagtcacaagtgattagtaaaatagtttaactgattgaaaaggaaaatgcatcatcaaagtttatggaagtttacatcagtgcttagagggaaatgtatagcctttaatcagtgatcttccatccaaaggtgttagaaaaagaagaggaaggaaataaaaagacaaacagtagagaaaatctgtgaaaccaaaagctgattcttttagaaggtcaataaaattgataaactcctagcaatactgattttttttaaaaagagaaagcacagattgccagttcaggaatgaaagaaaggacgttactatagatcttatagattttaaaaggaaaattcagacatattacttttctgtgactaaaggatttttgcctgtaaatttgaaaacttggatgaaatgggaaaattccttgaagaactcaagttaacaaaactgaccacatgaagtaataggatatctgaataacctaccatctgttaaagaaatatcccatgatttgaggggaaaaaaataaaaataaaagaaatggaatttataattaagaacctttgtacatagaaaactcctgatgagaatggctttaccagtgaaatctataaaatacttaaggaagatataataccaatcttacaaaaatctttacaaaaaagaagtaagatggtatccttccaataaattttatgagaccagcatagccttgacattaaaaccatgcaatgacattacaaataacattgcaaactttcatgtacataggcaaaaacacttaagaaaatattagcaaatcaaatctagtgatataaaatgtatgatacattatgatcaaagtcatttcttctcctaggaatgtaaagtgtaaatactaaaaatcaaatggtgtaattcactgtattagtagattactgtattaatagattgaaagggtaacaccatatgattatctcaatagatgcataaacaagcatttgacaaagttcaatactcattcatgatttaaaaactcaataaattggatggaaattccccaaactgataaagtatatgtataggaatcctataattaacctcacatttaatagcaaaaggtaatttcctctaccaatatcaggaataaggcaaggatgtctgccctgttttattcaatatcatcttggaggtttaagccagtgtgataaggcaagaaaaataagtgaaaggcataaatattaggaaaaaagaaaatatcgctgtttctatttgcagatgacatgcagagaaatcctaaggaatcaacaaaactgctaaaatgagatttcaaatatcgtttacagtagcatcaaaaactaaacagggataaaattaatgaaaaatgtacaaaaaaggtatgtgaaatctgtaaaacattgatgagagagagcaaagacctaaataaatgaattgatatactatgttcatttagaaacttaatatggttaagatgtcagttctccagaaattgattaaaagattcagcacaatcccaattaaaatctcagcaagatttttagtaagaaattgacaagctaatctcaaatgtatatggaaatgcaaaataactacaataatctaaacaattttgaaaagcaagaccaaaattggaagacttaatctacttgatttcagaacttactatacagtgagagtagtcctaacagtgtgctactgatgctacaagatagacagatggatttgtgtaataaccccaaaatagacccaacagaaatggtttgacaaaggcaccaaagaagttaaaaattttttcaactaacagtcctggaaagactattcatctggaaggaagaaaaacaaaaaacaaacaaaccctcaattacctctaccttgcaccatacacaaaaaaattatttaaaaatggatcatagatataaatgtaaaagctaaaacttacagagcttcttgaagaaacaggagaatatctttgtaactttgggataggcaaggattaatttaataaaattaaattaatttttaaatttcaaatagttttaagttttagtttttaggtcatcattttagcattttcctttaaacaaacaaaaaaaatcaagtcaattgaaaggcagatacaagttattcttctgaagtaattgcagtgtttatcaagaattgaacagggtccgggcacggtggctcatagctataatcctggcactttgggaggctgaggcaggaggattgcttgaagccaggagtccaagaccagccccggcaaccaagcaagaccctttctctacaaaaaatacaaagaattggctgagcacagcagcatgtgcctatagtcccagctactcaacaggctgaggtgtgaggatcacttgacactaggagtttaaggcttcagtgagctatgatcacgcaactgcactccagcccaggtgacaaagtgagaccctgtctcaaaagaactgaacaggcattagatgtaactctgacctctgaccaaatgagagagcatttctttgaagcaaatagacaataaaaacacaaaactggtattttcagagaccaagtgaatgcagtttgtttcactatagtcttcgttaccttaggaggttgaacttctctgctatgatcattattttattttttatttttttatttgtgtaaatgtatgggggtacaattgtagttttgttacatccatagattgtatagtggtgaagtcagaacttttaagttagttatccatcacttaaataacgtacattgtatccattaagtaatctctcatcatccacctcttaccccattacccttccctgttactgttgtgtatcattccatactctacgtccatgtgtacacattatttagctctcacttataagtgagaacatgtgatatttgtctttctgtatctgacctgtttcacttatgataatgacccccatgtcactgcaagaaacaggatctcattcttttttatggctgaatggtattccactgtgtatatgtatcacattttctttatccagtcattcatggatgggcatttaggttgattccatatcttaagcaaagattttttagacaagaaccggataacaatatttctaaatgaaaagaaattgataattacacttttatcaaaattaaacacttttactcatcaaaagacacaagaacatatatcaataatcaaataaatttcctctgctatcacttttatcttgggatatcaaaacattgtatccatgtagtgcttactttgtaccagacactttgctgggtacagacgatatactattgaacaagaaaggcgtggttcttttggaacattcaatttagtgaggaaatagtcaaacatgataacttaattgtacatttttaaataacttaaagactgtatggattgtttgtaactcaaaggagtaaatgctttagggcatggataccccattctacatgatgtgcttatttcacattgcatgcctgtatcaaaatatctcatgtaccccataaatatatacacctactgtgtacccacagaaatttaaaaactttaaaaaaattaaaaataatagtcaaacaaataagtaattacaatatgaaatgacaactgcaagggtagtgaaagtacagaatgcatattacagttttcatttgacaaatgtagaaagctggcagtagttaataatttgctaacttgcaaaaccagtctaagctccaatttgctgactcctgctcccacccctcttttttgtttctgttgttctaagcaaagggagtagaattttaaactaagcttagtggctaggttcaggtagaaacttatattctgattttagtttatataaagagaaatggatttgtagctacttaaagaaatcccatcttaatgttgctatcttacaagtcttttagaaaagtagtttttcagactatgtcacagttaggcaagttcctctaattatattcttttgcagtacagtgcccagtgagttggaaaggagatccaagctcaagcagtccctctaatctttgccttgctgagtatttttggtgtgtctttttttaaaaagttgataaaattgacaggaaggcactgaggggaaatggagaaaaatatagaactggaacatatcactagagagagaagctttacttttaagggttaacatgtaatggaaatgaatgcttttgtccttttttatccttggacatcatgacagcaaagcattgattatgtcttgtgtttttacagtgccttaacgctgtttaccatcatttcatacacaatatcttgtgtatttcctataatcctcacagtcattattatttcaattcagtcacgaggcagtggtggccagagagggtaaatgagtagttcaagatgactttaataaataactttgcatcctttctttctaattttgtacctgtctttatcttatctgcaaagtattagtagatttttgtgttgatatcttcctttatgacttattcttgctttggtcttttgtttactcccgttaacctcgtgacacacctcttgtttcccagtgacttccaggccatcagcattgcccttccttccccagaaaacacccattgcttctcattttctccatcatcattagtggtaccagtactcaataaaaatacttgtttaggagtaagcgcttgataaatgtttcaatgaatagaagatgaaagaacaagcatgtcattatacagacactctctgatgattttcctgtcacctttcttcctgtgtttcatctattaccaagttctgtttgttctttctactgtttttttcttttccaataataactttcttgatttctatagtttcgttgtcttttttttaatttttttttcctccattgcttcctcatttaagtctgttttccacagaactgctaaaataatcttgggttttatgtaactttttcttattatagaagcaatacttgtagaacattttaaagtcctggaaagaaaaaagaaggaactaataatcatctggaatttaactcatttttcatagattgttgtttttaaagatggtatcttgctctgtagcccaggctggagtgcagtggtgcaaacgtggctcactgcacccttgacctcctgggcccaagcggccctcccaccacctcaacctcccaggtagtgggattacaggaacacaccaccatgcctggctaatttttgtctttgttttacagagggagtcgttctgtgttgcctaggctggtatcgaactcctgggctcaagtgatcctcctgcctcagcttcccaacgtgttggggttataggtgtgagccaatgcgcctttcacagattctttctgtgtatgtcctagcagaccacaagagtgatgtcatttatagagcgatccctcatctagcaaactattattggtgacctaccttaaaacaaagcaagcaacctaacagtgcttgagtggccaaaatagatgtaaaaatacagctcatatacttgcttaatttacatcagaaaatattatttaatggtatggtatgcaaaacaccatgctaggcactttggggggctaaaacataaatattattatttctttctaggagttctgaattcagtgagaaacataaatctattgccccactcactcctacttaagatgcagtcctagcaaatgtgattatgtgttttttcgatgcacaacaaatgaaaacttgggaattagtaggaagagggcaatcctctactaccagacaatgtcctacgagcagcaagcgtgaaactgttattaaaacactgtacaagtgggcatgtaaaataagaaattataacattcggagtctgtgtaaggtggtagcaagtagcttctgaggacatattactctgtgttataatttaattacaacatttccacaatgatgactttgtgccatcaagaaaagttcattctgttcaataggcaagaaagcaactaatgcattttagagaaattggcaacagaaattattaaagtttatcagtcaaaaggggtagaaacttcttttattaaaaattgattcatgtggcatgtatatactaatattgatgggattactgtactattatttttatcataagtatgaaaatgtggaagcacatccccaaaatatttcattcattcccaatagttatcttagggttcttgtcaggaaagcccagtattgcattcctgcccttccttttcagtgcagattttaaaggtccaagagatgatattctatccttaatgtgcaaagtatgttgaacatttaacatagagtgtgtttttcaaggggtccctactggctgggggcactggattcctttcttagctgttgatctgtgagtgggattaccctctagattcacttaccagaaaagttcgttccaccctttgtatggctaaaggaacacagacttttttttcctcagtccttactctctaaatgggagtcccgagaggtcatgcctggatgagctggaaaaaagaaaaatgatgtctagtcttttttgttgtctcatgccttttccttaaaccatgagaatagatgtgtccttatttttcaaaaactgcagtcaggaaccacataacaatgtttcggccagtaatggactgggtgtacaaagctggtctcataagattataacactttatttctttttttaaattttattattattatactttaagttttagggtacatgtgcacaacgtgcaggtttgttacatatgtatacatgtgccatgttggtgtgctgcacccattaactcgtcatttagcattaggtgtatctcctaatgctatccctccgccctccccccaccccacaacagtccccagcgtgtgatgttccccttcctgtgtccatgtgttctcattgttcaattcccacctatgagtgagaacatgtggtgtttggttttttgtccttgcgatagtttgctgagaatgtgatagtttccagtttcatccatgtccctacaaaggacatgaactcatcatttttttatggctgcatagtattccatggtgtatatgtgccacattttcttaatccagtctattgttgttggacatttaggttggttccaagtctttgctattgtgaatagtgctgctataaacatacatttgcatgtgtctttatagcagcatgatttataatcctttgggtatatacgcagtaatgggatggctgggtcaaatggtatttctagttctagttccctgaggaatcgccacaaacactgtatttcttaccactgtgttaccattgtctacagtattcaaagcagtaacgtgcgtacaagtttgtagcttaggagcaatgggctataccatatagcctaggtgtgtagtaagccctaccttctagtcttgtgtgagtatactctatcatcacaaaacaaaattgtctaattatttatttctcagaaggtatccccattgttaagcaatgtgcaactgtgatagcccagcccagaaggctgatggctaggatggtcaggaatcaagcctgctcagtttgtcacctgcttcatgttaggcaatttcccatggttcccaggtgaggtgtttcagtcaagcaagggaaacaaacacatatgcatgtatttgcagtatagccttatgagttctgtagtaatgagctcaaaagtgttctgggaacataaaaagggaaaggtcactacttaggggagtctgtaaaggctttggagtaaatgatattagagctaagtttaaagactgaaagagagattataaagtggagaatgagatgaatggcattctgggcaaaaagcaaaataaaacaacaaaaagcatatagtgagtgcacagaccaagaaacaggaaggagggtgaaaggatgggatgatggctggggtggagcctggtgttagtgccagaaccccatcagccttgtgtctgccagcaacactccatgccagtgtcatgccgtcatatcagatgcatttcacttttatatggaagtttttttggggggaaattaagtactttttatctcatgcatgtattatgaatgagattttaaaatggagttcatataagaaaagaagaagctgcagaaagattatgatagtcgattcattctgaaaaaaaatgaacagttacatttctatattacagaaaaataacggacaaaaaaagacaagtttctggtgaatttaattccataccaagcatgtaacataaaacaaataatgggtaatttttaaaatgaaccataatataaaatgacttttaggagtgaatttctatccagtacatgtaggaaaagtaaatataaataaaagtacaaacccagcaacattataataaatttgtgtgaaatcctaaaaagttaccattacatatgaatacaataaaatattttagaaaaactgatagaaagcataacaaaacaagtttaatggaatctcagtgttatgcacatagtgcagtaaaagcaaatattttattgacagcaacagaaaaagttgaattccagtaaaaacacatttcagcaaatatttaagctatataagtgtaaaaaactagcccctaatgtaaaaagctattcccaaatgtaaaaaactatcataaaacctttcatcttcatcctcagatcttaaaacctcatcatcttcagagccaggtaaacagagcctgaaaatccatcacccttgccagaatccaaatgatattctttcttactggaactcactctcttgcaaattgagtcagcctgatgtatagaaagaacaccactttccaatccttttacagtgtttggttgccaagtttatactattaagctagaactgagtattatagcaatgcctttgtcacctttgagccatggattgcagtggtaataaatttaaatctagagtctgtgggaaataaattccacctctgatgggatagatttgttgtgtgtggtttatttctgtgaagaaaaggacctgtactttctgggatgttttctgttgctgtgcttgccgtgaggagggtggggaaaggtaacatagtaggatctggtaatcattagccatccatttcccttggtggtcaacctaccacccataatatggtatcctaagcatagatgatatttggggataagtctgtgcatctggataagaggtccctttcttacaggtattctgtaataaatgaggtttatttgccttggatttgttgagatgttgcagtagaatttggtgagaaacaagtctatgcatttttcactgagttcttattatatttaagatagaatcgtgtgatacctaactttactactcacctcttcccttaatatttattccatgtatcctccactagatttttagctgcttaaaggtatctatctttttaatccctcagtatgagatggaacagtagtgatggcttattttaatattttattttaaggagtgtggcatagtggaaaattcagaggcctgagtcttattttttaactagctcttaactaatagtataatctcaagcaagttcttttactgcttgtgcctttattgatttacctgtaaaagggggtaatttgaatacatatctatctcttttttttttaaccttttcttttagtttttaaaactttttttttgagacagggtctcactccatcacccaggctggagtgcagtggtgagtagctgggactactgacacacactaccatgcctagctgattttttgtaaagatggggtttcaccatgttggtcaggttggtctcgaactcctgggctgaagggatccacccaccttggccccccaaagtgctgggattacaggcatgaaccacctcacccagtctaggttttaaaactttaaaagataattataaattcacctgcaattgtaagaaataatacagaaggatcctgttcatccttcacctgtttctttcaatggtaacatcttgtgtaaccataatatatcaccaccaggaaatcgacattgatacagcccactgactttatttagattttaccagtttcatgtgaacatgtgtatgcatgtgtgcgatattatcatgtgtggagtcatgtgacccccatcattgtagacacagaacttttcgccacatggatccctcatgttgcccttatatagccacagcctctccttgcctctccgccgttcctaacccctgggataactaatctgttttccatttctatgattttgtcattttgagaatgttatatacatggaattgcacagtgagtaaaccctttgagattggctgttttcatgccccataattcctttgagattcatccagctatcagtacctcattccttttgattactgtgaatatccacagtttaccttttcacccattgaaggacatgtgggttggggatattatgaataaagctgtgatgaacattcatgtatacatttttgtataaacttgttttcatttctcttggataaacacctaaaagtacaattgctttctgtatcttatggtaagtgcatgtttagttttataagaaaatgtcacagtgctttccatagtggctgtaccattttgcatttgtaccaacaatgtattttgaattaatttttgtagaacatgtgaggtttcggctgaagttcatgttttttgcctatggaggttcaatgcttcagactgtttgttaaaacactctttcctccattgaattgcctttctacctttgacagaaatcagttggagatatttgtgtgggtctatttctaggtcctctgttctgtttcattgatgtgctctgctggtaccataccatcttgagttatggtagctgtataataagccataacttagggatgggtgacttttcttattttattcatttttatcaaaattgttttagtttttctaggtcctgtgcctttccatatgcattttagaacaagcatgtctgtgtctacaaaaatattgctggaattttgatagaaattacatccaacctataaataaatttaggagaattgacatttttactatgttgactcttgagccattaccacaatatgtcccccaatttatataggtcttccttgatttatttcaccaacaatttgtaattttcaggatgtagatcctgaatatgtctttgttagatttgtatctaaatacttctcttttttgaggggtgactgtaagtggtactatgttttattttattttatattttattttattttatttttaagatggagtctcactctgtcactcagactggagtacagtggctcagtctcagctcactgcaacctctgtttcccaggttcaagtgattctcctgcctcagccacccgagtagctgggattacagacatgcgtcaccacacctggctaatttttgtatttttagtagagacagggtttcgccacgttggccaggctggtcttgaactcctgaccttgggtgatctgcctgcctcagcctcccaaaatgctgagattacaggcgtgagccactgtgcccaacctggtactgtgttttaaacttcagtctccacacatttattgtaagtatatagaaatgtgactgttttttgtatgttgatcttgtatcctgcaatcttgctgagctgggtatctttaggagttccttaggagtttgaaattctacaacaatattgactaattattctttgtctctaatgatgttgaaatgagtaaaaattgagttaaatttttctggagaagttttaagtccaacctaaagaagaacttattaaccaaaaacatgaccacttcaacagtctgcctagaaaatacctccttctttgagagctttgacaatgttaaaattaactgattgacttattttgctttccatggaagactgttgcttgactttaaagagtccttccccattaaacctcaaagatctcctggtcatttttaaatgaactggtaatagtatcctcaaagtagaagaattaacgtgtgtgtgtgtgtgtgtgtgtgtgtgtatgaaatctctgtatttaaaaagctgggttactcaataagtctggaatgtcttttagttcttaccctctaagataaaatatcaattatgtcttaaggttatctgcttaggaaatgaatagttgctgctggaaaccacatgtaagatttactcaagagcaactactaaaaaatatcagtgaaggtgtgcaagtcattagtcaatgaattgaatacatcagtgatatggcctgcattacttaggtggagaggcaaatctctacaaaatcaaaaaactggtttaatcaggcatgattcttgagcagcattccctcataaaaatccaagatagttgagtgattcgttcttcaaaatcttgaatgttatacacaatactcagcagcatagaaaataaagcgattctttaaagagtataaaaatatactctttatttaatattactaggaattaatagtgtcagatagtttttagtatggcagaggagataggcccatccattttactttagcaatttttattaaaatcttctgaagtatatgcttccctgtcccttgatgataataaacagtggtgaattaggaatatcagacaccaacctgtgttttaatacagggactcttgcatcgctcaagccattaacatctggatcaaatggccctagattgccgtaattttgcagatattttgtgttcttcctctgtttgggggtatttgggtgtgcctcttgtgcttcagaatcatactttattagcaagtctaaattcatggttctgcggatagcttcttactgttttactaccagtaaagtccacaatctttaagactgataatttcttcgtcattgctgaaagaccttccaaatcctcaacaattgcagaaatttacatgttgacatgtagagtatttctgtccttaacagagggatgcagaatactggagcatgctaactctttttgatctgatttaagccaggaaaatagtggaagaaaggtgagtagcacaagttggatcagcactacttttatcaaatgttgaaacttcctaaatgtagccaagactgttcttatcaccagagtcagcttccagtgtgaggaaatcaaagtgcaagtgcaggaaattatctgtattggatttggcattggcattgaacccagcccaactgaccactcagtgtttgcaaggacctctaggggagtcagaatcagtataagagtgaggaagggcatggcctacatgctataatatttttgttctatgtatattactttttgatgttcctgaaaggctaaaaatttgtggaggggagcagaaatgtataataaagaaatagaatagaatagttctgtaacttccattcagatcacttcatggtaagcacctcaagtactcagactttcttgaaatcaaaatcaggaaatattccaggctgggtgcagtgactcatgcctgtaataccagcactttgggaggccgaggtgggaggattgcttgagcccatgagttcaagactggcctgggcaacacagcgaaaccctgtctcaataaataaataaataaataaataaataaataaaaagagaagaaaaaaaattcaagcttctcattcaaaaagattttttaaactataacttttgattgtctctacataaaattttaatagcatgtttaatttggaggtagatttctaaaatttaaaaactattttcattccaagatgaaatgaaataagaaaaatagcttttggttcctgccttcaaatctttaaacacctagttggattcctgacttccagagtgtaatggtaaagccacctgctccgccctatctggttgttgtggtagggaagcactatagacggaatgtttgtgtccttcaagaattcatatgttgaaacctaatctccagtgtgatggtattaggaggtaggacctttgggaggtgattaggtcatgagggtgaaactctcatgaatggggttcgtgtgcttaaaagaagaggccagagagctaggtagccctctttccaccatctgaggccatagcgagaagatggctgtctgtgaaccacaggaatcaggtttttaccagacacccaatctgctggtgccttgatcttgtacttcccagcctttagaactgtgagaaacaaatttctgtttataagccacccagtctgatattctgttgtagtggtctgagctgacaaagacatttcctcagaattgctttcccagacctctgatttttctcctctcttgtgtgcccatagtctgcatgagcctatcagagcacttgttgaggttttcatattatacttgtgtgattcttttatttgtgccccttctttccactgcattgtaagctccatgaacatagacttttagtgacacacacatatacatgtgtgtatgtgtatatatatatatatatatacacatatatatacacatatatatacatacacatatatatatatttcactgttctcccttgtgcttacaatatgtagcaaaaatatttgttgaattcatgatgacttttcaagcgaatgctcttttcaaaggtctactaaaatatatttgttccttattatctctggggaaaaaaggagactggtgtatgtgtgggctggaataaatattcaagctttacaatttttatcttctttgaagtctttcatacaacctcctttatgaagagtgccatgaaaatgatctttaaataagaaaattaagaggtgttttagttgggaattaatgtattagcatatactttaaaattgtgtgttacacagagatacagaaggtgtttatatagtgtctatcacttgtctgctgtttccctggaagaatgtacatgtttctggctgtaaacaacttatttgccttttgaagctagagtgtaaattgtggcttttgcatattttaccttcttgttgtggaatatccttcagatgctaacacatgaacaagagacttcaacttttaaaaaacagaatgtgtgacctttggcattcataaacacatagtaataatttgccctgtatatggtcttatgataagtactgtttggctgccagccaagtctcatttcttgtgctagggctgtcagggccacatggttgtatttgtaaggagaatataagtgtaagaagtctgtaaaactatatataaagtcccaccgtctacagattctgtctttcaaagtactaaattaaatgacatcttcttagaaaatacaaatgaataataaatttcttgcatttacaaaattgttcattgaatcagtccataggccaaatatatgagaaatattggtggaaaataatatcttctacatcgttagcagtggtacagagctgtaggtacattttagctaatgtagagttgtcttttgactcacctcttgagttgaagatgaaagcaggatgttagcagggaaatggtatctggcttgcaggcttgtcccctgtgaagaagatccaagcatggatccctttggtttaagaaagattgctgctgttgctgaacaagctcagggacatagaataaggcaaagaatggtgtgccattgctgaacacttcctcttccagcttctcatccatcttccactgtggttctgatttcctgtgctttcttgagtgtggtttgagctaaggaagtataataggatgatatggatgtcagagacactgatggctccccattgggcttactccaaacagaagcttttaaaagagtgagaatgggtttcattctctcttcctggtttgatcactatttctattttcttatgacccactgccgactgaaggctcacagaggccttacctgtctctcactgctgctggtggcccatactgttctgtttaagcaaagccctgttctctcccaatattacttcttttttctctgtgtgtgcgatcccttttacacagggggcccatgtcagattgctagaatgcttcattcttcattaaccatcacattggatattaatcagtcttgcagactaattctcagtaaaggtattaccagaaatacagttcattgcatatttatcagttactttactaggtatttccatttgttccttttagctaacctgtcctccctatcttatagatgaggactcggggtggaccttgaagtgcagagaggttaaaaacttctccagatcaacctagtaaggggcagggctgggatttgattccagctttatacagttttgcagcaaacaaagactcttttcctgggatatttatagtttagccaggaatactgggttagtgatatgaatatgatttaggccaggcacagtagctcatgcctgtgatcctaacactttgggaggcagaggcaagaggatcatttgagcccaggagctcaagaccaacctgggcgacaaagggagacccaatcgctagaaaaaatgaaaaaattaaaaaactaaacaaggagtggtggcatgtgcctgtcattccaggtatttgagaggttgaggcaggacgatcttgagcccaggagtttgaggctgccgtgagctatgatcatgccactgcattccagcctgggcaacagagcgagaccctttctctagaaaaagaagaagaaaaagaaaagagacttaaacctattgatagaatttctggcattgttcctagtcatttgatatgtatctctgctagggatctctctggcaccttgagttcatgccagaggggtagctatctacttaaatgatatgtttaaaaatttaatatttataactaagaacaagtctattagcagtgatatttttatatgacatattaaagttacaacatctttctcatttgattctctcaataacacgtggattcttacaagttaagagtgaaagtgagaagttattgcagtagtctaagtgaaaaatgatgatagcaatagaaatagagagaagtacacagattgaaaaatatgtgttgggggtagcagacagaggaggctgcaaagggaaaaaaaaagaaatgcagaaacatatggtggtgtggcagatactgtagcttggctcatttaatacctctgccgtgtattattttcctgtgctgctgtggcctaaatttcctagaatgccctgtagctagaattctgtgtgtgacttggtttcttccaagactgtgcatccatatgatgcgtgtgacaagaagcacaaggaagacagtgaggtcgttgccatgtgcagaagagatttggcaaacacagtggcaaaggttcctggtgctacccaggcatctgtggtggaagttctagctttcagaccctttgtggtgggaggcagtgcggggtattcttgctagctcagacttgtgatgtggttggacttctctcctggctatgtgcagttgtcttgttgatcatcccagcctgattctccaggcttctaggagattgaggaactatcaataatcctctttatgtttaagccagctagggaagtctgctgtctgcagatagaaattgggaatggtacagctactataaagctgagaaaatatgatgcttcaagggagctaattgtgtttagtactgtttaaaaatggaaattgaaaagtgtttattaaacttagtgataggctcatttgtgaccctggagaaagcatggttttttggtttggttttgttgttgttttgatggaagtggaaatcagttacaataaatagaagagtacataggaggtagggaagtaaagacagcctgggaagacgactctattgataacttgactgacggggaatagagcagaggagcaatagttgagcaggatcaggggattttctcgtattggagtgaaataatatgtatgaagcaatttttaatgaagtgtcttatacttcgtaagggcttagtaactggaactgttattattatgattgttactactattattgttgtcattttgtcctctgtatactttagagcgggggtgtccaatcttttggcttccctgggccacattggaaaaagaattgtcttgggccacacataaaatacactaacattgacgatagctgatgagctaaaataaaaacacacgcgcacacacacacacacgcacacaatttcatgttttaagaaagtttatgaatttgtgttggccacagtcaaagccatcctggacctcatgcggcccgcaggccatgggttggacaagcttgctttagagtattgtgagtatggggtagcaatctcttctgtctcctgattttacagatctttttttcagctcttgcaggctggcctcattgccatattatctttacttaattacattaattcaataaacatttatgaagcacccagtatgtgccaggtaaaaatatagcaggtgcctgggattcaaaactgagcaaaacttgctctctgcctctaaatagtttctgaagcactaggggagagagatggttaaagcataaataaatgctttatctcaagtcatgcttctaacagacgagcagaaccaccaggagatgtgtgtgtgtctgttgtatttatgtattcatttactctctctctctctctctcattatggctggcttagcagcccagagcccacaggcaggaagacaggcaggaaggatcaggagcaggctggaacccctcaagcatgtctttttatcttaaggtccccctacagtcatctatcaggggttaacgcaattcttcttttgagccatctcccttcttatgaaagcctcagtgttgaagcaggaagcgtttctcccttatagtcatttctatctactctcttatataccagtaagacctgtattataaagaattacgtttatgataagcagatatgcaaatttattctaatatgtattgcctaatttcttgaatacactctagctgcatttattaacatattttatttagtcatctgtgcagctagtaaaaataattggctatctgtgaattagcacaatacaagttaaaatgtgagttcattagttttcaacttgagtttttaatttcacctgctgtttactgcccaaaggaatgataaattgtattttaaatgaaatgtatttgaaggaagaaccttcagcaatcaatattcttttttacttaaaatctgcttctaatctgctctgaaactttaaagatgttgtgttagactgtggcaaccactgatgaatttgaaaagttgtgtttctagttcttattgccaaaggaattagaggcgttaggttagttagtccagttatttttattgaaagaagttgaaaccagctcatatatcttaaaaaagaaaggtaaaatgcagtgagtggggtgggaatttcaattatgaaaaaggatatcaagactttaaagcccagagacagccgaagccaggcctctgggccggaactctgcaaactcagcctggagctctgtgggaagaggcagctcccactactgctggtctgtcccaggactctcctgccctctgtttctgtttctctccagggtccgctctcctcctcctcctcttccttctccttctccgccaccactggggtctgctcccctcttcctcctccactctgcctcctgttcctttcccctttctcctccagggtctgctccctgccgctgcctccattgccacctcgggtggcctcctcctcctcctcctcctcctccagtgtctgctcccctcttcctcctcctccagtgtctgctcccctcctcctcctcctcctccaggttctgcttctttcctcctcctccccctccctaactcttcctcctcctccagggtctgctctcttcctcctcttccccctcctccccccttttcctcctcctccttgcccttgctctttcctggtttcctctgctttcttgtgtgcatgtggcctggcctgctcaccctcactgcctcagtctgtgcttcttcatcaccaccagccagcaccactaactgacatcagtttctaggtctctcagatcagattcctgaaagaaaggattcagttggccctgtttctgcccagagaaattgtgtaatatatattttttgagaactgatttggccttttatttatacatatcagaagtatattctccaacttgcctaaaggttctgttctaactgcgtttttgaaatgtgtggtttagtcagagaaactatgtcttaaagtttctgttgattcccaggccagctgcaatgaactatttaacccatgaagaagatgagctccggcatactgcttctgttcccacgaatctctctcttgctgtgtgtttgtgcctgggatttgagccagggaggatggggagctcagagtagagtctaagatgagagtgggctctggggagatgagggtcggctctagtagggggtatggaaaagttggtgatctttagagcaacccttctgttgatgtatgataggtttagggtagggttcaggtgaggagagtgtgggaccccttggcagaaactccagtggggaaaagtcaaagatagatgttctgttctgtgtccagggtccccggctctggctgtggcagtggcagtcagggggccctgtgtggccatcatagctattagaatgggcagaccatcagtagtccagctattcttcagtagaacagctgcttggcctccttcgaaaagaaataactgggtggggctcaaattccatctgcataaaatagtcaccataaactaaatgtggaagaagtaaagttggtgtttattatcatgattgttcttgactataaatgttaaaactcattgggggagtagggggctggatttcctgtgatccatagaaaggaagaagtgtttcgggcatacctggggaccaggcagctcgatggtctgcccctaacaattcaccttggaggatggaatagtcatttcccaggattttgaaatttatgtaactttaaccatgtcttgcttctgaaaatttgccttttaatctctctacaagtctatcctgtattaacctcgtggtatttgcagaaggaagtttcaaagtcccataatttaaaaataaaataaacccaattttctccataaattttattataaaataaggcttgtattcctggaggcaaagtcctccatgcactaaagttgaatactttgataaggaaagaattgagatgctgaccattctgtgcttatattaaacctatttcttccccccaaattactatttcccccagtttactatttccttctcagtagcttaggaaagtgcttttagcctgagggattctgtgatcccacacttttgcagccctaggaacttggcatctatcctccttagacttttatgagtaggtcccaccatataacatgcatctgcacctgaaactccatttatgtaataatgctacaagagtgcccatgctgtttcagatgctcttctagctcctggagatacatcagtatccaaagcaaaaaaaaaaatgcctgttatcttcatggagcgaatattctggtggagcagcttggacaataagcataataaataattatgcagtttgtaagaaaataataagtcctgcagaatgatagaactatagtgctgtagaaagataattctgtttagtttagttttgtttttttgagataggttctcactctgtcgcccaggctggagtgcagtggtgtgatcttagctcattgcagcctcaacttcctaggctaaagtaagtcatcctcctacctcagcctcccgagtagctgggactaaaggcacgtaccaccatgcctgtagtcccagctaattttttaattttttgtagagacggggggttgccaggtttcccaggctggtcttgactcttgagctcaagtgatccacctgcctcagcctcccaaagtgctgggattacaggcatgagctaccacacctggctagaatgataattctgtagctgatatagaatagaatatggggaatgaggagggagaggggaacattgcaattttaaattgagtggtcagggttggcttcactgagaaagacatttgaacaaagactgaaaagggtgaggaagcaagcaatgtgggtatctgaaggaagaaccctgcaggaagatgaggaagccagtaaaaaggcctggatgcaggggtatgcctggcatgttcaaggccagcaaggctgggggtagctgtgagagtgaagagaggaagtaggagagggagcaaatcggatagaggcggaccagatcctatgcgactttggaggcaaggactttggcttttgttctgaataaatggggagccattggagggttctcagccaaggaggggcatgatctgaccctgatttttaagggataagtctggctaccattaggaggaactggggttcatgggaggcggtgcaggagtggaaacagggctccggggagggagactattgtacagatccaggtaagagacagtggtggcttaaccaggatggtaactggaggctgtaagaagtgattggattttagatatattctgaagataaaattcataggatttctacatggattgggtgtgaatgggtgagttgaactttgaattatataaaacaaataaaatatctaagtaactaatgtgatatttgaaattctgtatcctgaagttaagttcaataagattaacccacactgataatggattttccctctgtcctgtgaaagagtcactatgccaaacggaaaaaattaagctgaaagctgagtcatgcaagaaactgcttttccttttgttccttagcatatagctacagataaagattaaatatctccacatgtagctactctatgttcaccctatcttgtgtgaagtgctgatttactgagctcaagatgaatatgtaactgactcgtcccctccctgctccttctctcttgcagcatgtggattacctaccctccttctctcccctccagcctactttccccctttaaatattgaagctctcaagatcatctttggagaaaggcacaggtcacagactgttcctgtggtgtcatgttgttttcttcaagacaagttcttaaccttggcaagataaacttctaaattgattgagacgtgtctcatgcattttggtttacagtccttaccatatggttgggaaaaatatacaagtgaatttagctgaggttaaatttagtattggactttacagaaatgaatgtttctatccaagccttttcagaaaggatttaaaaaaaaatacccaagttgtgtgtctcccttgcataatgtaaataaaaggcttgaaactttagccaagcagtcttccactaccaacttttccaataactttccatcctaagtgtgctgctgactaatcttccatgcagcacgccaagtcttgctttgttgaatattaaattgtcgacatattaaagttaaaacttgctgtagtacactatttacaatagcaaagacttggaaccaacccaaatgtccatcaatgataggctggataaagaaaatgtggcacatatacaccatggaatactatgcagccataaaaaagaatgagttcatgtcctttgcagggacatggatgaagctggaaaccatcatcctcagcaaactaacacaggaacagaaaaccaaacaccacatgttctcactcatgagtgggagttcaacagtgagaacacatggacacagggaggggaacatcacacaccggggcctgtcagggcaggtggtggcaaggggagggagagcattatgacaaatacctaatacatgcagggcttaaaacctagatgacgggcggataggtacagcaaaccaccatggcacacgtatatctatgtaacgaacctgcatgttctgcacatgtatcccagaacttaaagtaaaaaacaaaaacaaacaaacaaaaacttgctgtcgtaaacccagcattaacaacactgattcctgagatagtgtagttgtgtggtttggacatatgatgccaaaacataacgcagggcttcaactctgtcatgctgaattttacttcttactccatcattgaagctgccctcacagggttaacaagaattttggacagaaatactgtaattaagcattaatttgggtttcctttgactcacttttttttgtaactgaaagtcatggaacactagatactgaccatttgcatccccactgtacctgtagataggatttctcttttgttattatttttttgagtcagggtctcgctcggccaccccagctggagtgcagtggcacaatcacggctcactgcagccttgacttcctgggctctagtgatcctcccaccccagcctcccgagtagctgggaccacaggcatataccaccgtgcccagctagtaggatttctgacattagaatcataaggcttttgctcaagatagataggacctctgacattagaatcataggcttccagttaagaactgcttaaacagatcttgaattccagtagaacagctgatgtcaacaatctccacactttggcccattccaaaacccctaaaaaccctattcccaaactcctctggcagacagatttgaggtttcctcccatctccttgtttggcagccctatgattaaaccagtgcaacctggtgtctcggcatattgatttaccatgtacatagggcaacagacctattgtggttacatcaccactaccaccaaaccagtctgattttcatcagccacttcctctgtcttggtatagaaaaataatgtatgtacttaaggaaaaagcagtcaacaaacttcattggtttcagagggctaagggaataatataatcaatgggctagtaattggaagcaattgtttttaaagtagttctattatagccattcattaggactatagatttgccgtccaacatatttttctgtgtacctagcatgaaatttgaagaatgtaatttaaaataaggagtagagttctgttgactgtttttgggtgtcattttttatcagtttattctaaggttctggtctttctttgaacatgatccttagcagtaatttttttctcttttttttgagacggagtcttgctctgtcgccaggctggagtgcagtggcacaatcttggcttactgcaacctccacctcccaggttcaagcgattctcctgcctcagcctcatgagtagctgggactacacgtgcacaccaccacgcccagctaatttgttttcgtatttttagtagagacggggtttcaccatgttagccaggatggccttgacctcttgacctcgtgatccacccgccttgacctcccaaagtgctgagactacaggcatgagccaccgcgcctggccagcagtaatattttaaattaattgagagaatcaaatgtttttattattaatatcagttttgcttatctttttgtaacatattttaaatctattgggtctgatttgcactccacacagtggttgatgtgtcattgtcatcagtcaccaaatagtaatgtgtcttattatgtgttatgaaagcaagttctttaaatcctgatgtggaggggaataatctgaaatagaaaaaattttataaactttttcaggtgtgattttatggtttcctggtgagtggaagggccttaaagagttgctcagccaagtggtcctcttattagcctcctattgtttgctaagagtgatttttgctgtggcctaaatttcatgccttttttttttctttagaatttctaaactacttttttactatccagaaagccccagaaagcaaatgggttgttttcagattattcctggaaatgttgttaatctccggagccaactcctcaaatctgatttggttgagatgagtaactgaggacagtttccaagagttgagtgttgacacatgctttttagcatttcattactgtaaatctgtaagaaaagtgtgaggattaaggtggcccagagtgtacttgagtgtaggcagaaggaaggattgatcaaataagtgggctgaagtcagagacattctcttttctgatgcgccgttatgatcttcctgtggaaaccagatgtttttgtatcaagaagaaatgatgagcttcagtccctgtcttaggaagttgcatcgaatttacaaaggataccatttagagaaattcaggacataaatagatactgttaacttcttgttaaaaaaaaaatggcaatttccccaagtatatcatatttatatatacactgtttatcttcttctaggaaaacaaaagctgttcattggaatgaaaattctgagttttatttgtccgttaactcagtaattggtggtattctcatataattgaacattgaagctttgttcccttgcaagaaattatatgggataatgtgtatgtctgtgatacactatatgaagagcttctgtgttgggtagggagaaagaatttgatggtagctattgtagtacaatatgactacaaagtgctgatgagcaatagaagttatagtgttcggaaagcaagttctttaaatcaatcctaatgtgggggaaattaatctgaacatcagcatcagctcttccctgccacttaggtctctctcctacaggaagctgtcagtttcttacctatgttgtgttctcttcctggtccttacaaggaatcctatagctgtgagaagccctcccttctttggtagatccccatttaccccaaaaggtgagcatcttcatttgttagtgctgtgcatactgattcttctttctcttgcccttaccagctttaatgctgctgttgatttctgtccttctaaccagatgtttttgttctttctggctgtcttctatcattgaacacttttcctgcttaggacctatagcatagagtgatttttcagattgtctcaagttttccattaacaagaatatcagctcatatttatgaatcacataattgataccagcttcaaagaagcagcaagctaatttagactagaccttgcagatcaccaggaacagttttgtcaccagggcattgtacaaattgggaaaaaaaataaaagcaccctatttggacagatgaagtataaaaagttgctctccaggtgcatggatcagaaaaatgtccctcatccaaagtaaggaagcctcgggatgtggcttgaatggggactgaattttagcctcatttgaccagtgtttagggtttaatacacaactgcttgcagcagcttgggttgccatgccatctctgttttattttgttttctttggttttgtttttaagatccatagacttggtggctatctctttgcatcacaatttccaaatttttgtttctaggggttcttagaaatacaccctctaggccgggtgcagtggctcacgcttgtattcccagcactttgggaggctgaggtgggcagatcacgaggtcaggagttcaagaccaacctggccaacacagtgaaaccttgtctgtactataaatacaaaaaagctgggtgtggtggcaggtgcctgtaatcccagctacttgggaggctgaggcaggagaattgcttgaacctgggaggcagagggtgcagtgagttgagattgtgccactgcactccagcctggttgacagagcgagactccatctgaaaaaaaaaaaaaaaaaaaaaagaaagaaacacaccctctatatcaatagttactctggtttccctccttccttagttactctggtttccttccttccttccttccgtccatccttccatccttccttcctcagctctattgtggtataatttaaatgccacaacattcctcccattgtaagatacaattcaataattttaagtaaacttactactcatacagatatcactacagtctagtcctaggacatttccatcaccccaaaaagttctctcatgcccatttgcagttagttcctgctcccaccccagccccaggaaatcactgatctgctttctatctctgtagatttgccttttctggaaatctcatatgaatggaattatattttccttttgcttctttcttctgttaagctaatgtaggttccagtcagtgctcatttgcaataactggatgagccttgtcaccttctactgctgctgccagtccttgcttatcccttcctttccattctgcctcagtgtacaaacatactcttttacctcctgtcttaaaattctctctcgtccatcatcccctccagccaccaccctatttctctgggccatttccgagcccagcttcttaagactcgacgttatatatgctttctactctctcctctcctgtgagctctcattttttgttttttttgtgtgtcttaaatataataattgatatgaataaaagacattaaaaagaacatgtgatacatatatacatgctttaaagcatagtgatataatgagtatctacatctgccatctgccccttccgctagcattacaaatggtggaacccatgattcatagtgtccaaaatattttacttatctttacagttattttggtcctttttgatcattttaattctacttttaaataagaagtctgggctaaattttctttaaaatccgttacattgctaaatttctctgattactattgagagattaatttttttacttagaaagtattatagaagatttatagcttgctttgttgtatattactatattttattatgaagccttggctaagagcatgcatgacatacagttataacagtatttctataggaaatgtattctatttgcattaatttgcttcaggtttttttttcctaaatttttgaagctaaaagctagacttcctgtaatgttgtttccttcctttaaactttggatagaattcatttaatcaatccatttggccccaagggaggcatggatgtcaatttttgtttcaacttaatactgtgaagacttaaatatttaattaacgtaatacttgacacttagaagcaatttataatcatcaaaactaggcctttgttttctttttttatccctgttgtttagagttttcttgttgtaacataggttaggaatggactggtggagaagtgaaaaactctcccctctccccccacctccaggcagagagagttacgcagtgcattgactagtgatggatgtttaacatacttgtccttacatctgttgattttctaaacacatttttatcatttatttcatttgtggaagtctgaaatattttatgtctttctattgcatattgatgtcattaaaacagtgaacacttaaaaacagacactagattttcttttatctttatttgatttcattaatacagtctaagaaatattgtgagtttttaatgagttacaagtaaaccaaagtgggtgacaatcttcctgtggagctgggtatatgtctgacaggaaaactatgggaagagaatcttcttttcttcctggtaggagaggccaagatgagaatggagctctgtgtagtgctctatgtgtcataggaaagatccatgccagccaagtggattccaaggcccaagtcatccctggactctggaaagtctcatgttggggcagatgcagtgacttcagcatgcatgtatttcagttttcctttagtctgagaatttctagtcgttaataccttcctttaccagtctctgctattatcaaacacacatattctccttgtattctgaaaatgatttatgcttatggccttagattctataaatctaaatctatttgattaaagcctttgtgctttttctcctaccgaaaattaaaaagaaacaagcatgtattctatttaaatgggagagtgaagatttactgacttcacagatgaccccactggaggaaatggattgtatcacaggcccatgaaatgtctcatgattgtgcatattttgaaatacaccccactgattagtgaggctccagattaccagatagactcatctttgtacaataggactttaactggttttctccagtcctcatttacagtaccaattaccttacagaaacctttctttagcttcagtctcctttttcagtttcacaaagtctgaagtaacaagattcagttcattaaggtttaattttatatttgtctcccaccataatcatcattacattttgttacaagtgataggaaaaattattctgacttctttatcatagggccttagaagggattttgttaaaatcttaactgctgagtagattgtaaaaattttctcccattctgtaggttgcctgttcactctgatggtagtttcttttgctctgcagaagctctttagtttagttagatcccatttgtcaattatggcttttgttgccaaaattttcttgcttttggtgttttagtcatgaagtccttgcccatgcctatgtcctgaatcgtattgcctaggttttcttctagggtttttatggttttaggtctaacattgaagtctttaatccatcttgaaataatttttgtataaggtgtaaggaagggatccagtttcagctttctacatatggctagccagttttcccagcaccatttactaaatagggaatcctttccccatttcttgcttttgtcagttttgtcaaagatcagatggttgtagatgtgtggtattatttctgagggctctgttctgttccattggtctatatctctgttttggtaccagcaccatgctgttctggttactgtagccttgtagtatagtttgaagtcaggtagcgtgatgcctccagccttgttcttttggcttaggattgacttggcaatgtgggctcttttttggttccatatgaactttaaagtagtttttttccaattctgtgaagaaagtcttggtagcttgatagggatggcattgaatctataaattaccttgggcagtatggccattttcatgatattgattcttcctatccatgagcatggaatattcttccatttgtttgtgtcctcttctattttgttgagcagtggtttgtaactctccttgaagaggtccttcacatcccttgtaagttggattcctagatattttattctctttgaagtaattgtgaatgggaattcactcatgatttggctgtttgtctgttattggtgtataggaatgcttgtgatttttgcacattgattttgtatcctgacactttcctgaagttgcttatcagcttaaggagattttgggctgagatgatggggttttctaaatatacaatgatgtcatctgcaaacagggacaatttggcttcctcttttcctaattgaatgccctttatttctttcttctgcctgattgccctggccagaacttccaacactgtgttgaataggagtggagagagagggcatccatgtcttgtgccagtttgcaaagggaatgcttccagtttttgcccactcagtatgatattcgctgtgggtttgtcataaatagctcttattattttgagatatgtcccatcaatacctaatttattgagagtttttagcatgaagggttgttgaattttgttaaaggccttttctgcatctattgagataatcatgtggtttttttctttggttctgtttatatgatggattacatttattgatttgtgtatgttgaaccagccttgcatcccagggatgaagccaacttgcttgtggtggataagctttgtgatatgctgctggattcggtttgccagtattttactgaggatttttgcattgatgttcatcagggatattggtctaaaattctccttttttgttgtgtctctgcccggctttggtatcaggatgatgctggcctcataaaatgagttagggaggattccctctttttctattgattggaatagtttcagaaggaatggtaccagctcctctttgtacctctggtagaattcgcctgtgaatccgtctgttcctggactttttttggtttgtaggctattattgcgtcaatttcagagcctgttattggtctattcagggattcaacttcttcctggtttagtcttgggagggtatatgtgtccagttatttatccatttcttctagattttctagtttatttgcatagaggtgtttatagtattctctgatggtagtttgtatttctgtgggatcggtggtgatatctcctttatgattttttattgtgtctatttgattcttctctcttttcttctttgttagtcttgctagtggtctatcaattttgttgatcttttcaaaaaaccacctcctggattcattgatttttttgaagggttttttgtgtctctatttctttcagttctgctctgatcttagttatttcttgccttctgctagcttttggatgtgtttgctcttgcttctctagttcttttaattgtgatgttagggtgtcaattttagatctttccttctttctcttgttggcatttagtgcaataaatttccctccagacactgctttaaatgtgtcccagaggttcttgtatgtggtgtctttgttctcattggtttcaaagaacatctttatttctcccttcatttcgtgatgtacccagtagtcattcaggagcagggtgttcagtttccatgtagttgagtggttttgagtgagtttcttaatcctgagttctagtttgattgcactgtggtctgagagacagtttgttataatttctgttcttttacatttgctgaggagtgctttacttccaactatgtggtcaatttcggaataagtgcagtgtggtgctgagaagagtgtatattctgttgatttggggtggagagttctgtagatgtctattaggtctgcttggtgcagagctgagttcaattcctgaatatccttgttaactttctgtcttgttgatctgtctaacattgacagtggggtgttaaagtctcccattattattgtgtgggagtctaagtctctttgtaagtctctaaggacttgctttatgaatctgggtgctcctgtattgggtatataaatatttaggatagttagctcttcttgttgaattgatccctttaccattatgtaatggccttccttgtctcttttgttctttgttggtttaaagtctgttttatcagagactaggattgcaacccctgctttttttttgttttccatttgcttggtagatcttcctccatccctttattttgagcctatgtgtgtctctgcacgtgagatgggtctcctgaatacagcacactgatggatcttgactctttatccaatttgccagtctgtgtcctttaattggagcatttagcccatttacattaaaggttaatattgttatgtgtgaatttgatcctgtcattatgatgttagctggttattttgctcattagttgatgcggtttcttcctagcctcgatggtctttacaatttggcatgtttttgcagtggctggtaccagttgttcctttccatgtttagtgcttccttcaggagctcttttagggcaggcctggtggtgacaaaatctctcagcatttgtttgtttgtaaaggattttatttccccttcacttatgaagcttagtttggctgaatatgaaattctgggttgaaaattcttttctttaacaatgttggatattggctcccactctcttctggcttttagagtttctgccgagagatacactgttagtctgatgggcttccctttgtgggtaacccaacttttctctctggctgcccttaacattttttccttcatttcagctttggtgaatctgacaattatgtgtcttggagttgctcttctcaaggagtatctttgtggcgttctctgtatttcttgaatttgaatgttggcctgccttgctaggttggggaagttctggataatatcctgcagtgtgttttccaacttggttccattctccccgtcattttcgggtacaccagtcagacatagatttggtcttttcacatagtcccatatttcttggaggctttgtttgtttctttttactcttttttctctaaacttctcttctcacttcatttcattcatttgagcttcaatcactgatacccttttttccacttgatcaaatcggctactgaagcttgtgcatgcgtcacgtagttctcgtgccatggttttcagctccatcaggtcatttaaggtcttctttacactgtttattctagttagccgttcgtctaatcttttttcaaggtttttagcttctttgcaatgggttcgaacatcctcctttagctcggagaagtttgttactaccaatcatctgaagccttctctcaactcgttaaagtcattctccatccagctttgttctgttgctggcgaggaggtgcatttctttggaggagaagaggtgctctgatttttagaattttcagcttttctgctctggtttctccccacctttgtggtttttatctacctttggtctttgatgatggtgacgtacagatggggttttggtgtggatgtcctttctgtttgttagttttccttctaacagtcaggactctcagctgcaggtctgttggagtttgctggaggtccacttcagaccctgtttgcctgggtatcaccagcggaggctgcagaacagcaaatattacagaatggcaaatgttgctgcctgatccttcctctggaagcttcgtctcagaggggcacccagctgtatgaggtttcagtcagcccctactgggaggtacctcccagttaggctactcggtggtcagggacccacttaaggaggcagactgtacgtttgcagatctcacactccgtgctgggagcaccactactctcttcaaagctgtcagacagggacgtgtaagtctgcagaagttgctgctgccttttgttcagctgtgccctacccccagaggtggagtctacagaggcaggcaggcttccttgagctgcagtgggctccaccaggttcgagcttcccagccgttgtgcttacctactcaagcctcagcagtggctgatgcccctcccccagccttgctgccgccttgcagtttgatctcagactgctgtccttgcagtgagcaagacttcgtgggtgtgggaccctccgagccaggcacgggatatagtctcctggtgtgctgtttgctaaggccattggaaaagcgcagtgttagggtgagagtgtcctgattttccaggtaccatctgtcacggcttcccttggctaggaaagggaattccctgaccctttgcacttcccggatgaggcgatgccccaccctgctctgtgggctgcactcactgtgtgacaagccccattgagatgaacctggtacctcagttggcaatgcagaaatcccctgtcttctgcatcactcaggctgggagctgtagactggagctgttcctatatttggccattttggaacttccatcctgacaatgggctaatatccagaatctacaaagatcttaaacaaatttacaagaaaacatcaaacaaccccatcaaaaagtaggcaaaggatatgaacagacacttctcaaaagaagacatttgtgcagccaacagacacatgaaaaaatgctcatcatcactggtcatcagagaaatgcaaatcgaaaccacaatgagataccatctcacaccagttagaatggcaatcattaaaaagtcaggaaacaacaggtgctggagaggatgtggagaaataggaacacttttacactgttggtgggactgtaaactagttcaaccattgtggaagtcagtgtggcgattcctcagggatctagaactagaaataccatatgacccagccatcccattactgggtatatacccaaaggattataaatcatgctgctataaagacacatgcacacatatgtttattttggcatgattcacaatagcaaagagttggaaccaacccaaatgtcccatcaatgatagactggattaagaaactgtggcacatatacaccatggaatactatgcagccataaaaaaggatgagttcatcacatgttctcactcataggtgcgaattaaacaatgagaacacttggacacagggtggggaacatcatacaccggggcctgtcatgggttgggggcgggggggaagggatagcattaggagatatacctaatgtaaatgatgagttaacgggtgcagcacaccaacatggcacatgtatacatatgtaacaaacctgcacgttgtgcacatttaccctagaacttaaagtataattaaaaaattaaaataaattaataaaaaaatcttaactgttggggatgaaggataagaaataattcttcatgaactacagagtgtggttaagaccagtattattagccaaaaagaaagttagattttatacattagctctcttctattaaacatgataatcagactgaaatattgaagagtttacttgaattttcttagttgtgggggataaaacaatgatgttttacattttaaaaaattagaggtattacacttttcaaatctttgtttttgtatacctgggaggcatttttttgtgtgtttgtgatgtttcttatttgcattattacagatgcattgattgtatattattttgtgaagttattttatttctatgttgcatttttcttattaaaattatacaatctttcagatgaacaggaaggacagtgtctgtaatctctcctcaccgccatctgcagtagtcgtacaaaggtgatgttttatgtgagtaagaatttctgtgtttcatttcacaggtggggagcattaagcgggaaatgaccttcacatttcagtcagaggacttaaaacgtgactgtggtaaaaaaatgtctcatcaacacgtgttttccttggccatggaggaagatgtgaaaacagcagacaccaaaaaagccagccggatccttgaccatgaaaaagaaaacactcgctccatctgtctccttgagcaaaaaagaaaagttgtttcctccaacattgatgttcctccagcaaggtaagggaacattaaatctcacatgtgtctgccccaggaagttggtggagagcatgcataatctctgccagtgtacagactctcttcagtatatagacatatgaaaggttttctgccaagaaattttttctattgcttgtgtgaaatagagcaggtggccttactcttcataactgactttgaggctgctgtagttggaactattgtagctctagaaaagaaatgttttattcaattttaataaatgaataataaagagcaaaggaataaatgcaaaaaattaggatgaaacatcatatagaggactgagcatacattaagtaggactgtagccacttcaaagcaagtgtacacagatctttggtcagaggttggtaaactatggctgcaggccaaattcagcccctgatctgtttttctgtggcctgtaacataagaatggttttactttttttttttttccaaatagagatagggtctggttctgtcgctcaagctggagtgcagtgacgcaaaggtagctcactgcggccttgaacttctgggcacaagcagtcctcctgcctcaggctctagagtagctggctgggactacaggcatatgcagccatgcccagctaattatttttattttttgtagagatggtgtctcactgtgttacccaggcaggtctcaaactcctgagctcaagcgattctcccaccttcagcctcccaaagtcctgagattacaggcatgagttactgtgcctggcctgcctttttaacggcttaaaagaaatgaagaataggcgacacagagcacaggtggtctgtaaagtctaaaatatgtaaaagaaaaaaaaagaaaaaagttggtgatgcctggtttatatcttgataatctttgtatgatagatctactttaaaactcaaccaagagggtttatctgaaatatcaaaaagcctttgtctttctaaaaacaagtaaaaaaaaaggcctttgtcacattataattttatttaaaccacacccaatagcactgaaccaaaggacaatattctggcagaatgacagtggcagtggtggcacatacatattagaccttttactttcttgcatatcatttgtctcacctagaaaacaagctccacgtcagcagggattttagattactctgttcatgctttatccctagccctggaacagtgcttaattatgttctggggactcatgaatatttgtcagatgaaaaaaagaaagaaaatgctgtagcatgagagattgcttatttgtaatatgggtgccacattttgttgccaaaaatcatttataatggaacttagagcttatagcaattgtttgagaagtcctgcatttgtccaagtggtttctaacagttaaccaggaaaacagtacctttggaagaggaataaatgtgcctttcctgcctgttcacgttttgtaattaacgtttcatttctttctatattaaatcaaaagtatcttctctagaaaattattattttctcccattgccagatttgtcagactttctaaaattataggcctcttagttttctttaacctttaattgaaaattttcacgtattcattacttctgtttaactacttggaattatttgcttttctaatgtttttcgtataaatacatgttaagttatttaggattatttccttctactgtggcatggttgtgaaacattttatcataccctgaccctcataggcatctcaatttgtatttgttgtttggttgtctcataggaaactgacatgttaacaatttgaaatgtgaagaactgtgcttttttttttttttcctaagtctgtagggcaaaagttagacttctagtgtcagtttaataccaacttgcaattctataggacttattctacataaaatttccattagaccattgtatatgttaaaagacctggaattaatcattttaaattgccataggttgttttaagtatacctttattctttaattccacctcacttggagcacttgctggggaaaataatgaaaagaggaagaagaaagatgttttctgccttttctgactctggtatgtaggatattttccaccttttatggttcactgaatgtacttaaaagtacatgatcccacgccagtgttattgtgaggttcttaaacagtgtgggaaagttaattaggttttaaatccattaatgcacagcaaaaatcccccaatgacaagatataatttagatgtattaatctattatgggaaatactacttaaggcttcattgtttggggtatctactaatatacttgttttcattgctatagtaggaatttaatcatcataaatacagtgtgccagcagttggtgagataagttgcttttaaaaaaaatgatgatgagggaatcaagcattgtggattataatgatcaaactctcaaactctatttccatttactgctaccaagtttaataaatgtcggacttcccactgtcacctaagtatatcaatattttgttttaaagaaacttctttacctgatacagtaggaagatgtaggattttccttttgtttactaagaagaaatatatctgttgacaggtataaataatgaactttgagtaaatctagagtatagtgaaatttatcaatacaaggaaatctatatacaattggccctgtgtatccatgggttctgcacctgtgggttcaaccaaccactgactgaaaatatctggaaaaaaattgtctataccaaacatgtacagatacattttcttgtctttatttcctaaacaatacagtataacaactatttacatagtgtttacattgtattagatattataagtaatccagagctgctttaaagtataccagaggatgtgctaggttatatttaaatactatggcattttatataagagacttgagcatctgctgattttgtgtctatagggaggcctggaaccaacccccatgggtactgaggaatatctgtatccatatcttataaaatatataataaatgtttaaaaatatatatatgatattttggccaaaaagcaggataatcattttaggcccatagaatgcagagttcttcaatcatttaaaatcagttccctgtaacgtttctcactttatcttttgcttattctcattaaagctaagatttttgttgaactttactttctctggtttgtaaaatgaaactcaaagtttattttctgaggtttatataataaaagcaatacatgtatttcaatcgcttatttcatgtaactagagagatctgggaaccccttcccaccttactctctacctcactgtagtttcagatctcctgcctccattcaacaggtttttcttgagtacctgctacaaacccagtactcagtaaaaatgatgagtgaggtgccagccttcctggaggttacggtggaatgagagggacagacacatatgtagctaattttaaataacagttcctgatttgctcccttcccattaggactgggggtaaatttgtaattaaaggaaaatcttttagttttaaggaagttattaatttgaaacatctatttaaaagcccaatttttttattgatatctttttcaagatagggacaattgaaatagagaaggaagagctcagtatcaatacaaactccctgtttgtttacccaatatttgagaaccaattttaaagttgctagtttcagaaaaatataaatttaagtaagttattaatccagatgtgttaggctgggtcattggagaagcaaatgccaagacaggattaaacatgcaaacgttttagtaagagaaacacctgagagagaaatgggacaggaggggcaaggacaggagggagatgcatgtcagtttagggtgctagtctgagcgcagtgatggagagagggcaggaaagttggagggaagtgtcccaggtagctgggcaaggccctcaggagtcctgcattggtaatcctgctgtactccatcatttgctgggagcagcatgtgggagctgtggccttggcgcaaatgcagcagatggtttcagcggccagcagctgggcccttccttggtcagttagctccctgttattggagatctgtaaggtgcgtactcatggttgccttcctcccaccccacaatattgtactttatatattaaaagtgccctaggctgtgcgggcttgagacaggggccagtctccctgccctttgagttaccagtgcagactacctggaatcttcattgtttaagagggccctaagcttcctgtgaaaaaatggcaactgattgtttggccctaggatcctaaaattaattctttaattaattaattgagtcatgagaggacagaatacaaactacctctcttctgagtttcttggggttggtaggaacaatctttactgtaggagagtctgcttacccctgggatattgcttgattgatttcaagggaaaagcactactttcttttttgagcgtgatttggagtaagtgcattatagagttgggtacccaaagtattcttcaaattattcaactttcctcaggagagataactacacagaaagagagggcaagagtatgtgagagcacatgagcaagcactgtttctctttagaattaaagatttatcattaacagaaagaaaattaattcctagcttttaggatcattggagagcagtaattgggttgggggtaacaagtactaaaagtgtcgatgctaattgttgggatagcaatcactcaagggctgatctctctctgagagagatgaaaatactagtttcattgatccctatggagagttgaggaaaataggcttcaagagtttaaggacaggaaaagagagcatgtttgaaaggttcatccatgtgatagcatgtgtcagtacttcattcatttgccaaaatattttatttcatagacataccacattttgtttatccactcatcagttaatagacattcgagtttggaaaagaaggctggccagatcatgttgagctatactgattgtgtgaaggatgtttaaattccatttttatgtcactgagaaggattttgtggaagagaatatggtttcattcatctcagtggaagatcactttaggtgttatgtgtagaatggatcagaggaggacaagaatcgacaaaggaagaccaatcaggaagccaccacattagtacaggaaagaaattatggtagtttagacaagagtgacagttgagatcaagagaagtgtacagaccagaccttgaggtagaagtgaggcttcttggttgtaagaacagacagtgactctggctgatttaacaaagagtgaaattttttgaaagaccatcaaggtagctcacagagttgctgggaaggctggggaaccaggtcagaaaatggacaggagggtgaacagctagaaacatagttatgttcattcactctacagaaccagtgcttgcaactgggctttttggcttctaaagtgagagacatctgtgctaggaagttctccagacacagaagcaaattcagccatgaggcttccaaaaaattgacaaatgtctattatcattagatttcttaacttccattttgcaaatgagtaaacagattcagaaagttaagtgactcacccagaaacacatatttcaccaatgacagacctaagactgggataggtttctgatctcaagtgaatttttgttccttatcatcaccatttgtgtttattggagaccattaacttattgtcatttacaaatgtaatgctcaaaatatattgataagtcaattattacttattgtccagcctctaaaataattcaacagttaagcattgttagataacctagatcattagagcctgacatttgttattctgtttttgccagacatcatggttttgaaggtactgatgcttaaattcgttggatttcacccaaacatcaattacaatttgattatgcaaagtagtaactgtcttctaattataactctaaagctagagaaatgtattagcaaaccagttataacaaagaaaaaaggaaaatttggccagaagtattcttagacctaacagcagtttattagaatagtacagattgttagtttgtggttggaagaaaacaaaccatatggtactatttgtttttcagggttttaaaatacagtgatgtcatatttatcacttgctgaataaaatgaaatcatcttctccttatagcgtgccattctgggaattatatagtttaaaagaacttcagaaacacattgacctttgagttcaaagttaggaaatgatctgagctacaagcaaaatcctataaatacgatgggaaactgtgaactaatttggctcccattttcaatggtagtgtctacattttctcctttcttttatgtactttagacagtttatcggaaagtcgcccatgtcaaatttgtaattaagtgagataagacaaaaatggtatcttttatttttgaatctctagaagcctagcagttcctggaacaaatgtttaatgtttaaatgtgttaaaaacttttcaggtcacaaactctgtaaccagtatgagactactgaaaaaaagaaaaaaggtcactttaccattttaaaatatttctttttaaaaaatagagcattgaaattttagaacatttctttttaaaaaatagattttgaggggaatataaatgtactcactcatgttagagaaatactggtactgtataattggtggactccccttaagaactgaagcaatacccataaagtagctataaagaacatcttttccaagaaacttttatccatttatctcttcccatcatttcagtaattcagggcagcaaataactgttgtctctggtttcttgctacagtctatttgctacacatttgccaaaatgttctttctaaaactcaagtatagtcatggagatgggggatgcagacagggaaatggtaggaaccagtataattgacattatgacttaatgcagcacattgtgccatcagtacacagtcaagccccatcttgctgaggatttagattctcacatcaacacacaaatcaaatacagacaaaattgttctttttaatgtcctccgttacctgtaagaacagaactcagtttgaaagacttgggatctgaaaccacttgaaaaagaagcaattctgtctcccttcttactctggggcaaaatttcattgaatggaacggtggaatggtaggtttttgtttgttgtttttaaaaatagccctctcttcctgccaagtgcctgtagatgaatttctgtaatctaaatgcacatatgctgccacttcactctcctaatgttctataaaaatgggaaggaaggtagtaaggtaagatgagaactttttccagcagttctctttcttgtactaaccctagtaacattgatgttatctcaattttcttttcttttctttttttttgagacagagtcttgctctattgcccaggctggagtgcagtggcaccatctctgctcactgcaagctctgccttctgggttcacgccattcttctgcttcagcctcctgagtagctgggactacaggcgcccaccaccacgcctggctaatttttttgtatttttagtagagacggggtttcaccgtgttaagacagcatggtctcgatctcctgacctcatgatctgcccgcctcggcctcccaaagtgctgggattacaggcatgagccaccgcgcccggcctctcaattttcttaattatagcttaggcaagcttgttttatgacacaaatttggcccatgtagtatgtgtgtgtatgtatgtgtgtgttttaaagagaatttagtactcttcttcttttggttgatgttaaaaatgacattcaaaattcataattttttgtgtactataagttctttattataagcacacattagtgctagattataatgtgtcacctgtttagaatggcattgtgaatttagaattctgatcataaatatgaatttttaaaataataatttatgtcactgccattaatgaaggttatgctctctgtatcaacaaagcttgggcattttcaagtatcacttccaaagagtccttggataattagtaaatgtccttctttgtaaatcatcattggcagcaaaatggagaaaagttaaaactgaaacttcaggtggaccggtagcactgtcgtacaaggtggaccattggctttgttgcacagattggatatatgagaatgttctaaaatgtttaggagtaccattataccacttttgtgatgcccgtgccgtaggttgcctctgcagaattggtttacatttagatgtgatgcagcatcttttttcctccctatatccactcaaaatgtaaataatcaagaaatagaaataatgagattcttaaaactcttcatctccccttgtcattatagattctgtactctgcttttattatagaaaggcaagtaataaccaagatattggtcatttgtttatctaaaaaggataacattcaagcaaaactgtccaatagaaatttaatgtgaactatatctatagtataaaaatttatggtataatagctacattaaaaataggaaaaagagacagtgattgaggtacattgaactccatagagacagtgccagagaaaatgagagccagaagggcactgggtgactcttgccttgctgaggaaaaataactaaacaggagcaaaggagatcctaagaagcctagaggcaaaatcctaagacgccaagaggcaaaaagtcattgtatgcattctttgcgcaaacttgttgggagaaaaggaagcagcgcccagatgctcccatcaacttctcagagttttctaagagacatgcacccaggagacctctttcgacctttcttctgttccgttctaagtttcaccctaaaatcaaagtagaacatgctggcctatccattgatgatgttgcgaaaaaactgggagagatgtggtatgacactgctgcagatgacaagcagccttaagaaaagaaggctgcaaagctgcagaaaaaatacccaaagaatattgctgcatttcaaactaaaaggaaagcctgatgctttcaaaaaagggagtcatcaaggccaaaaaaaagcaagaaaataaagaggaggaagataaagaggaggaggaggaagatgaagaagacaattatgatggataaattggttctattgcagtttttttcttgtctataaagcagctgtccccggcctttttggcaccagggaccagtttcatggcagacagtttttccatggtgggtggggtatggtttcaggatgattcaagtgcattacatttatcatttgattattataaggagtgtgcaaactagacacctcacatgcgcagttcacaatagggttcacgtgcctttgagaatctaatgccaccactgatctgacaggaggcagaactcaggtggtaatgcttacttgcccactgcagctcaccttctgctttgcagcccagttcctaacaggccatagactcttgggttgggggtgactgaggacccctgctataaagcattaagccccttgtacacaattcactccttttaaagaaaaaaattgaaatgtaaggctgcgtaagatttgtttttaaactgtacagtgcctttttttgtatagttaacacactaccacatatgtctttagatagccctgtcctagtggtattttcgatagccactaactgtgcctggtacagtatgagggttataaattggcatggaaatttaaagcaggttctttttggtgcacagcacaaatgagttatatatggggatggtagttatttcatcttcagttatctctgctgcaggttatatgaaataattgttttgtcaactgaataccattctagtcaccaaaaaaaaaggtatagctcttttgttgacattctgaatgcttctaagtaaatacaatttttattaaaaaataggaaaaagaaacaggcaaaaataattttaataactcatattatttaacccaatgtatcttaaatatcattatttgaacatatgtcaatataaaaagtcattaatgagacactttccattctttttttttgcatgctcaatcttaaaaatctgctgtatattttatagcacatctcagtttggacaaggcacatttcaagtgatctatagccacacatggctagtgatgactgtattgaacagtgcagctttagaataaagcataagttaattttgcatttcagtccaacatctcatttatcccaaaggcagtggttggtctcttgctctccctcttttcctactctaacacacaggaagaaaatgcctcactcacactgctaggggtggaacatagctttctatggcagtgtttgttgagggttggggtggcggggaggagcatccacggtaaggagggaagcgtttcatcaactgtgggccaggcagtatttagctggactagttggaactaaatagattagttagaaatctgcagcatgattcctgtatgtcccctgaagggaaatgactcccagttgtgcataactgatgtttagtacaattataattattgtgaagatgtttaaattccatctaaatcaaaggaaggttaaatgggtattaccacagttctggtcctttaaaaacaaagcaggcttcatttccagagtttgagagagcctctttagttgttaccagatactctgacattcctcatggtagctactattagagcagttcaaacataccaagtaaacatactgtaggcttggaccacagttatcacactgaatgcatttgttcatacttttttaatattgttaaaaaaaagctcattaatacatactgcttataaactaggaagtgcaacaaatatgtcaaatatgtattttaaagacttctaagtacaaaggatttattttgttacttgcttaaactgttattgattctccttttaaatgttaaccttttttctctctcctataaatagagttctgggtggagaaatgataagggataaagctggagagtcaggcttaacttggaatacttttagaatttgatttttatctgttaggtgatggagagctgttcaggtgataccgtaagattggcatttcaaaaatgtcacctggtaccctgtgggcatgaggagctagggagtgtatacaagtgttgacactgaaagcagaaagaataattaagaggcagatgtagaaatctgaaagaagtaattgtgaaacctttggccagtacaaaagcaacagagaagagggctgtgttcaagaggccatggtgaggataaagctggtagggagcatagtaaggatgaagggtactcaggatggtgtcacaaatgctggcttgggcagctgcatggaaaaaatggttggtgatgccaataaaaaaaataagaattcaggagtaatacaaaagaaagtagatatgagtggagggaaatcagaagtttgttctaagacatcttgaatttaagatccctttaacaaagacctgcatactttgagcaaaaatcaaatgaacaataaatatatttgtaaagaatggtatgtagacttagtcaaaccatagtcgtgttgtaaataaatgtactagaagtgcttgctattttatcgtattttgttttaatatatgtaactacttctctacatcttgattttcatacactggcatttctcaaggcgagctttgcttgtacagcttaattcctaaatgatgaaaagcttttgttgctctctcctgctaagggtttgttttggctggatttggcaaacactcacttcttcaaggaagctcacgaactctgctttcttaacccccaaaatagtattcatctcataatagatttgcgtaacgttgctgcccttttctaagagtaacatcttacaaggtcatctgctatttttgcatccaatttgctatcacatatttttttaaagtgaagtgtggcttttgtctgcaggatgtgagagttttgttttgtttttgaaatgaagtctcactcacttttgttgcccaggctggagtgcagtggcacgatctcagcttacttcaacctccacttcccaggttcaagcgattctcctgcttcagcctcctgagtagctgggactgcaggtgtatgccaccacgcctggctaacttttgtgtttgtagtaggacagggtttcaccgtgttggccaagttggtctagaactcctgacctcaagtgatctgcccacgttggcctcccaaagtgctgggattacagatgtcaggcaccgcacccagctggatgcaaggttttatcaaatctttgtagaaactgtatttttgttcttcgggattgattattccaggataaccctaatcgttaatgacacttggatgtgattagactttaccaaattcatcaaaggctactgaataaaacagaaaactatcttgaacactggtgactgtgaactgtttttggaggaactgttctttctaaccacagttgataaatacattatgtggttttcaaaatatcacctcaattatttgcacatgcaatgtaattttgcaaatactaagcaggtagctagtcttaatgattgtatcaaacgatcacgttgaaagtgccagacagctgcaccacatttgtaaggagggaccatgaggagcatagaattgtagcctctgttgggcttcttaaccataatagaatgcatcacctcccattaaagctatatttaagaattgtgttctccttcatgtttatttttccggactaacaagtttctcttttgactcattcctaacaaacagtgtagtcatattttccacatatccacaaataaagttacaacttgaaaattaacatttggagttgatgttgctacaaacctaaaaagagatgcactttgtgattcaccaccaatgtgttaagcctcaaatccatcttcacattcaattaataactccctttctttgtaggcaatttaaacaaagtatagtaagatctacaactgaaaaaaacaatctttctaccttcagttgcagataatttggggaggaatataatttcaaagaacaagagagttcttggaaagtgtgtttccacatcggaggtaaaatagtttagtaagtcaaactggtagttaggagggaggaattgtggagttctgctgctccttgatcttaaggaagtctttggacttaccccatgtgtgcacaggccaggaacctcctgtacctctgacacacaggaactagccttgtagccaaagagtttcctttctccccacactgtttgtccgaagctggtggaataacctgtttctcttttagagtagataagatcaggctgaatagagaaaaccaagaatgtttgggatttcactgcctccttcaaaactagaaagatgcttaacagtctgctaaggttaaaacgaggtaaaagcccattttgttttaaaaatatttaacctatgtttaacaagtgttcatttgtgatattacttattaaattgttaatacttttataactgcagtaacagattataaaaaggcaggtcattttctctcagtggatcagacaatagtatactacatatacatatacaaatatgaatataaatatatacatttacatttttatacttttttaaatgcaaacaaaagaaatagattaagcagagctgacatattcataagctaaacgagcgcatatattgaacactttttttctgtaaatattggttcactgttaacttttttttggggggggtcaattagaaatgtttattgggtacccacttagaagtaatagttgtggtatgctgtcccaaggcttatgttctaaagaattcagtaagctttttttcctcattatttaaaaacaccttttcactgggtaagaatctgatgaaatggcttcttagccattagcattggctgggggcttcctgcctcacacaatggcagactctactcagcagtgacaagcagcagcccctggacccgcctgcatgtggcacccagaggcaggtttatctcctaccctctgggcaagcaagagaccagtaaggaacaggcttccatagcttgttattgatgtgcatgatgtttcagggttcagaattgtctatattgagtcactccttctattgccatccttgtaaataaaggaagacattattacaatggaattatggtgctgtattccctatggaatcatacccagctgagctgagtgagtctgatattggctttctttgatctcaaaaatgaaaccacactagtttgcaaggttgctcctgcatatgtagcaaaacagtagactttctgctttggtcattccagcagtgtgtgggaaaaccatgcaaaaatgaaaagtcatttctttgtgtatatatggtatcagctggaggacagtatggccctatattgcagttgtcacagttaaaagtgacccagtggctgaggcctttgccatgaaggatgctgctctgtttggtgtcagccttttctttaaccagtcctagtcagaatcaggcagaattccctgcatttgcaaggctgtgtctgtggcatggcacagctcccactcttggttgtggtattttgtatccatgttgttgaagctccatttggtcctgttcagaagagtgagccttcatggaaaaaaggaacctttttccaagaagagaaattaaaaactgagttattctgagcctgtagcagaaactctgatgttcaaatatgtttgttgcttcttcatttcccagactctgagtaatataattacatgaattcggattgtccacataaagaaaaaaacacaaaccttttcatcttctgtctacctaggctggaaatgaaatgggatatttagtccagataatagctgtaaaacataccaggcatcccattgtatatgttgtgagcagtgttgactgtgatggtcattacgtgatgccaaggtcaggttttagatctcacggagcaaaaagaattttgagcatcttgaacatcatctgctccatcccccttatttgaaagatgggaaaattggttttttaaaaaaattaagactttgggtttgaataatggacttaatacattttcaaagctgatttttcaaactttaccacattttcatttatgaggcagcacttaagattcatcatgcacgactttctgtgctgatgtgctaatagtcttccttcttgtttgagaagaagagatgctactttctgctccatcctatgaaacacaccacctgcttcaccaagctggaatgtggtatttttccactgaggagtacgcttgtttttgcaggcagaacacagcagtgctgtttgaagacactgatgatggcaaaggatcaaaggtgggaggcgatggcaggtggcagcttagggagagatcaatgcaaccagtgtggtgcattgctgtctgcagacgtacaggagccaagtgagaatcctagggtgagggaggacaattaaaaatcaaagtcaggcatattttcatgtaaatctgaccatgctaggaaataacagggcacttttaccataatcagaattatgatcaatcttggaaaatgtgatgcttaatttgataggtagaacaccaaaccatttatctttgtttcttattcctgtgccttttggacactaaaagcaaatgaacaaattttgttaaaattcatgagaaagaaaaaaagtaaaaatcctacagtgaaaaaaagatatctagttttgtatgttcattccttgactttcagggactttctacatttctcttaggtaagtgaaattattcccaagtaatgtttcctgttatctaagaaaagatgttagctcaaggctgggtcccccataattccagaattgataaggcagttgatggctatagtgacttgtcaccaaagaccctggaattgagtaggtatggattccaggttgtgtgcttgggaatatgatgcagtatcttaccaaaaaacaggaattttcttgctccagtttgttctccatgttccccagagctacagcatcacaagctagaagtgctagggaaaagcaggggatgactacttaaaaggcaataataattttgttaagtgacgagatgggtccccaagcttgaaacttgcacaacagtcaactaattggcctgttgatgaaaggtaaggttttatgtacctagtccttgcctacttcaggggtaagatatttaatttttacagtttgataatgacatttatagttacatttgagtagcattctaaaaggaagagtaataaaccctagtagtcactaccatttgtctgcaatgatgattagaaataaggaattaatagaaaaatcaagtagtataccacaggtccctcaccccaccaatctatgatgaaattttcagccagatgaacagctttgcatttttggtgttaaaatggctttttttttcttcaacttctattttaagttcaggggtacatgtgcaggatgtacaagtttgttacagaggtaaacatgtgccatggtggtttgctgcacagatcataccatcacctagatattaagcccagtatccattaactattcttcctgatgctcttcctcctcccacctcccactctgacaggccccaatgtgtgtttttccccaccatgtgtccatgtgttctcatccttcagctcccacttataagtgagaacacgatgtggtgtctggttttctgttcctgcattagtttgctgaggataatggcttccacctccatccatgtccctgcaaaggacataatctcattcattttcatggctgcatagtattccatggtatatatgtatcacattttctttattcagtctataattgatgggcatttaggttgatttcacgtctttgctattgtgaatagtgcttcagtgaacatatgcatgcatgtgtctttataatagaataacttatattcccttgagtatatacccagtaatgggattgctgggttaaatggtatgtctgcttctaggtctgtgaggaattgccatactgtcttccaccatggtttaactaatttacactcccaacagtgtaaaagcattcctttttctctgcaacctcaccagcatctattgttctttaactttttaatagccattctgaatggtgtaagatggtatctcattatggatttgatttgcatttctctaatgatcagtgatgttgaggttttttttcatatgtttgttggccacatggatgtcttcttttgagaggtgtcttttcatgttctttccccactttttaatggatttttttgtttcttctaaatttacttgagctccttgtaaactggatattagacctttgtcagatggatagatggcaaaaaattttctcctattctgtaggttgtgtgttcactctgatgatagtttcttttgctgtacagaagctctttagtttaattagatcccatttgtcaatttttgcttgtgttctgattgcttttggtgttttcgccatgaagtctttgcctgtgcctatgtcctgaatgttattgcctagattttcttctagtgattttgtaattttggctttacatttaagtctttaatccatcttgaattaatttttgtatatggtgtaaggaaggggtccagttttaatattctgcatatggctagccagttctcccagcaccatttattaaataggaaattctttccccattgcttgtttttgtcaagtatgtcaaagatcagatggttgtaggtgtgcagtcttattcctgagttctctattctgttccactggtctatgtatctgttcttgtaccagtaccatgctgttttggttactgtagccttgaggtatagtttgaagatgggtagtgtaatgcctccagctttgttcattttacttaggactgtcttggctatttgggcttttttaatccatatgaaatttaaaatagttttttctaattctgtgaagaatgtcaatggtagtttaaagggaacaggattgaatctagaaattactctgggcagtatgaccattttaatgatacggattcttcctatccatgagcatggaatgtttttccatttgtttagtgtcctctgatgctttgagcagtagtttgtatttctccttgaagagttctcacttcccttgttagctgtattcctaggtattttatttttttgtagcaattgtgaatgagagttcattcatgatttggctctctgcttacctgttgttactatataggaatgctagtgatttttgcacgttgatttttttttatcttgagactttgctgaagttgcttattggcttgagaagcttttgggctgagacgatgggattttctagatataggatcttgtcatctgtaaacaaagataatttgacttcctctcttcctatttgaatacctttatttcattcttttgcctgattgccctggtcataacttccaataccgtgttgaacaggagtaatgagagggggcatacttgtcttgtgttggttttcaaggggatgcttccagcttttgcccattcagtatgatattggctgtgggtttgtcatatatggctcgtattattttgaggtatgttccttcagtatctagtttattgagagtttttaacatgaagtgatcttgaattttatcaaaggccttttctgcatctattgagataattttgtgttttttgtctttagttttgtttatgtgatgaatcacatttattggtttgtgtatgtcgaaccgaccttgcatcctgcagatgcagccaacttgattgtggtggataagctttctgttgtgctgctggattccgtttgccagtattttattgaggatctttgcattgatgttcatcaagaatattggcttgaagttttgtttttgtttttgttgtatctctgccaggttttgatatcaggatgatgctggcctcatagaatgagttagggaggagtccctccttttcagttttttggaatagtttcagtagaaatagtaccagctcttctttgtacctctggtagaattcatctgtgaaaccgtctggtcctgggctttttttttttttttttttggttggtaggcgtttattactgcctcaatttcagaattgttattggtctattcagggattctgtttcttcctggttccatcttgggagggtgtatatgtccaggaatttatccatttcttttagattttctagtttatgtgcatagaggtgtttatggtcttctctgatggttgtttatgtttctgtggggtcagtgttgatatccctgttatcatttctgattgtgtttatttgatttgtctctattttcttctttattagtctggcctggccatctatccattttattagttttttcaaaaaaccagctcctggattcattaattttttaaggagtttttaatatctctatctccttcagttcaactctgatcttggttatttcttgtcttctgctagcgttggggtttgtttgctcttggttctctagttcttttagttgcgacttagttcttttaggttattaatttgagacctttctagctttttgatgtgggcatttagtgctataaatttcccccttaacactgctttagctacgtcccagagattctgatgtgttgtctctttgttctcattagtttcaaagaacttcttgatttctgccttaatttcattatttaactaacagttattcatgaacaggttgttcaatttccatgtagttgtgtgattttgagtgagtttcttaatcttgagttctaatttgattgtgctgtggtctgagagactggtatgatatcatttcttttccatttgctgtagagtgtttttacttctgattatgtgatcagttttagagtaagtgccttgtggtcatgagaagaatgtatattttgttgttttgtagtggagagttttgtatatatctatcaggaacacttgatccagagctgagttcaagtcctgaatatctttgttaatttctgtcttgatgatctgtctaatattgtcagtggggtgttaaagtctctcactattattttgtgggagtctaagtctctttgtaggtctctaagaacttgctttatgaatctgggttctcctgtattgggtgcatatatatttaggatagttacctcttcatgttgaatccgaatgctttaccattaccattatggaatgcccttctttgtcttttttgagctttgttggtttaaagtgtgttttgtcaggaactaggattgcaacacctgcttttttctgtgttccatttgcttggtacattttcctccatccctttattttgagcctatgtgtgtctttggccttgagatgggtctcttgaacacagcatactgatgggtcttggctccttatctagcttgccattctgtgtcttttaattggggtatttagcccatttaagtgtaaggttagtattgttatgtattaatttgatcctatcatcatgatgctagctggttgttttgcagacctgtttatgtggttgcttcatagtgccactgatctgtgtacttcagtgtgtttttgtagtggctggtaacagtttttcctcttcatatttagtgcttccctcagaagctcttgcaaggcaggcctggtggtgatgaattccctcagcatttgcttgtctgaaaaggatcttatttctcctttgcttatgaagtttaatttggccggatgtgacattctgggttgaaaattttttctttaagaattttgggtattggccctcaagttcttctggcttgtacggtttctgctgagaggtccactgttagtctgatgggcttccctttgtaggtgacctggcctgactgtccttaacattttttctttgatttcgacctttgaaaatctgatgattttgtgtcttggggttaatcttctcatggattatcttactggggttctctgcatttcctgaatttgaatgttggcctgtctttctaagttgggcaagttctcctggatgatatcctgaagtatgttttccaacttggttccattctccccatctctttcagatacctgaatcagtcataggttcagtctccttacataatcccatatttctcagaggttttgtttattctttttcgttattttttctctgttcttgtctgcctgtcttatttcagaaagatcatcttcaagctctgatattctttcctctgcttggtctattctgctcttgatacttatgattgcattgtgaagttctcatgttgttttcttcagctccatcagactggttatgttcctctctaaactagctattctggctatcagctcctgtattgttttttttatgactcttagcttctttgcattgggttagacatgctcctttagctcggtgaagtttgttgttattacctgctttctgaagcctacttctgtcaattcagccatctcagcctcagcccagttctttgcctttgctggagaggtgttgcagtcatttggaggagaaaaggcagtctggctttttgagttttcagcgtttttgcattgattctttctcatcattgtgggcgtctctacctttgatctttgaggttgctgaccttaaaatggggtttttgtggggtcttttttgttgatgtcattgtcattgttgttttctgtttgtttttcttttaacagtcaagccactgtcctgtaggattactgtggtttgctgggggtctgctccaaaccctagctgcctcagtttttcctgtacctggaggtaccaccagtggctattttgggcacttgtatcagtcaaactcttaaaatcccttctacctggacaatgaagaaacatcaggatgcatcattaagtattggctagactcaagggaaataagcctttacttcagagttcaggtctaaaaattaaaagagaaattcaattcaattataaaacaatttatgacttaatacttcagcatattgcaaaataaatattgcataattattccttgtaactttttatatgtattattgtctagcatcctacaatttgaaatattaacagtaatttccagttcctatggtttgaatgtttgttcatttcaaaattcatgttgaaacttaatccccaagatggcagttttgagaagtgaggcctttaagaggtgaatggttaattctatttatggatcaatggattaatgggttaatgaattaacagtttatcacaggagtgggactgatggctttataaggagaggaagacagacctgatctagcacactcagactcttttgccatgtcatgccatgagccactttgggactctgtaaagagttcccaccagcaagaaagccctcaccagatacggcccctaaaccttggacttctcagcctccataactgtaagaaataaattccttttctttataaattattcagtttcaggtattctgttttaagcaacagaaaatggtctaagacagaaaaaggtactgagagaggggtgttgctgatatcaaattcctgaaaatatggaagcagctttggaactgagtaatgagcagaggcttggaagaatttcgaggagcaggctagacaaagcctagattctggtgaaggcttagaagacaagaagactagggtaagtttggatcttcttagagactgggtaagtgatcatgaccagaattctgatagaaatatggacaccagggccgggcatcgtggctcacgcctataatcccagcactttgggaggccgagatgggcagatcacctgaggttgagagttcgagaccagcctgaccaacatggagaaaccctgtctctactaaaaatacaaaattagctgggcgtggtggctagtgcctgtaatcctagctacttgggaggctgaggcacgagaatcacttgaacctgggaggcggaggttgcggtgagctaagattgtgccatggtactccagcctgggcaacaagagcagaactccatctcaaaaaaaaaaaaaatatggacactaaaggccattacaatgaggtttcagatggaactgagaaacaaggtattggaaacatgtgtaaaggcccttcttgttataaactgacaacttggctgcattgtgtccatgtctaaggatattatggaatgtagaacttaatacacctactgtatatccacaaaaattaaaaattttaaaaattaaaatgaaaaaaagagcaaaaaaagatccatgaattaggatatctggcagaagaaatgttgaagcagtaaaacattcaggctgctgcatggctacctttaaccacttacattaagctgtgagagggaaaaattgacttaaaatggaatttataatcaagaaagaagcaaagcagaaggatttggaaaactcttagcctggccatgtaaagagtgaaaaaacatgttcaggagaacgtgctttttttttcagtgacctttactgaggagatcagtacagagagaagggatgattaagagactagaagaaagaccctgaagacattttagatatctttgaagctgcctctcccatcatgggccccagaggcctaggagggcaaaatagttttgccagacaaatccaggaaaccctccgtgggcttcctgcccagggtccttgcaggtctctgctccctgcattctagcctcatcactccttgaccaccccagctgtgattcaagtggcaccaggtatggctcaacctgccactctgaaaggtacaagctgtaacaaccttggaggcatacatatgatgttaattgtgcaggcccacagaatgcaagagatatggaggcacagcagctttcacctagatttcaaagaatgtgtcaagcagcttgtggactcaggcagaagactttttgcaggggcggagccactgcagagagcccctactagggcaatgccaagcagaaatatgggctccatcttgccatagagttcctaccagggcattgcctagtggagctgtgagagcagggccaacaccaagaccccagaactataaagctacctgtgtgcagtgccagcatgggctgaacccaggaatgccatgggggcagagctgcccaaggccttagagccccaaccctcataccagtatacataggacactggacgtggagtcaagggagattattctccagctttatgatttaatgtttaccctcttgggcttcagactagcttggggcctgttaccactatcttttgggctattccctcctttgcttgcttgcttgcttccttccttcctccctccctccctccctccctccctttccttctctccctccctcccttcttttccttttcccttccctttctctttccctttccctttctctttccctttccatttccctctctctttctctctttcatttctcttttctttcttttttcttttcttttctttcttttctttcacagtgttcatccaggctgatctcaaactcctgggctcaggctatccttttgccttggccttccagtgtgctgggattacaagcatgagccaccacacccagtcttcttccttttcaaatgggaatgtccactctatgcctgtcctgccattgtatcttggaagtagataacttattttgatttcacagatgagactttggacttttgagttgatcctggaaccagtgaggactttggagctatggggagggaatgaatacatttgtttgtgagaaaagagtttatttgcggggagggcatgggcagaattctatggtttgaatgtttgttccctcatgttgaagcttaatttccaatgtggtggtattgagaggtgggaagatgatagagatctctttaagagatgatagtgtcatgagggctctgccctcaggaatgggttaacctattagtggattaatgggttaatgagttatcacaagagtgagactgctggctttataaggtgaggaagagagacctgagcttacacactcaggcccctcaacacgtgattccctgtgctgccttacgactctgcagagagttcccaccagcaataaggctgtcaccagatgtggctcttcaaccttagacttctcagcctctacaactgtaagaaataaaccccttttgaaaaaatgaattacccagtttcaagtattctgttataagcaacagaatatggactaagacacccggtttcatttggtttctagctaaaggtcagtttttccaagaagcaaatagctatgtttctccatttaaagggcacaaattttggagcagtgaaaatcagttgttttcaataagtgattagtatcatcagcaccaccaagccccattctacccacaagaggcatttggaaatgtctaagggctaattttagttccacaaagtagtcctgcacaatgtgtaatttcctactacaaatgccagtgcaccctcattgagaaacgttggttgatttcatatttatcataaaatggtggaataacagttgaacataatttcattgttatattagctacagaaatactgtttttttttttttttttgagatggagttcccctcttgttgcccaggctggagtgcaatggcacgatctcggctcactgcagcctctgcctcctgggttcaagtgactctcctgccgcagcctcccgagtagctaggaatcagaacactgttcagatgcagtctattgaggcattttatttctttttttttaacttaacataatgtaaaagcgtattttcaatgttccagtcagtcctggatatatttggctgatagtttaaagaaataaaatcttcctacagggttcagttattaaaatagaaccaaccacccactcattttattacattctgtggaatgtttttggatgacagtctaagtatcttaattagtctccagctgatttataacgccttgttttatgtttcacatttaatatctcaaaattacaagttacagtgccatttttattccgtgccattaaaacagggtgaacaatattttttaaacagaaaaaggcaggttccattcagaaacccaaaggtcattcatttgcattgtctcttcatttttaggtgctggtgcttcttgtctgtcccactgagtctctgtgttgttattcatctaagctctgtgtgtgcgcttgtgtgagggcattgggatgggagattcccctacagctggattctgcatccaggaaataaaatctgtcgctcatctcatggtttgaacacacacttgctcaatttagggtttatcctatgcacttctgtctctgtgcaatgcttcatgtaccatacatttatactgtggccatttgtttttgttttcataaacatgtacatgaaaaagttcctcagaattctactcatggcatcatagaaaccagacagggaaaataatcctagagtttctctccaaacctaagcctcaagtttagttgcaattttgtcattttacacatttaccatcaatggttcacttattcagaatggctaatttcacatccacttgttttgttcccaggcacagctttgtgtgtgtccaaacagaaacaaaatctgtaattaactgcatttgtttgcaaagatcttggcagttttactgtttgatctccttcatctagaagctttagttatgttgcatagcttttttcctgagaataagttagacatattggaaaattaaagtaactttttggtttctttcaatgtgatatcttgctgcccaaaagagctgatttgtctcatgaagagtatttttatattgggtcgttgtcttttatgtgagctgtttcctggaaagatttttgaaatgttgagctacaagattaacagcagtttctttggtgattaacctgagctattaataattgctctttttacatcattgatattaaaatcaaactgtgaatgattactatatgagtgtctctataaagccaacaaaattgaagaagctcgagtttctctcctaaagttacttgttttcttaagaaacatatctgtcaggcaaaaagtcaaaattcaccaaaataatattaagatttcctgaagtaacaaatttctcttcctctatggttatatatacatctcgtttattcatagtttcattgcctaggctctctctttttttgtagctttgttacctcttaattttgtccaactaatgtcaattttcttgttatttataacaagtataaatttcagatgtctgtacaatgatgcctgtttatatgcagcacttcttatgatgtctttgccatgttatttggaattctttcatccccctatttgtactggataccattcaatacatttagcaagtaggaagacatcatttaacctcttccactaatgagaaggtggccattgcattgtcttagataagcagttgctttcttcttgccaaataaaaaataacttctcagttttcattgtggtacatagagagtggtcaataaaattaatgaaacctccttaatttattgtagcattcaatattattggtgattttttgttattttcttatgcaattaattgtttttattataatgaaatatacagttattttaaataatttgtaaatatagataaagaaaggaaatagaaagcatccataaaccagccgtttggtttatggatactactattaatactttgttattattctacccatttctttatattatgctttacataaacagcttacttttctaaataatgggcttacatggtacatgatgttttgaactttttaatataataattaatatattatgaatgtatttcatgaatatctacatctagagcataattttaatgaatgaattgtattatagcatatgtatgtgccacttttttggggtttatctctcccatctgagtcttgagcccatcatatactaaacatcttcacttggataacctacagacccatcaatacttggtgttctccagataacatgtatcatcttctccacacgcactttttctcccgtgttcccatgtcaattgctccttattgctcagtacaggaagctggacatcatctttgatccacactcccataccccaccttaaatcagtcaccacatcttaggttattcaattccaaatttctctcaaatccattgctcctcccttgtccctacatatgtgccatttttagtcagcaaatattctagtagacattttggttgttttatgtatttatagttacaaatagcactgtggttaactgaattagttatatattgctgtgtagcgaacaaattactcccaaacctattggattgaaacaacatgcatcagtttctgtgggtcaggaatctgggcatggcttagctgggtcctccgcttcaggatctcttgcaagtctgaaattaaagtgttggccagggctatctgaaggctcaactagggataaatccacttctgagcacatatgattgttgcagaattcatttccggaagagtagttggactgaggtcctcagttcttaggtggctgtcagctggaagtggctgtcagttccttgccatgtgtgcctccccatataccagcttgcttcagcaaagccagcaagaggaaacctttactcctgatgtgttaaaaggatctcatgtatttacaatgctagggagagaatctgctagcacgacaggagtcacagtcttttttgtagcctaattaaagaaatgacatcccatgccatcaacttggctacattccctttgctagaagcaggtcactaggccagcccacactcaaggggaagggattatatcatggtctgcaaaccaggagcagggatctttgggggtcatgttagagtatgcccccacattaaccatcctgtagccaagccttgtgtatattcttacatatttccaagtgttaaacctgagaagaaatattcctaattaaagggtttgcatactttttgggtgttctaatgtcttttgccagaagttgttcaaatttgcatttctaacagcagttacactcccaccagctcagagagcctaatcagtttttctctttctctgtttaaaatcttgttcaatctagtaggggaaaatgggaccaccttgaatctctttcccatgctttcatggtgccgagccttccagaacttctacccactgccttttcctttctgtctctattctttacttttctttcctacctccacatcagatgtgcccccagggctgtgcctttggtcttctatttttctttctccagtcattcagcaaatgtttgtgggccaacactgagctcacctgctctcaagagtcaggcacccattgtgagctgattcccaagactcaagtccagcctaatctttccctgggctttacacccattcttccagccacctacaaacctctctgcatggatgtcctgagaatatctccaacttaatgtacctggctgaactcatcacttccttaccccttcctccttccagaaaatgagcttcccctccttgctgttccctgctcccttgctgaaagtgctgccatcattttttttttcagcccagataactgtagacagagtggagacttgtcagcagaagccttggctgcttctccctgcacagagtaaggaagtgttttgctgtgtataggtaggagtcacttttggaagagaggagctcagtgagtcatgttctccaacaaatcagagtctgctattaagactgtggttcccacaggctgagattcagcagttatctccccactaaacatgcccctgtgtgagccaccaaacttctaagcatttcctgcacctgggactgcccactggtctgataatttgtgactctgggccctgtatttttcacctactttgattagagatgggaatctccttccccctttctgggcagattcctaaggatctgcagggacagggatggctagtgatacactatcactccacctcacctttgcatgcattcttctctcacaagtgcagagtatgagcaggaggttcttgttgattatcctcttctgcccaaaaagtgaaagtaggcttgtgcctggaaaatatccttttacattctacactctcatcctaattccattttacctgaagatattagtcagaacactcattttcttactcttgataagctgtaaggatttcatgcatttactgaaccagctccacatcaattcagcaggatttgctatagtgctcccttttctctctccctcaccccaagttaatattgcattttaaaatactggggacactttcttccttcattcaccctccctgccccctgagacatggccctggcaatgtgcattttcttccaccgttttcataagggtctctcacctgaatttttagtaaactctttcttagttgtctgtgctgccttcaacatttcctcttctcactttgcccctcctccctttttattttttattgatgtcccagagcatccttcaataaacttagcttcatgccctcagaacttcttaaccctcagattgcccactctgcccagtgtggctccactcaatctgtgtgtcaccatctcaccccgggacctctgccacccacctttcagctggtcttcctattcccacctcccgctcttgcactcctccctgggttcctgctgtgctggccttctcccactagtatcattgtcacctgatcactttcttgcatatagtttcccatttcctgtcattgttttttaaaaaagtctgtaaactggtcccacctcatgtatgtgtgtgtgtatttacataggtgatttttatttccggtacctttctaacacaccatctgcactcatcaccagtccttggccctcaggcattcctaactcatccttttcctattttcccttcctgaacactcatcttccttctctccactgatccatgtcctccccataaccaaggtccagttcagggccaaccactgtaactctaggccacggagtcacaaccctaactgcacattaaaatcccctgaggtgttcttaaaataatattttagctgggcccagtccttgcacagttgaaacttaaactcttgggtaagactcaagcatctttgtttttttcaaaatacccctaacccggaggatactgatgcacattgaagagtgagaacaacagcttctagctgacacagcacactggaaatgctgtggtattgataaccagtgccacacacttccacaccaatcttttcccaccttgcctacctttgttttcttaccagattctgaaacgcatacttgtaaatatctgttcatggacaagtcattggattttaacgtacaaatatcctttctctgactatttcttcttgacatctttcattgagtataatcttatctgcatcaaacagaaatggaagcataaacctgagatactggcagaagctttgaaggtacttacttcattttattgcttattgttgaagttgaatcatgtgttatttttaggggtttttttttgttattagtttttcagaggacagagtctgactctgtcacccaggctggagtacagtggttccatcatagcttactgcagcctcaaactcctgtgctcaagagatcctcccacttaagccttctgagtaactgggactgcaggcatacctggccaattttttaaaaacaattttgtagagacagggtctcactgtgttgctcaggctagtctcaaaactcttatcctcaacctatcctccctctgtggcctcccaaagtgctgggattacagacatgagccaccacacccagcctatttttagttatgctctttgtagtgttcttgggtttaccatctttaacaattaatttaacttagcacattacaatacctcatataagttatgtttcatctttgctgatatatcaatgtaagatggtaactaaattagacctcataatcagtagctagttcttccaccaccagaccatactaattatgctgtgacactgtcagaagtgcatgatgatgtccacactgtacctgtttttaatcatttcctcactttaaaactgtcatcaaaaatgctgtttttctcttttgtagaatcattctggtttcttcctaataagtgtttttggagttgttttcttatggtttctcttggttttagcattgatcattgtaggaaatctaattgaaattaatggtatatatcatctttttactctttaacactttgcaatgctttaataatttttaatgaaaatagtatattacttttaggagcacatatttacccaaatacagtcgatagtttttcgaagtagaggtccttgggagatctggtttaagaagtagagaaaaatgggcagtggttagtacatagttgtttttaagtggggattttgaaattcttaagggtacgcaacacaatttttatcagagttggtttggagcatgcagtagaaacctgactaaagagtggcttaaacaaatttgttttccccccttcaggtaataaaaaatcttaaagaaaccactgcagtatatgcagtggctcaggtgtcgtaaaggcccagactccttgtgacttcatgctccgccttccttcataggtggctgtcatcctcatagacctaagatcctttctacagtttccaacagcacactttttgccaggcagacacaagatgaaattcagagaacaaaaggtaaagaattgagtttgcccttttaagcagctttccctgaattctacccctatgccttccagttacatctcattggacagaattgtcacttgaccacttttatcacctaggagatataattttttagctgcaactattgccatcccaaataaacgaaacattctgttagaaagaaagggagactggttatagagcaggtagctggtagtgtctgccattctagttcattgagcattttaatttttctttatgatttgttgttaaaagttctgcattttctagtagtaaaagattgattaactcaagaccagcatttgctaatttttataaattataaatgattttggtttaaatgagtgaagttttattctgttggttttacctttttgtttataaaagtattcaactactctaattattgcaacactttttaaaaatcatgtcactgcatattgcatgaaattctgactatcatgtttggaattttattaataaaaataaaatatgtcataaatttatgctgcctggtgttttgattttgcaatttgcaaatatgcttgaaatcctgctaatatgggaaagtaggaaccggctaaatcataatggctacaatatggcaaagaaactgtttcctcctctcattggagtaggcaaattttagatggaaaattattgcagttaagattttatacaagataattttttaaaagaaataaattcctttataatttgtttttctccttacaacatactggtggtgcttttggggcattttaaattataaggtgcaatgtgaactgataacctaacttagttttgtactacagatctcagaagtaggaaggagggagagtggaactgagctgtgattattgtcaccagaaaatatactgggaaggggtaaacatgaggcaataaaaactcgcctcactgttaaaaaagaaaactagaaaattaaagaaatcagccatattgactcagctgaaatatatttttttcatttaaattcctgatgattttattctgaatagtttgtaagactataggtgcatgtttaaaatgcagttaccctccacaggatgttgggttgtgtttattaaaagcttagcataggaagcgctttgatctcctaactcttgtagggttttgtgttattgcttttctgagtaagaactcctggattgctggtgacatgtcggtgacatgattagacctttaaggtgagtgtgtgtgcacgcacatgtagatgtgcaaatgtacatatacacacgtgtgctctcatatgcataatttttgaagaaagaggtaaagagaaaaaatctggcagcatttctaaaaaaggtgttctgaattgcctgatttccttggatggtatcccagatgcttcctatcagatgaagtagcacatagagtacagcagatgtaaaatagtgcacaaaatcttttctcttcatgaggttattgcagtggttcaaatatttgccataatcttagcaattaaagtgtatactatccacctctgcttcaatcacacttattcaataaaaacaagcctcttctgtgctttagtatattttactaccatatttaacaactaacacggacttactaaaaatgtattctttttgtataataatcaggagtcttatttattcatttcttgataataaatcctgatcttctgggctatcagcacatgggcttagtatataagactgtttattttaaaacagctcttattacaggttcagactttttgctttaaatctgggctatcggtgagtccagtctctgacccagagcaggagtttccatcacaacatccaggacaagccattggtgattgtctgactgagcacacctatttatgatacagagttcatgacttttcaagaccagcacatttctctttatgataaagttttgatttgtacacagttttcctcatattaacttcagattttcttccatgtaagttacgtggatggttctgattgtgccctagggagcaattgcagactgtctcttctacatggcagtcactcaaatatttgaatacaattattatgtcctttctaaatatcttctttttcaaaccaaacatccttgtggaagtttgaagaaagagaggaatggtaggtagcagtgtagcagaaaattgttcaagtaaaaatcagtcggcctcagacagacacagaagctggatctctttagggttgtccagatagctgactgtagctcagcacttaagcaactcacatgaagagggactgtaagtgtagatgccttatttacttatttaagacagggtcctgctttattacccagggaggagtgcagcagcatgatctcagttcactacaaccgcggcctcccaggcataagtgatcctcccacttcagcctcccgagtagctggaactacaggtgtatgtcaccatgcctgactaatgtttgtgggtttttttatagagacagagtttccccgtgttgcccaggctggtctcaaactcctgggcttgagcaatccacctgcctcagcctcccaaagtgctgggattacaggtgtgtgccaccacacctggcctagatgccatgtttatacatatttatagatacgtgtatatatgtgggttagtatgcacacatatattttcttgcatcagccaagatggcctagaaacaataccccagtagcaagaagaacacccaccaactagaccttggtttttaatactattttctagtaaaagaaatcagggcctggaaaaatgattgattctaggaatgagtcaggaaatatacaggatgagcctggagaatcttataataccagaaagcagaaagtgaggaagtaaaaaacaaaaacaaacctcactgatggcaacatgtcaaaggagcacaagatctaacagaaggatctgccagtggctaaagctggggacagcttaagcaacaaagtaaagtagtattggatggttaacccaaactataaaataaatgcccatgagtccgtatgtatataaataaatgatttgataaataaagaggaaaaaatgggtaagtcaccttgcagaagaatcccaaataacttttgtcgatactcccacctcaaggaagtagaacataacccttcactttttcagtataggctgctcataatgaccttccaaagagtaaagtatgcaaaagaggaaaaaaagagtaaatacagtggagaaacctaacaaatactactttacccagatgtgatggaaataatgctttacttcttgtggttttcttcccaaaaacccatagccccagtgtaatcaagtgaaaaacatcagaccaatcccaattgaggtgtattctgtaaaatacttcaccagtactccttgaaacagcaaggtcatcaaaaacaaggaaagtctgggaaacatcacagccagcaagagcctgagggggcataaagactaaatgtaatatggtatccaggatgagaccctggaacagagaaaggacattaagcaaatcaaggaaatctgaatacagtgtggactttagttaataatgatgtatcaatattgtttcattagttgtgacaaatgtatctactaatgtaagataataggggaaactgcatgggggctgtatgggaactccacactatcgtctcagtttttctgtcaatcaaaaactgttctaaaaaataaattttaaaaaatgtttaaagataacttggagaaagcctagatgaccttgggtatggtgatgaccttttagaaacaacagcaaagacaaactccatgaaagaggcagttaataagctgtacttcgtcaaaattaaaaacttctgctctgcaaaagacagtgtcaagcgaaggagaagacaagccacagactgggagaaaatatttgcaaggactgttatccaaaatatacaaagaactcttaaatctcaaaaataaaaaaacaacccaattaaaaaataggcaaaagacctgaacagacatctcctcaaagaagacacgcagatggcaaataagcatatgaaaagaggttcaacatcatatgttattaggaaattgcaaattgaaacaagaaatcactatatacctattaaaatggccaagatccagaacactgacaacaccaaatgctgatgaggaagtggaacaacagaaactctgagtagttgctggtaggaatgcagaatggtacagtcactttggaagacagtttggcagtttcttacaaaactaaacatattcttatcactcaactcagtaatcacactccttggtgtttatccagatgaattaaaaacttatatccacaccaaaacctgcatatagatctttatagcagctttattaatacttgccaaaacttggaagcaatgacgtccttcagtaggtgaatggataaactgtggcacatccagaaatggaataccattcagtgctaaaaaggcaggagctatcaagccacaaaaagacatatggagtatgaggacagagggtgctcagcaaaaaagaaaagatatggaagaagcttaaatgcacaccactaagtgaaagaagccaatctgaaaaggctacatactgtatgattccaactatatgacattctggaaaggacaaaattgtggagacagtaaaaagatcagtggttgccaggggttggaggaagggagggatgagtagagagaacacagaggatttttaaggcagtgaaactaccttgtatgatgctataatggtgactctgcctgtcattaacccttagaaggcacaataccaagagtgacccctagtgtaaactgtgatctttgggtgataatgtctcagtgtaggttcatcagttgtaactgtgttgatcgatgtcggcagtgggaaaggttgtacaggttgagggaagggggaacatgggaactttctgtactttcctctcaatttttctgtgaacttaaaactgctctaaaaaacaaagtttattaattcaaaaatgccaataagaaatctatgatgtccccttcccccattaggcaagctgaatggaagtcacgttatccaaaggctaccccagttgctaggagaacatggagtcagaacaagaatggacttaagtcagttgctgggcttaatacctaggtgatgggattatctgtgcagcaaaccaccacagcacacatttacccatgtaacaaaccaccacatcatgcacaggtaccgctgaacttaaaagctgggggaaaaataaaaagaatggactaaagtcacataatttaaatgtgtgatggcttcaaactcctacagttgaatgttgtggtctttcttagatggacaggccttctcttctggacagggcaggctaggcaaggcaaatgtttgcttctgtcatcctacttttgctcctgctccctgtggacatacacacctctgctgaacacacatgttcagtctggttatctggtttccaggagtgcaaatgtatagactttatccatttatagccctgacccattatgctttgattttgtagtttaactttcaaaccatgccatttctgtggtttccaagtacagtgcccttgaacaacacagttttcaacagctcagatccactaatatgtggatttttttcaataagtgcagtcggcactccatatgggcgggttccatgtccacaaccaaacaccaatcaaaaatacagtattcacgggatgcaaaacccacatagagggacgacaggaggattttgtgaggattttggtatccttgagggtgggaagcatcctggtgccattcacctgcgaataccaagcagcgactgtacttcctcaaaagcactgctgacaacccaagatccctcagatgtccttaatgaaacccttttttcaggctctttcttaccctggtcgtcctcctcttctggttacactcccattactaaataccattcctactattgtatattaacgttccttttaaaacctagtgcctagaatagcagaaggactctacatatcatgtgattatttcagagtacagtggactcttgtattcatctggacatcgtaattgtattaatgcagccaaaattatattaagtacttcagcagccccatctccctagctcttgttgagactctagttaaaaacatccctgaggccttttatcctctgaactgctgcatcacgcagctgcttgtaaagccgtctctcctccaacttgtgcttttataattgaatctctttaaatgtaaatgcagacaattacatttgtcctagttaaatttcatcttgttatttcgagcccagagctccagcttgttgagatcttattgaatcttggttctgtcatggatttctgttatgcatacttgcttgtgtctgcaacccaggtagagaggcttgaaaataaatatatcccagctgcgctaactcaaagcaagaggtactgagagaagacagcagtgatgattgctcggggatggggaaggcaactgcccattctctaagcagtaatttcctaatatttttggtggcagttcacagttcaacattatgagatatagcaaaagccatttattgctaattacatttaactgatgtctatgaaggactattcctatacattagagtgaatttgagactatctccatcattctccagccattcttcagtgggagaaaaacggtggaattaaactagtggaaacaaggctttctcatctagtcccaatccagtcgataagctgtgtttgccaatcactgctccagcacaatggccctcagtttatttttaagtctatggcatgcctgaaggaccatgttcccatgagtgacacccttctgtaaatgtggtggcacattatgggctgctgttttagaagagactgccaacttgctggggattatcctggtgtattcctttctctccggctggttcgtgacatgtcactggcttgaaaattctcagccctaacatttaaagcagcgattcgcaaagtgcagcacttttaagctgaggttggcaaactgtggcccatagaccaaatctggttcaccacctgtttttagtacatcactaaatggttgggggaaaatcaaaagaagaataatatttcatgacgtgaaaattatatgaaattcaaatttcagtatgcataaataaaatattgaacacagtcatgcttatttgtttatgtattgtcattggctgcttttgcaaatagtagcagaattgagtagctgtgacagagactatatgacccacaaagcctaaaatatttacagatatggccctttacagaaaatgtttgcccactcttgtgttaatgggatggtttagaaactgtggatttttgagccccacctcagaccagataaatcagaatgtctacagatgggggtccaagaatgtacattttaagcaagctcttgaaattcacccctaggcgaacagtgagacaagactaatgatcatgagctaaggatatgggaaaggaaaagattctgccctactttttctgccgaacttattgtgttttaatccaacgctgtaattttgctacagactgtataaattatgtggatcagtttctaagcacttctctccaattcagctctcttccaaacttttctattttgtggaaagaaggttgtattagtttcttagggctgctgtaacagattatgaactgtgggttgacctgaccaacagaagtttgttctttcacagttctggaggccagaagtccaaaatccagcaggggtgtgctccctcttgggggtctagggaaagaacccattctttgcctttttcagcttgtggtggctgtcagcgctcttgacttgttagtacctcactgcagtctctgccccagtgatcgcattgccccttgctcttctctgtgtcttatttttcatctgcctcaaatcttcctctgattttctcttataaggacatttgtcatgggacctggggctcacacggctaatccaaatgatctcatctcaagatccttaatataattatatcagcaaagctacaaagacctcttttccaaataaggccacattcacaggttttgggggttaggacagggacatctttttgaggccaccatccaactcaatacacatgccgctgttctcctcttcccccaacagccagtcagtttccaagtcttgaagattccatccgcttctcaagtcctacttgcaccattctgatctctttctgccataggaatctcttagaaatttctgacggtttcctactcttcgaaaagttcagaacatacttctaagcctgacatttagggctctctgcagtaatgttgccagcgtattttccatttctttctctttcttcttccctccatgtaccttgccctccagccacactgtgccacttgccgttgccctcactgctcctcccttctctctgaaccctctcacactgttccttcttcctggaacactggttgttcctccatccttatcaccatgacccctacccctgtatcacctaacacccagatatctttcaaagtccatctgaggtcctacctccccatgagagctttgctgctccttcccactagggatgaatctctgagccttcggcacctcacatggtatattattattattataatattaatattattattatatttagctattttgactgcaaatgtaggaaaattaacaaaataaaggaaattaagaaaagtaattctaaagtttagtaaagtgacagcaaacaagatcaacttttaaaaaagacggttatcctgtagagagtgactctagtttataaccagtaagaaaatataattttaaaatgctcagtagtgaagtagtgtaactaaaatattcttaatgtgaaatgtattattagtatctatgtgaagatgttttaaattttgagagacaagtgaagatgactaaaagaaatacatactattttcctttagataatgtaaagatgtcattctttatacattgattttaaggtttagtgtcgtttttatggaatattttaaaattttatttatataatagggtactgatcaaaattccaataagatgagcctcatcttccaagagataagactaggacataaaaggatttcaaaacttgttaagaataacccacaaaaattagctggatgtagtggtgtgctcctgtggtcccagctactcgggaggctgaggcaagagaatcacttaaacctgggaggcaggggttgcagtgagccaagatcgtgccactgcacaccagcctgggggagaataactacacaaatgaagataagacacatccaaatttaaaaggattatgtaaaacaactggcctggaattttttttaaatgtcatgtcataaaagataaaaagagacaaatgggagaggaaggaggaggaggaaagaaggagaaagagaaaggaaagaatgaaggagaggaaggaaggaagagggggagggaggaaggaagacatatattgaaagatgttagagatacataactaatgtaatgggtgatccctttttttttaaattttattttcggttcaggggtacatgtgcagatttgttatgtaagtaaacttgtgtcaccagggtttgttgtacagattattttgtcacctaggtactaagcctagtactcaatagttatcttttctgctcctctccctccttccacgctccaccctcaagtaggccccagtgtctgtcattcccttctttgtgttcatgaattctcattgtttagctcccacttgtaagtgagaagatgcggcatttggtttctgttcctgcattagtttgctaaggatgatggcccccagctccatccatgatcctgcaaaagacattatctcattcttttttatggctgcatagtattccgtgatgggtatgtaccacattttctttatacagtctaccgttggtgggcatttaggttgattccatgtctttgctgttatgagtagtatagtaatgaacatttgtgtgcatgtgtctttatggtagaatgatttctattcctctgggtatatacccagtaatgggactactgggttgaatggtaattctgtttttagctctttgaggaattgccattctgctttccacaatggttgaactaatttacactctcaccaacaatgtattaagtgttcccttttctctgcaacccaaccagcatctgttattttttgactttctagtaatagccattttgagtggtgtgagatggtatctcattgtggttttatttgcatttctctaatgatcagtgacactgagcttttttttaatatgcttattggccatatgtatgtcttctttagaaaagtgtctgttcatgtcctttgcccactttttaatgttttctttcaatttgtttaagttccttatagatgctggatattagacttttatcagatgtgtggtttgcaaatattttctcaatgggtgattcttgatcagttttttaagctttgaagttaattatgggaatattgaatttcaatattgagtgtgtattgggtaatagtattgaatacagtaatggcgttgtggttacaaaaaacgcccttgttcttaagagcgatatattgaaatatttaggggtgaggtgttatgatatttgtgggttactttcttctttttttttttttttgttgagtcgcagcctcactctgtcgcctaggctggagtgcagtggcgcgatctcggctcaatgcaacctctgcctcctgggttcaagcaattctcctgcctcagcctcccgcgtagctgggattacaggtgaccatcattatgcccagctaatttttgtatttctagtagagacgggattttgccatgttggtcaggctggtcttgaactcctgacctcagatgatctgcctacctcggcctcccaaagtactgggattacaggtgtgagctaccatgcctggcccatgggttactttcatatgattcaggaaaaaagtgtatatgcatgtgttgtgtgtatataaagatacacagagaaaataaaatgtgacaaactattagtaattggtgactgaaggtgaaggatatatacagatgttcattgtagtatgattttagcttttctgtaggtttgacattgttcaaaaataacaacaagcaggggagagactattaaggaaaactctttaaaaatagtactgaaggctgtcagccctgccagattcactattcatttaacaagcagatattaactttatactatttctgtgttgctacaattattaaaaacagtaatgatacaaggctaaatagggattagtggagtgaaataagcagccaaaggacctggcataactagcaatttctgacgtgataaaacaatagggaagggcaggaatattaatggaaatcatattgagataaattcttagcaatttaaaaaaaataactttgcccttcctctccaaacactgaactaatttatattggatagaaaattttataaataaataaatataaaaagaaaaaatgcagaattacagtgaatgagatcctaagcctagaataaactgaacaaatcacaaagaaaacaatcagcagggtgtggtggtgcacacctatcatcccagctactcaggaggctgaggcagaaggatcacttgagtccaggagttctgggctgtagtgcgctacatcagttgggtgtccacactaaatttggcatcattgtgattacctcccgggagccagggaccaccaggttgcataaggaggggtgaaatggcacaagttgaaaatagagcaggtcagagctcccatgcttattagtaatgggatcacacctgtgaatagccactgcacttcagcctgggcagcatagcaagaccccttctaaaaaataatcagaaaaagaaaagaatcagaaattttaactgtataaaaatcataaccttattacattaacaaatttttaaagactaatctagaaaacaatttgcaggttttttattattataaagaattgattcaaattgatgaaactcccaaatctcaaggaatgaatgactaaggtcaataacagatagttcaccaaagaaataaatgtagtaaataactgctaattaaatcattgcaaattaagttatgaatatttcaacttaaaattgcctttaaaaaataagagtaacttgctggagagggtgcagacatgctcctattttcatgcattggtggtggtattgcaaagctgtacaactctattgggaaagaatttagcagttcttatgagaagtcataaaaattataccattgattcagtaattctacttcagggtctcttgcttaagtaaataatccaaaatagtgatagggtgaaaactataggcaaaacacttgtcactcttattatttatagaagtgaaacactgcaagtgagctaaatatttagcaataatggattacttagagaattaattatggtataatgcccaaaggactatcatgcagctattaaaaatgacggctatggagattgcatggaaaaattattttgaagtgcgaagtttttgaaaaattgtgtgcataatacaaacggtataaattttaaagcccactttatgagctactctttatcactaggataaatattcattcttcttaccaacatttttactttctttgtagtatatgtttttccctctaaagaagataaataatttaatgcagtctcccatgtaaggcagtgttttatattggagcacatttttatcacttgccatttcactctggagttgtccataaagataagtattcaaacaactgtattgtattgtactcacagtataatttttgcatttcttccaccctatcacttctccaacaccctgagtaaattaagaagtaaactaaagaaaatattttcagcaaatagtttatttgggatattcaacttaaatgatgattactgttctaaaacttttacctaccttaggtttggccttatctgagtatatagtcagtacaggtctacaagtctgctccatacacactgaaaaataacttgctgaaaatttctttatcatttattttacctttaggcactttgcatggcttctcagatgccaccattgtgaatatagtaagaatagaccaatggaatgaccaaacattagcatccatgctttatctaactataagtggaaatgtttatattctaattttaaaactattgtatgtcaggtaaatagagaaagaaacaaaattcacaaaacccataatctttcttacaggccttatccgcaaattccttgcagttgatctagactgaattgtgtttttataaccaagatgtttgatgttccttaattttagcaagaataccaactactttgttgggatccagtgatttttgttttttaattcctaagatgataggatggttaataaaaatagctgagtaggagatttccacttttggaagctcgagtagacatagttttttctatttcttcccctaagtcaaactaaaaactctggacattatgtattaaaaaatataaagatgaaaggtagagagaagaaaacagactggctagaaacccccgggccacagcagcagcatagcagtaagtttcatgggttttcatttcgcttcgtgtatcccagacttggagctgaagaagctggcaaataggaaatgtcaacagcatagacaaagctccaatggagcctgctctttcttagtcaaaagaccaagacaggaacatcctagcgagacggaaaacttttagacaatcctctagccgaacaccacagaaggaaatgtggacccaccctcacccatgccagcaaaggcctcgtggggaacccagacatctaccctatgaagccctaaggaggtgtgctaatactcctgctggagtggtttcagaaaatgccaagaaaggagcttagatttttatcccccctgggcagtaattacccctttcccttcatggtgtgagcagagactgtgtggggaatcagaactcacctccacacacagtaacgcagtgctgcacacctcagctgtcagcagacctgagtagaaaacctagacttctgtccccatcttgcagtaacaaggcagcaccccactctttcctttgccagaggcatggcaaagaaagccagttagaaaaagaagatttaggctggttgtagtggctcacacctgtaatcccagcactttgggagggcaagacaggaggattgcttgagcccaggaattcaggatcagcctgaccaacataaagagaccccatctctaccaaaacaaacaaacaaacaaatagccaggcatggtgacatgtgcctgtagtcccagctactggagaggctgagatgggaggatcacttgagcctgggagatcgagagatcgaggctgcagtcagctatgattgcaccacggcactccagcttggcagtcggcgcaacagagtgagaccctgtatccaaaaaaaaaaaaaagaagatttaaataacattcagaatctcatcacataatacaaaaatgtccagttttatttaattcagaataactcataatacaaaaagccaagaagatcttagactgaatgaaaaaagaaggcagtcaatataggccaacaccaaaatgacagcagtgttagaattatctgacaaagattttaaagcagtcatgataaaaatgcttcaatgaacaattaggaacatggttgaaacaaatgaaaaaatagaaaggctcagcaaagaaatgtctctgctgagaaactatggaggtgaaaaaaatagcaaaatatttttcatgtgctgaaagaaaagaactgtcaatccagcattcatacccagagaaaatatccttcagtaatgaatcacaaatcaagacattctcagatgaaggaaaactaagagaatttgtcaccatcagacctaccctaaaataatggctaaaaggagttctctggaatgtcagaaaagaggaaagagcatggtaagcaaaaacatgtaaatataacattctcctcttgagtttactaaattatgtttgatggttgaaacaaaaactgtagtaatgtctgatgtaattctaaatgtgcatagaggaaatatttaaaacaattaaaaatgggagactaaaaggacataagatatctgtactccacttcaactggtaaagtgatgacaccagtagactgtgacaagttatgtacatataatgtaatatctaaagcgaccactaaagaaagctatacaaagggatacactcaaaaacactgtacataaataaaagtaagagtctcaaaagtgtttaatccacaggaaggcaggaaaagaaaacagaaataaaaaacagtgaaacaaacagtccataccatgggccttaatacaaacctcagaagatttaacagagttaaaatcatatacagtatgttttttgaccactataaatgtaatctagaaatgaataatagaaaggtaacaggaaaataaccaaacacttggaaattaaataacacacctctatataacccatgaatcaaagaggaactctcaagagaaattttaaaatgcattatactaaatgaaaatgaaaatgtagcatatcaaaatttgtaggacacagctaatgcagtgataatacatacattagaaaagaccaaaagtctcaaatcaataatcaaagctttcaccttgagaacccaaagtaaaataaatacaataaaagaaaagcaaaataaacacaaagcaaacaaaggaaagaaataataaagagcataaatgaaattgaaaacagaaaaacagtggagaaaattaatgaaacagagatccctgagaggatttggctctgtgtccccacccaaatcgcatgctgaattgtattccccaatgttgaaggtggggtgtggtgggaggtgattggatcatgggggtggtttctgatggtttagcaccatccccctagtgctgttagagttctcacaagatctgattgtttaaaagcgtgtaacacctctcctctctcactctcttcttcctgcttcggccatgtaagatgtgcctgcttccccttcccctttcgccatgattgtaagtttcctgagacctccccagcaatgcttcctgtaagcctgcagaaccgtgagccaattaaaccccttttctttataaattacccagtctcaggtacttctttatagcagtgcaagaacaatctaatacaatttcgttctttgaaaagattaataaatcaacaaagcaattctacacttctcttccaaaaaataaaaagagaacagttcccaattcattttatgaaactagtattaccctaataccaaaaccaatgacagtacaaaaaaaataagaatacagagaaatatcccttatggctacagattcaaaaattcgtaacatattggcaaatagaattcagcaatatataaaattaatggtactccatgacaagtagagtttattccaggctgactcaatatttgaagatcaatcattgtagcaaaaatcactggattgactggaagtcaatcagtcgtgagcctattaatcaccacattaataggctaaagaagaaacatcacataatcatatcaatcactgcagaaaagcatttgacaaaattcaacacccattcatgataaaatgctaagaaaaatagaaatagaaggaacttcctaaacctgataaagggcaaataatattatacttcatgggggaaagctgaatgcttttcctatatgattggaaatgaggcaaagatgtctggcctcaatattgtcattcaacatattgctggaagttttagccagtgcaataagttgagaaaatgagctgaagacatacagactggaaaggaaaaaaaccaaaactgtccctatttgtagataaaataattgtttaagtagaatattccaaggaatttatttttaaaaagactcctagaactaataaaagagttaagcaaggtcaaaggatacaaaataaacacaaaaatcagttgcatttctgtatattagcaatgaacacatgacaactggaatttaaaatacagtatcatttaaaatttctcaaagaaaaaatatatacttaattgtaaatctaataaaacatgtacaggacttatatgctaaaaactgtaaaactgatgaaagaaatcaaagatataaataaatggagagacataccatgtttatggattgcaagactcaacatagtaataatagtcaattctcacaaaaatatatacaggtttaatgcagttcctatcaaaattctaacaagatattttgtagatacagagaaggttattcaaaaatttatatggaaagtcaaagaaagtaaaacagttaaaacaattttgaaacagaataaagtaggaggaataaatttcaagacttatatagctacagtaatccagactgtgtgctatttgtggagagatagacacatagatgaatgcaacagaataaagaattcagaaacagacacacaaatgagcctaactggtttttgacaaaagtgtaaaagaaactcagtgcaagaaaggttatctttcacaacaaatggtggagaagcaattggatatccatagggaaaaacaaacaaacaacaacaaaaaacgaaataaaaccctgatctaagtctcataccttatacataaattaacttgaaatggatcatgaacttaaatataaaatgtatgaccataaaattaaaagaaacagtaggagaaaatctttagaactcagggctaggcaaaaaagtcttagaattgacactaaagccacagtccctaaaacgaaaaactgtaaattgcactctatcaaataaaaacttttactctgcagaaactctcttaagaggatataaagacaaactgcagagtgggaaaaatattttcaaaccacatacctaacaaaggactagtatctagaatatataaagtttttcaaaactcaacagtaaaaaacaatcctctagaaaatgggcaaacaacatgaacagacagttcaccaaggaggacatatagcaaataagcacacagaacaagcaattagcacacaaaaagatgttcaacatcattagccattagggaaatacaaattaaaaccacaatgggctgtcactacatatctattaaaactatcaagatagagaacaaattaatggttaccaggagtgaaggagggatggagacagaaggtaagtcgatttggctataataggacatcgtgaggaatcctcataatagaagtgttctctcttgactatattaatgtcactatcctggttttaatagtggacagtggttttacaagaggttactgatatgatttggctatgtccccactgaaatttcatcttgaattcccacgtgttgtgggagggacctggtgagaggtaattgaatcatgggggcaggtctttcctgtgctgttctcatgatggtgaatacatctcacaagatctgatggtttcataagggggagtttccctgcacaagttcttttctcttgtctgccaccatgtgaggcgtgcctttcaccttctgccatgattgtgaggcctccccagccacgtggaactgtaaatccaataaacctctttcctttgtaaattgcccagtcttaggtatgtcttagcagcatgaaaatgggctaatacagtaaattggtaccagtagagtggggcactgctgaaaagatacctgaaaatgtggaagcagctttggacccgggtaacaggcagaggttggaacagtttggaaggcttggaagaagacagaaaatgtgggaaagtttggaactttctagacacttgttgaatgactttgacaaaaatgctgatagcagtatgtacaacaaggtccaggctgaggtggtctcagatggagatgaggaacttgttgggaactggagcaaaggtcactcttgttatgttttagcaaagagactggtggcattttgcccctgccctagtgattcctggaactttgaacttgagagagatgatttagggtatctggaggaagaaatttctaagcagcaaagcattcaagaacatgtggaactgtaagtccaataaacctctttcttttgtaaattgcccagtctcaggtatgtctttagtcttttatcagcagtgtgaaaacagactaatacagttaccattgggagaaactgggtgaattatacatgggaactctctatattattttcttgcaacttactgtgaatctacaattatctcaaaataaaaagtttaatttaataattgctgagtaagtgggcctctgcagaatcaccaaatcaggagtttcatcaataagtcttaattctctccagcaagaactagtgcagttttcctagactccacttcatttgctaatagagttctttagaatctctaaagatttgaacatcatcatgaaccatctaactcagctgggaaagaaaatcatataccagtatttttgttggtccacacattttaggaaactaaaatgtatgctgttttatggcacagactgtgtaggttgtgtactcttagggcttatcacaaggtcttagcttgtgatatgttagatttcagtaaatacatgttagatggctggatgaatggatgaaactagtgatgttctagtaaatatttgacaactagctctccagaagaagaaagaagtgctcatttgtatcatttgctgatttctctggtgtaaatactcctctatggccaatttcaggctactaaaatgacatgtctaaacacggggttgggaagagatgtatccattacccttcataagctagtataagctgactccagcacaccactggatggagttgagttagatagcatgcgatgttaaccgcctttattttctgatgccaaccttgtgttattaaaattacaaagaaaatctgggctttgagttactgcctaatcccttctcattaaaagtgtgagagatccattgagaatcagtagttgtctcaaagcaaacccatggccttcacctagagaagaaaattaaaaagaatatgccttattattattgaatacaaacctttttgtgttcatgtggagcactgagaaaggcatgaattacagtaacttgccagtgtccaactcatggtggaagcaggctgattttttccagtttagcctcttaatttcttcttgagggtgattggcttatgggagatgtactgacaaggacatatcacataaagctttattttttaaggagtctgaaaggaaaaaaaaacctaattagttttgtactgtagtcttgtttcttagtattaaagaatcatttctgacatctgattaatcacacttactcctgcttgttttcaatcttgttggatgtttccaaaaactatctcatagacagtattttctcctcacactatcttgcagctgcaatataatctacactcaaagcttgtgttgcaacatgcatgcccttgggccacaatctctgcttgctttggcatggtttatttattccaaagacatctatgcctttaggttgctatagagatttcaagtgaactaaactgttcaagaaaacctcagggaagcctgtttagtttcttctaaaactcaaggcgattagtaggcccagatattcttaaaatgtgtactgcaagcaaaggaacctctgcgaaaagtgggttgatgaccttagttatagagggtttcaaggagaaggtaattttaatagcagcaaaaaagctgagtagagcgaagtgaatttctttgtaaaggtgcttataagagaacacctggggtattgattaacatattaacaactgcctctttggagtattggattgtagctgcttagtatcaataagtttacaaaaactagccaaagcattatatagttcagggttattgcttacaccaatttcagacattaagcatgagtgaatgtttttctttctgcttttctgtttctatattttcttcaacatgcactattttatgattaaaattatatgtgagtagaaaacgaggcagtgttattgattatatagtaaattttgaattattcttatttgtttagcaactattatgcagtctagaagtgaagaggttaaactaaaccagagtgtagaggagggaacatggagttccttatattttacataattttaacactggtggccatgtgtttctcggtgtccttagaattgagaatgaacaatgaatactttaatgggtgaaatcaaataaactgttattataagatatttattaattaaccaagttaattacaagtctttgaaagatgacagatttgtgaggcatctttagaacaaaggtcaaattctttaagcctccattaattcctgggacctcaacgtaatgttatatatgatagcactcactggaatgggtgtagaaggtcaaattttaggaaattctggcatggacttttattgtggaaagtagcttaacctctgtatggtgtggtttccttatttaaaactaagagtcacgcgccgggttcagtggctcacgcctataatcccagcactttgggaggctgaggtgggcagatcacctgaggtcaggagttcaagacgagcctggccagtgtgttgaaaccccctctctactaaaaatacaaaaattagccaagcatggtgacgcatgcctgtaatcccagctactccggaggctgaggcaggagaattgcttgaatccaggaggcaaaggttgcaatgagccgagattgtgccactgcactccagcctgggtcacagagcgagactcagtcacaaaaaataaaaaataaaaataagagtcagactggataacggtaatgtccttctaactctaatattctgtgatacagaagtcagctaagtgtggtagtaattaattagtaatagaaaatttgtttccaaacaatataaaggatccacatatttcaaaatatcagtaacatagtttaggaaattgtattaactaaagtctcttttaattggagataactgaagctaaattaagcttgctttgatcccaaagggagtttatagtaaggcttctgtgaccccaggaaaggacaggggtgcagctagacaccaggaaatagcagcaatgactggaaggaaccagattgcccctttctgggtgttcgtatcattattcccatctgaagaatgacttcctgcacacagcagggaacctggccattgagagttcatgtttgacccttgctgctttggaactcaaggaattttcattactctcttctgccccacattaaaaaaaaatattggagaagggtgcctgttggccgagtttggatgaggtgcctacccttggatcagttactgtgaacagggaagcgagtcacataagataaagacccactagaataatataactggtattattaatagaagaagtagcatattctagaaggaaagagtatatttaccaaaacaagagaaggagtagtaattggacaaggaaatagtaaagttcactaaactttttttttaattgctaaatgaaatcatcacttactgtttcttacatacgcagtaaactacactaatgaattattgcttggtagatgtggccatagttgcactaatacatgctggaatttacctggcttttaatggatactcggtaaatggtagctattatttttataatctagccaagagatcggtgttgatcataattcttatctataatttttatgatctaatgaagagataggtgctgctgaaaatctcaaaagatgcaatcccaaatgccataattctgaatgtcaaaatcccaaaaggtcaaaatccctaaactgtaaaatccctaacatctaaaaatcccaaaaatcacaattgcaagagattaaaatcccaaatgttaaaatcctgacatctaaattctggggaataaaatagtgtgagttttcggctatatgcaggatagttacatcatgttggttacctcatgttgggctgaactattaccttgttattgtctttatttggaaattaactatggcataaggatgtgggtttgggtgccaagttgacaaggagtggacttgtggactgaattttaggcatcaatttgctaaattaaggaatacatggaaacctgttaaagcatgatttggggtgtgtatgtgagggtatttccataggagattagtgtgagtgagtcggagtggaccaggtggggaggatctgccctcaatgctggcaggcaccatccagttggttgggggcctggagagaacaaatacagaaggcctctctctttgagagctggggcagacttttctcctgttgtcatggccagaacattaggctcaccagcctttggaccccagggctttcaccagtggcccccccaaggcctgaggattttgacttaaaactgagagttataccattagcttccctggttctgagacctttggacttgggactgaaccaggctatcagcatcccaagagtctccagttttcagacagcctgtcatgggacttctcaaccaccataatcctatgggccaattcccctaataaatatcttctcatatgcatatgctattggttccatctccctggagaaccctgactgatacagatttggtatggagaagctgaatatcattccttcttactgtatttcttataacaaaatgtaagagatatatgaaattattctcttgaataaaagtctgtgataagcgtacgaggctctcttaatggtgaaagataaaagtttaaaagctaattattattggtgctgcaaaagcagaaaatcacttaattacaatggccaagcaataaccaaactttcagttggacagcatatacatagaaaatttgcagaccacaaccactctccaaatgtaaatgcagtgagttttgaagatcatggaagaagtgaaaacacaagtgaaaaacacaaaaaatctcccctgctataataaggtttagttctctgtccccatccaaatctcatctcaaattgtaatccccatgtgtcgagggagggacgtgattggatgatggggcagtttcccccatgtattcttgtgatagtgagttctcatgagatctgatggttttataagcatctgggatttcccctgctggcacttctctctcttgccgtcatgcaaagaaggtccttgcttccccttcatcttccaccatgactctaagtttcctgagacctcctcagccatgtggaactgtggatctttcctttataaattacccagtctccgttatttctttatagtggtgtgaaaactgctgattctttatagcagtgtatttaccaatacaataaattggtaccacagagagtggggtactgccactacccaaaaatgtagaagcaactttggaactgggtaacaggcagaggttggaacagtttggaatgctcagaagaagacaggaaaatgtgggaaagtttggcacttgctagagatttgttgaatggttttgagcaaaatgctgatactgatgtggacaatgaagtccaggctgaggtgatctcagatggagatgaggaacttactgggaactggagcaaaggtcactcttgctgtgctttaacaaaaatactggcagcattttgcccctgtcctagagagacctgtgtaactttgaacttgagagagatgatttagggtatctggtggaagaaatttctgagcagcaaagcattcaagaggtgacagatcataaaagtttggaaaatgtgcagcctgacaatgtgatagaaaagagaaacctattttctggggagaaattcaagcctgctgtagaaatttacataggtaatgaggagccgaatgttaatagccatgaaatgggggaaatgtctccaggacatgtcagagaccttcacgggagcccctctcatcacaggcccagaggcctaggagggaaaatggttttctgagccaggtccaggaccccctgctgtgtgcagcctaggcacttggtgccctgtgtcccagttgctctagttatggctaaaaagggccaaggtacaccacaggccatggtttcagagggtgcaagccccaagccttggcagcttccatttggtgttgagcctgcaggtgcacagaagtcaagaattgaggtttgagaacctccacctagatttcagagaatgtatgaaaacacctggatgtctggaatgtaaggaaatgcttgctgcaggggtgggaccctcatggagaacctctgctagggcagtgtggaagggaaatgtggggttggagcccccaccagagtccccactgggacactgccaagtggagctgtgagaagagagccactttcctccagaccccagaatggtagatccaccaacagctggcaccgtgcacctagaaaagctgcagacactcaatgccagcccatgaaagcaaccaggaggaaggttgtaccctgcaaagccacaggggcagagctgcctaaaaccatggcaacccacctcttgcatcagcatgcgctgaatatgagatatggagtcaaaagaggttatttaggagctttaagatttaataactgccccactggattttggacttacatggggcctatagcccctgtgttttggccagcttctcccatttggaatgggagcatttatccaatctgtaccctcattgtaccttgcaaggaactaacttgcttttgataggctgataggtggaaaggacttgccttgtcttagatgagactttggacttggacattgagttaatgcttgaatgacttaagactttggaggactgttgggaaggcatgattggtttggaaatgtataagggacgtgagatttgagaggggccagggcagaataatatggtttggctatgtccctacccaaatctcatcttgaattataatacccacatgttgaggtagggacctgtaatccccacatgtcaagggagggaggtgattagataatgggaccagtttcccccatgctgttctcgtgacagtgagtgggttctcatgagatctgatggttttataagcatctggcatttcctctgcttgcacttcagtctcctgccaccatgtgaagaaggtccttacttccccttcacctttcaccatgattgtaagtttgctgaggcctccccagtcatgtggaactgtgagttaattaaacctctttcctttataaattacctagtctcagatatttctttgtaacagtatgaaaatgaagtaatacacctgccaaactattcagtcacttatgacttctgccccttcacacatagtatcaatttgctatgtgatgtatttcattttcacatcatgtccaatactggaggtataaattgtgtcaagatttttagagacatctaattcattttatgcttttttttggccaatttgacttcacaaaagtgcattatcacaacattgggtataagcattgtgcgcatatgtagaaatattgaaacttcctcagtaaatgaagatgtccttttgtacacctgcatttgttaaagataaaatttctttagatcttggttctttgggcaactgcatatatggtggtgacccattgaagtttattaacagatctcatcaaaagacttaggttatctatcaaggtatttcagatgccacagttataaagctgggtgtacacaattaccaaccacagtgactttgtttatacattttgccttttgacctatttatgaatatgatttgtcttctcataacttttacacccatgtgaccattgttagtatacctgagtgtttatgcttacaaatatctgtatattagttcttgcctattttattgtgtaaagtggcctacaacatattttatcatgtttttagatgtttctcaaatctccttttcaaaaatgtaaataaatgtctcaaggaatttttattaagttattttttcagaattatattttcaagattttgatctctcaggattgtgatttccaggattttagatgttagggattatgatttttggggatttcagtgttcaggattatagtgtttaggattgtgtctttcaggattatggcccaaacccccaaaaaggttaaatttatagttagaatttttagtgccagttatttgagagcaccacaaatgtctgtgacacaaagaaatttaccttttaaccaattgtactagttctttcctgctctataacaaaatagctgagactggggtaagttgtaaaaacagaaacttatttctcacagttctgaaggctgagaagtctaagatcaaggtgtcggcatttggtatctggtgaagctgctctctgcttccataatagcaccttcttgctgtgtcctcatgtagtggaagagtggaagggcaagagggcctctgtaattccttgcagcccttgtataagggtactggtacagtttggatctgtgtctccacccaaatctcatgttgaattgtagtccccagtgttgaaggtggggcctggtgggaggtgactggatcatgggggtggatttttcatgaatggtttagcaccatctcccttggtgctgtcctcgtgatagtgaatgagttcttgtgagatctggtgatttgaaagtgtgcagcagttccctgctcgctctcttgcttctgctgtggccatgtgacatgcctgcttccacttcaccttctgccatgattataagtttcctctgcagaaaccaagcagatgccagcatcatgtttcctgtacagcctgcaggacctatgactcttttctttataaatgaaacctcttttctttacaaattacccagactcaggttttgttttttgttttttggttttttttttttttttttttgagatggagtctcgctctgtcaccaggctggagtacagtgacacaatctcggctcactgcaacctctgcctcctgggttcaagcaattctcctgcctcagcctcctgagtagctgggactacaggcgtatgccaccacacccagccaatttttgtatttttagtagagacagggtttcaccatgttggccaggatggtctcgatctcttgacctcgtgatccacccgcctcagcctcccaaagtgttgggattacaggtgtgagccaccgtgcccggccaggtatttctttatagcaatgcaagaacagactaatacaggtgcttatcccatccatgagaattcagcctcattaatcaaaatatcacactggatcttaggttccaatctgtgaattttggagacacctgtacattcaaaacatagtaccaagtgtattatttattactggataacaaatttccacaaatttagcagcttaaaacaatacaaacttattctctcgtagtatctgtgggtcaggaataggggcacagcttagctgggtcaactgctcatcagggtctttctcatgggcctaaagttaaagtgtcagccagggctggatgcaatggttcatgcctataatctcagcactttgggaggcaggggcaagaggatcacttgaagccaggcattcaagacagcctgagtaacatagtaagatccccatctctacaaaatgtatttttttaattagctgggtgtggtggtatgcatctgtggtcagctacttgggaggctaagatgggaggactgatggaaaccaggaggttgaggctgcagtaagccatgatcagaccactgcactccagtctgggaaacagagcaagatcctgtcccaaaaataaaatacagtgtcagccagggctggagtatcatctggaagctcaagtggggagggatcctctcccaagctcacttatgtggttgttggcaggatccacttccttttgggttgttggtctgagggccttaattcctagctgctattgactagagttagacctctcctcagtctcttgttatgtgggcctccccaccatgacaacgtcatcagagccagcaaggtggaaccccagtctgtatagcctaattatgaaggtgacacatcgtcacctttgccatattctcttggttacaaacaagtcgtaggtcctgccacactagtaaagagggtattaaaaagggtatgaactgtaggaggtgagatcattggggggcatcttaaagtctgtttgccacaccaaaatgttgatttaaatattactcacccagtccaaagcttgtatgcaggtgtgagatattttgctagtggaaaaaaaaaaaaaaggccctggaaaaaaaagctcaggcttaactataatgttactctagggtccatcaaaagtctacaaagctgaacattctagttaactgctcaggtgcccacagtccctaatcagtcacattaaaagctgttgtgctcatgtttctactccttgcattcctagtatagtgtcttattcatgatagatactaagtgctgaatggatgaatgttttttaaatctagtgtttctatgtgatgggaagcagtatagtgtaccagttcagagcatgaactttggagtcagaaaaacctgggatcacatgcttcctttgccacttacttgctatataacctttggcaagttactcaaattctgtaaggctcagtttctttctctgtaaaatggggataatactaccatattttattacatctaaggcactatgtattttaagatacagcattattttctgtgtaattcataaagaaaaataatgctgccaattaaactgtgatataacttgattgattataaaatgcacctgatttcaaacatattaaaatatgaaaaaagtgtatgctttagaattgataaaatgcaaggatgcctaccttatgtggttttgataaagtttaaatgagatagcacacgtaagacagtatatgtagctttcatctagtaagagcctaataagtattagctattttattattagcgattatggtcctcttcttgcaaactcttaaaatgagtcagtatattttgctttcttttctaatatttgaaactgagttatagaacagatctacaaaaccattgttggtttttttcaaagaaggagggaggtattaacaaaatggctgtctcagaccagatgatatataatgacctgtagttctgtgcaaaatgcttaataagggtgacacttgacaaaggcctttttgtggaaagtgtgcttcccacacttcatcagtctcttaagtgaaggtagaataaaggcccaaattatgcttagtaattcaacaggttgagagccagcttttaatgcacctctgctccgcttgccggttcctgtgataactgataatttggtgactagctgagcctttgctccacagtgaactgaaggaagccctttatacttgagactggaaatacttccgatgacagtgaagatgtatttgaagcaatgtgatattgatacaaattgctccaaaggcacagctataatacaacaccatagtaggccaaagtctggacaatgagtgtatctgttaaattggccataggtataagaaagaaagcccagtgcccttcaattacagtcatgtgtcacttaactatggggataggcattctgagaaatgcgtcattaggcaattttgtcattgtgcaagcatcatagaatacttaacacaaaccttgatggtagaggctactatacacctaggctatatggtctagcctgttgctcccaggctacaaacttgtacagcgtgttattgtacggaatactgcaggcaattgtaacacaatggtatttgtgtatttaaatctatctaaacattaaaaaggtacggtaaaaatataaaggattaaaaatggtatacctgtgtagggcatttaccatgagtggagcttgcaggaccgggggctgtgctgggtgagtcagtgagtgagtggtgagtgaagtgaagggctaggaccttattgtacactactggagactctataaacactgtacacttaggctacaccaaatttattttttaaaatttcttcagcaatatattaaccttagcttactgtgacttttttagtttataaacatttaaggtttttttttttaactttttgactcttttaataacacttagcttaaaacacagatacattatatagctacacaaaatattttctttacgtccttattctataagcttccatttttaaaatttttaattttttacattttaaacctttttgctgaaaactaagacataaatacacacattagcctgggcctatacaaggtcaggattatcaatatcactgtcttccacctccacatcttgttctactggaaggtgttcaggggcaataacatgcatggagctgtcatctcctatgataacaatgccttcttctgaaatacctctaaaggacctgcctcaggctgttttatggttaacttttatttttacctaagtagaaggactgtactctgaaacaacaataaaaagtacagtatggtaagtactagtcaataggaatttttcagctctattataatcttacaagaccaccatggtacatgactgcatatggaaggacagctggccactcatgtgtctccttggccaccttgagagacttcataatacttgcccctttgcacactcttcttgctgcctaattgcccgtgtgcctagctggactgtaagctcgcagagggcagtgactgtgtgtcctgctcgccattttttctgcagttaactagcactcagaaggttaaatcatcacttggtgaatgcatgaacactgtttaacctcaggtaaagaagtgaattacatatgatgatgccagactttatcaaaattcaaataataatcattttttatgcagtgcatattcaccaaaattatgcattgtggtctaccattaataagacatgttctttaggttgttaaaccaagtgagtttctgaaaaataggtattgtgacaactagaagtgcatatacagaaattgttccaaacaacctgttcctcagttttacaccatattatggggcagtatatgaacctcttcattttcaaacacataaacacagtgggtcccttaagcttatagtctcaactacctagtctgtaaaatggaaatgataacaatacctcctcatggggttgatgtgaagataagatgaaattgtatcttttaaataataatatccctggtacataatcagtaatgaatgagtagtaaataacaatatcattgtttccattgtagtggaaacttgtgtgttcacagatctgggtgccaggaaactttggttttcttagagggagtgagatactgctcttggatatgtctgtcttgatatctaaaagacttgggtttctggtgcagcgacatgtgttctttgatgggctctgatgatactatagctcttcagctacatttttttttttttgagacgaggtctccctctgttacacaggctggagtgcagtggcgtgatcacttctcactgcagccttgctctcccaggctaaagccatccttccttctcagcctcccacgtagctgggactgcagatgtgtaccagcacactcagctgatttattgatttttttttttaagagatggggtcttgagtgttgcccaggctggtactgaacttctgagttcaagtgatcctccctccgtggcctcccaaagtgctggaattacagatgtgagccactgcagctggccttcagctacatttggctacaacacgaactgctgtttgggggtactgttgtttgtgcattgcttacctaaactattcagtgtcctgggactgagttttggaaaatggtaaagcccagtcatgtgaagccatggttctcaagcctggctgcacgctgaaatcaccaggggaggcagggaagcaccatagatgcctggattctacctagaactcagtacttggaatagttccgattgaacctggatgagcagtattgagaaccagagatttagagacactgggaatcactgtttctcagtagtcatgtctgttttcctcagctggaccattctgttctgttttttgggttttttgtttgtttgtttgtttttgagatggagtctcactcagtcacccaggctggagtgcagtggcacgatctcggctcactgctatctccacctcccaggctcaagcaattctcctgcctcaacctcctgagtagctgggattacaggcacccaccaccacacgtggctaatttagtagagacagggtttcaccctgttggccaggctggtcttgaactcctgacctcatgatctgcccgtcttggcctcccaaagtgctgggattacaggtgtgagctactgtgccaggccctgttttttctttttaagtgttttatttgctttgggtttcaatagatcctggatatatcctggaagttgagtgcatgcaaatcttaagccatggtgggaagggacactgtggaaggagtgacacaattgagtgccttcttggtactagacctatgatgaacttttaccctattatcttctgctaattgttgttaattttttactaatttactatattggtcagagtagtctaggtctgccatggtgacaagcagccccaaatctcagtagacttaaacagcaaagtctcttaaacagtcgaagtctttaatatatttctggcttatgcttcatgcccatccacaggattcaggtaaatgtagcgaagaagagaacacagagaactgagcaccagcgttagagaagcaacacatgtcacttctgctcactttccactgacccaggcagatcatggggtcatgcctaactgcaggggagcagggcttacaatctaccctaggcctggaaggaggaggccttgtgaacagtctttaagacctgagcaatgagaatggttttttgtttggcagcaagtcagtttctttttgcatttatccatttatgaaatcctaaactggaataggtattatatggaactattctgggctttcagaagtgttcatatttcatgtcaagtggagttaatttgcatacatacatatcatttcgtaattttaagaaattttgtggagggttttcaaaagaaatttaatacttgttttaattttctgttataattttagcaggggaaaatggctgcaaagctgcagatatttttgttctttccttttctatatttgttggactagttagaggtgactgcacataccagtgcggaggaaatacttatccaaaccactaaatggctgtcctgcttggtgttgcatttatgggagatactggctgtcccgttagtattctacatttctgagcagtcagcaccatgacaagatattaaactgaaagaaatgttaaaaatagttcagaaaatacaattgtaaggaaaaaaaaacagaagaaagtcaggaaaggccctttaggtttgggagtagacaggagagacgtttgttttgctcatttctgatagacagtggcattccacagttcgaagccaagtgagtaagactggcagctgcttgcttagggtgtacacactaaggtctctgcctgcatcacttcgcctggaagtgaagagccctgaaattcccagacgctagatgttcatgtagcaaaacagcaaatgctagagagcatctctcatggggtctgcctttgagggtcggagaggcctagctatttggcactgcatattttttccatcaaccctgtagctgactttgggctctaacttttctcaggggttactgcatgtttgtggaagctgacagccccagcatggatgatattactttaaacatttttaaaacattctgtccttttcagataaatttgcttcattgcttccttctttataaaatgtccccttagagagtaggacacattttactcgttagaattggaaggggaaaaaagcattccattctttagagccacatccagtgttcactgcttttgaagaaggagtgatgtttgacacagaaatgcatcaatggggaaggccacatttaacttttgttgtttgggctcagcactggaaccaaaccagtttttcttgtcccccctccttttttttttttgtccaagtggcagaaagcccagaaatataagtttgcattgccaagagatggctctaaatatagtgctggtgggcaggaagattgtttcctcatgaatgcaactggtgtgtgctgtatattccttgccctcctccagcaggaaggaagagtttggctttgctgcactgcaagcctcaggcgctcctggctggaggagtttagaaacaggagcctgggcaggtttgctttgcactctcatctccagccaagacgtgcagatcaaacagtcactacctagctggctgttttattctttaggatttaggagtataatgaaacacataacagtggccagcttttagagactggaaagaaagcattgtgtatgccttgtttaaacacagattgtttataaaaggtataaaaaaacatcgctttgccttgtgtttgcttggaaatacaagaggagttggctggctactgtctaccagccagctttgaaacatgaatactttttacttgttcaccagggcagcattttgctctttcctactgcaactgaaaggaaatggaactggtgggattattagactggcttgaaaatgccaactttaaaagattatttttttggccaggcgcggtggctcatgcctgtaatcccagcactttgggaggccaaggcgggcagatcacctgaggtcgggagtttgagaccagcctgaccaacatggagaaaccctttctctactaaaaatacagaattagccaggcgtggtggcacaggcctgtaatcctagccactagggaggctgatgctggagaatcacttgaacccgggaggtggaagttgcagtgagccaaaatcacaccattgcactccagcctgggcaacaagaacgaaactctgtttcgttttttttttttttaagtttttttaagtttacccccaaagcagagcaggctagcattataaagagcttggctcaaaacctcctactgttctcttgccctcagcaattaaataaaatacactttgaaacctcagcttataaatcagattgccccaaagggatggagagagctggtttgatcattgtattggtccagttccttgataaaggtttactttatctcactttgtgttgttttttttttcctttttatctttttcccttgacagtgcatataaagtgacagttttgcagatcaatgttgatttggcttttatggtaaaagcttattatgcctaaggaaatactgcaaagtagtgagtgcatttatataatgaaatcatctgtgttgaatgtattaacattgaataattaaactcagcccatagttggttctaaaacccagtgctgcttaacaagagaccattaactcaataacaagcaatgggtagatctcatctcagaatcctgactggggccaggcatggtggctcacacctgtaatcccagcacttttggagatggaggtgggcggatcacctgaggtcaggagtttgagaccagcctggccaacatggtgaaaccccatttctactaaaaaaaatacacaaattagctgggcgtggtggtgggcacctgtaatcccagctacttgggaggctgagaatcgcttgaacccaggaggtggaggttgcagtgagccaagaccgtgccactgcactccagcttgggcaacaagaacaaaactctgtctcaaaaacaaacaaacaaaaaagaatcctggctgacttcaagtcatgccactcacaccacttgaaggagagcaaaacagtgatttttgatgctgaaagatcacactttagcatcaagcaatttcaagaatctttacatgtatgtacttttagattccattgattgggaaaatgcaaaggagaaacagctgctgggaattaatgcttgtgtatgaatttttattttactcatactatcttccatgtacatttggaaaataatacaaatatgtggtgggtaaatagcagcacctgaaacagtgcttgcctcatattagcatttggtaaatagttttgactgaaaattaaacattgttccgtcaagagacagttgttagtgtccaagcagactgacagaaacttcaggcccacaggttagaaaccaagatccagtctatttctcttcctctcttccttatagggctcttgtattgtcactgtaaacaaacaccaggaaagaaccagcacgctggcccagggagtcattctttggtcagggaagggcgccctaagagtgagaagtctttccagtgtgattatttatgtgatttcaagctgacagttgacttcttccaccttgcctcttttctaataaatatgtccagatattaagatttgagtggttaaaaaaaagcaaaagttttctcattaacattgttttattaaaacacagttatctacattgcaagaataaacattttcccacacaagaattattagagtgattcgttcataaatatttttatttttcctaaactgatttttagtcgaaaagatttgtttaggaacagtcaccccaagatgtcttcagagattcctgaactcttcagcgctgtgccatccaggacagtagccacacatggcttttgagcatctgagatgatgctagtcagaactggaatgtgctaaaagtttaaaataaggttgggctcacacctgtaatcccagcactttgggaggctgaggtgggtggatcacctgaggtcaggcattcaagaccagcctggccaacatggtgaaaccccgtctctactaaaaatacaaaattagccagatgtggtggtgcacacctataatcccagctactcgggaggctgaggcaggagaatggcgtgaacccaggaggcagagagtgcagtgagccgagatcgcaccattgcactccagcctgggcaacaagagcaaaacaacttctcaaaaaaagaaaaaaaaaaaagtttaaagtacatgctggattttgaagagttgtatgaggaaaaggatataaattatcttgtcaatttttaatattgatttcacattgaaataacatattgcatatgttatactaaataagatatgttattaaaattaatttctccttttttttttagtgtagctaccaggaaattcagaattacatatgtgacttgcattgtgtttttattgagtagcgttgtgttacagtttgaggagatcccacccctccgagtcagagtgagaaatcatagctggcccccaattgcacacaagttggcagtcattgcctgtggtgccaaccctgttccatgttgcagctgcctggggggatgtgtgaggactgtgagaccataccttggctgagcaggcaggaatatcctgaactcctggcctgataccacttgcccatccaggaggagttcttgattagcctaagggatagttaactagaagcttccaggacacaggactaagttcaagctgaagttaaggtgattctgtgagaaggcaaacaccttacacagtgtaggtgaggggagattcacgcacctggaaccacccaggctggccgaattaagcctaagtcacctctggtaaagagggaaggagggtccatccctggttcagttactgacaccataggtgtagatcacaggtgcctatgtcctgctgctctccacagggacacttttccttggaagagatttaccaaatgctaattgagtgtttgttaaatgtttactatgggccaagccctgggtttttctctatgcattaaaagtgtgagtaaaggggaaaaaagggcttctgtcatgagtggcacacataggacaactcaatttctcttcatgcagaataaacatcaagagattttggaagcgtaatttttggtagttgggcagctggtgatcactggtgccagcacccttactccttgtctaaatcagaggttgcagctctggtcatgttatattagatgattccgcactctaaacctccgtagtagatcctgccccacctcagggctatgtggtaggatatatgctgtttccacattatgcgactgcatgctatcttactggtttaaatggtgtaggtgaccataacacaatggcaagcatcctgtgtatacaagtacagaaaagatacagtaaaaatcactataaaagacaaaaagtggggcgaggtgcaggggctcacacctgtaattccaacactttgggaggctgaggcaggagtatctcttgaggtcaggaattcaagaccaacctggtcaacatagtgagaccccatctctacgaataaaagagtaaataaagggctcctgatctactagggaggtgaaggctgttggtcatttgcaggtagttaaaattatatagtagttaggaagtagatggggccattccgttgtgggcacaggggctgaactcacatcacacctcactcattagtagatgactgtagatatcaaattgctttaaaccagtttctgcttcttcactgctgaatccccagcaccaggaaaaatgattggaaccattagttgctaaataagtatttgttaaatgaaccagggtttgaatggaatttctgcgtttctcctactccccagaaaaaagggcctgaccatgtctctcagaggcggcctagaagctggagaacatgtctcagaactagtaacttccttcttctctcccttcctcgttttttaacttccttccaaattttggtgtctttccgactctaagccaagttcccctcaccaatctttctgtttctagaactttttcctattcttttccttgggttcgtcccacccaagaataagttgctttcactcttgctatttgctacagcaatgcccattcccctaccatttccactagtctaaaatatggattttacacagtggtttaaaaaaagaacgacgttgctaatacgttggtttgggcctagggggatcttctgagatccttccgggcagaggaagaactcttaaagtcatatttgaaggcactgatgctggagctgagaggactggatgatggccttaactcagatgccatggcaccaggtagctgcctcctactgttggtcagtttctcccttcaaggaacaaaaacttccccattctcacttcaccagacacatttcttctgtttacatgaggctctcaagcatacttaggctggagaagagggttccattagactttgcatggtgcccacttttattagatataccaatgattttgttctggttatatacttgccattattttgggaatgggcatttctacatcacaatctcttttcttctgacaatccaggaaacatctctgacatctgactataaaacagatgtttctgaagatggagtatagccttcacataaagccttgccgtttgtaggagaattgctgtatctaacaactgttgcaacttcccaagaggaaaatgaagtgctttaaacattttttcatggtggctcacacctgtaatcctggcactttgggaggccgaggtgggcagatcacgaggtcaggagatcaggaccatcctggccaacaaggtgaaaccctgtctctactaaaatacaaaaaattagccaggtgtggtggcatgcacctgtagtcccagctagtcaggatgctgaagcaggggaatcgcttgaatcggggaggtggaggttgtagtgagccgagatagcaccactgcactccagcctggcgaccgagcgagactccgtctcaaaaaaacaaacaaacaaaaaaaccattttttcaaaaatctacttaaatggttcagagttcttgtggttggagtggctttcatcataattgctgatgcaattataaggtcttcattcagcctgagtgtacaccatggaatgaggatgtgctgaatgtagtctgtatttctctaatgacatccttcatccaagtttattttaatgccacagtatttggaaagagtaatttactaagcccttgtccccagtcccactccctacttccatttttcagaggtttgtgtagcatataaaataaaagagcaaatgcaaatcaaaagtcttccagcagagctagcgtttcctgtactgctttgtagttctggctatttatggtataaactatattcaagtcccataaacagggcttttcaattagcttgaaaaaaattattaaatgtttggtgggtaccagaatagcaagattcgtggttatttggaaggcttgttttatgctttgaggccactgtggcctaccacagagctacaccgcagaccgtgaatttagcaaatcccaggaacttgcctggaagtcagaattggtcccatatgattaaaaacaatttattcaagtacccagtttcttcaagcagaaagctagaagcattgggatcgaggaagcagatgtggaaagtccagatgaagcacatattcggaagacagcatgttgtcaaagacagtataaactggattcaggactacaccatgattttccagtttaatactattgcctttaaaatagaaatagtgctgctttatattatgaaggactttatggactgattgatgtgtactttcccaactatattttcatttcaccttattaataatgtgaattgtgaggaccttttgcctggtttactctgcagactgcatttaaatgcctttctccaagaagccttctttgactcactcctgagaccaatctccatggcacccaggactgagtttgctattgcccgtaacaatgggtcctgatccctctcacagcacctgaatttgcgtgattatttgtctgctgcccccattggacttgtaaaagtacttgaaaacgtaggttctatctagttggttcttgtgctgccaaacttagtgtaatacccagcatgtcataggtgctgaatttacttgaactgttggaggcaaaaatgaggttcagaaaacttaaacatcttgcccaaggtgctagaatgtgaaccccataagagtaaagcctcaaactatcacattcagtacaatatccccaatatctagaagagtgctttgcacagagtaggtccgaaaaaggttgaatcagtgaatacaatgggtaatagaccaggacataaacccaggtctgccctattaaaaccctgtacttttttatattacatccaaaaatatatactgtgctttctcttcagatggtataaatctttcgccttttattatacattcaaaacataaaaggcgattgaacctatttaataagctcctcccacatgcccaaccctgtgtaagcaactttcttgtttatgattttatttaatctttccaacagtgctggaaacattgtatgaggttacacttcgcttgggtaaatacctgaaagcataaagtagacatttgtttaattttataagaagctgtcagtttcccaaagtgattaaagtgattgttccattttacaatcttcacaacaatcatgagaaagtctgagttgtgagaaagtccgagctgtcccaggaaattaaatctactttcccttgacagaaatatatttaatcagttaagagtagttgagacgattttgatgttttccttatctttccaaagggcctgcttgttcctgttttgtacacactgtctttagagtctgcttggttctgagctcgtgtttgacttcattttgaagtacaaagtttttgcagctgtaatctgatatgtggaatttggtcatgctcatgtgcatttactggtattttaagatatgaaagttcttccaaaattatagaaagaggaattgcagaggaatatttttaatagacacattcatatatagtaatccccttgtgatatgcatgttttctagcaaagttgattgtacattttatagagtattctattatttacaagtttaaggtatatcacttacttaaaactttggttgaggtaggtggcaagtctattaagatactgggcattatccatacataatggtatttctcctgaagatgtcatttccccctcatagttaaatttcccctcagagcatttttctagtcctggaacttagctgcataattgccacagccctaccaaccaaaactgcagaatttctccctgtgcttgggaattccgtgaaatttctctatcttgactatctataaagcttaatatagccaacgataacattgcagaagtagggactgccatcaaaaatacaatgtgacatggctttaaaattccataggagcccaaaaagaagtaaaactatttagctcctgaattatgaatttggaaatttgaaatgtttatatcaaatatattgagacactgatacctatatttacagcgaaactaaggaaaaagaatgctgcaggaggttgtaggaatagaagaaatgggtgtcctcttaaagcacacagtttttattctaaacttaaacattttaaaagttgatcattcaaattgtaaatgtttttcttaattattgaccacagattttttaaagtacagtttttaatgcatacaagtgtcatttctgtttgttttgtattactttcattttctcatagcaatttactactacaagggaataagtaaaaatttaggtacttatgagctttgaggatcagtaaaaaataaagatatatctgtttgtcttctagtttaaaccacataattagctacttgaatgtttaatattggttagttcatgtgtgtctcctcattacttctggcctccccaatggtaaaagggatggtccattagttaagcacattattttgagcaaagatcacccgttccctggctctgtgcataaataaaagcgtatttgtgccagttgagtgcccttgtgaattgtgatgaagatgtcatgcactaatttgcagccagattagattatgacaaacttagcagggatgacacgattttttgaatggatatttgaaatttttcatgatttgaaagtccctgagccctttattttcatgaatgattatactctgcaacaagggagactatatttaatgatgtgattagcagtttgtgacatatttcattttgtgttctcatgtaattgagttattttcaaatagtaccttggggagatgaattaactattttagtgccctaggatttagtttaatgaagtacttctctcaatgttacttcaatgttctagaacagtgccatccaaatatatatatataaaatgttgtgagacacatgttaagttttccagtagccacatttttaaaaactgaaaagaaataggtgatattaattttaataatataaatttaaccaccgtgtctaaaatgttatttcaatatgtaatcagtattttaaaaatattaatgatgtagtttagattctttttttaaatacatcttagaaatctggtgtttattttaaactcacagtacatctcaattcagactagccacgtttcaagtctagaaagatctccctgtcttgcagtctggaatcctcacactgggttttgctatgaaaattactaagttttgttttttcttagagtcacatttcactatctttaagtcttgagatcattggaaagggaagttttgatcattacaaaagccagcacttactgaaccatccactgtgtgaagcatgttacacctattcattatctaatttaattttcacagggaccctatgaagttagacatctctatctctatgttacacatgaggaaattgaggcacagagattgaactgtttgaggtcacattgggtagtaagaggcacagtcaggattctaatctaggtttgctgggcccacccccagctctctgctgagaaaggaatggagactccaggcatgctggttgctgagctaccaggagcctttccagatcagcgagaatggagggtgtgccgagcggcagcagccaggagagccactgctctcagcgctgaagcccacctgcttctctgaacatcctaggcatgtgattctctctctccagacaacatttagtttatatttatttatttatcattacatgtggagatgtttacccactattagtttatatttatttatttatcgttacatgtggagatgtttacccactaagttcatacaaacacatccttaagcatgtttataaatatgcctgagtacctatgcctcatattgttgtgatgaataaccccttaacctttgcactgataagaacgtgttaatgtcattcaaacatatttttaatgtggagttgttttttttttattttaataggagatttttttttttttttttttttttttgcagttgcaagatgtaatagagtgaaaacagagctcccatacaaagggaggggacccaaagtgggtagccattgccagctcaaatgcctgggtttatatcccgatcattgttccttcccctgtgctctcaggcaggcgatagatgtttggctatttctttacctcctgtttttgcctaattagcattttagtgagctctctttactacttgattggttgggtgtgagctaagttgcaagccctgtgtttaaaggtggatgcgtcaccttcccagctaggcttggggattcttagtcggcctaggaaatccagctagtcttgtctctcggtacctcctctcaacaggaaaacccaagtgctcttggggaggttggccgacaaccgctctaactgcttcctgctgaattggagtgtagtaggggtcatgcaggggtccttgggaggggtgccttcgatgtcatcaacattggagcatggtctagcaggctggtccaggggtcctcggtagatcttagtcatggactgcatctggggctccatttgaagaacgatttgtagttttacacctttgattctggaagagacaaacttaacaaggaggttaaagatacagggattcaaatgtattcaaataataccctgcagtgcaggggattatttctttggcacacgtcacaggccttgactatctgcttgatagttttgaaaaggcctggtccagtaaataatgatttggccatctgatgggtgctatcaatgcctaagtgaaaggtgtggtgaagggttttaagtaatttccattggttagctgcaggcaaaagtatttttccttctttcgtggctagccatcctgaggggaggaaactatgtcctcgtgaggttccccattcgatttcttctgctgagtattggggcttggtttcctggagggggttaccccataagaggggtccttctataagcatttctaatggagggtcccgccttgcagctcttttggcttcaatatccgcttggcggttcccttctatttccctttcctttcctttctgatgaccccggcagtgtaagactgccacctctttaggtttctgtagagccaataataatctcctaatggcttcctgatgtttgataggtgttctcggaagttagaaattccctttctctccatattgctgtgtgggcatggaggactaggtaagcatacttagagtctgtatatatatttaccatttttccttttcctaattctgatgcccgagtgagggctattagttttgccagctgaatgctagttcttggagtgaggggattactttcaagtattctattatcactgaccactgcatactccactttttgaagtccttttttcacaaaggaacttccatcagtatacaagttgaggttgggatcagtcaagggaacctctagaaggtcccctcgagcggcgtaggtttgagcaatcacctgttgacagttatgttctatcttttcttcattgtctggaagaaacgtggctgggttaagagttgcacaagtgcgcagtcgcagcactggcccttcaaataagagcctgatatttaagctaatggttgtctgacagccacaagtctcctttagcagtgagtatgctgttcacatcatgagatgtccacacacataagatctcttccttgtattattttaactgcttcggaggctaagactgctactgctgccactacctgtaaacaatgaggccaaccctttgccactacatcaattttcttactcaagtatgccacaggttgcaagctggtccctcagacctgtgtaaggactcctagagctattcctattttttttctgtgacatataaagaaaagtcttgccccgttggcaagcttaacactggggcttgggttagggccttccttagggcctggaaagccgcttctgcttcaggtgtccatcttactaaatgggtattggctttctgagtttccttaattagtgtatttaatggcctgactattttgccatacctgggaatccatattcggcagaagcctgttatgccaaggagccctcttagttgctttagggttttgggatgaggataagccagtatatgctggatacattcctcactgagggccctagtgcctttggataattttagccttaagtatttaacctgctgtaagcagagctgagcctttggtttggaaaccttgtagccacaagtggcaaggaagtttaaaagcgcttgggtggcttgatggagcaaggtttctgaatgggcggctagaagtaaatcatccacgtaccaaaggacaagagtgtccaagtatgagaactggctaaagtcttgggctaatgcctggccaaatagatgggggctatccctgaacccttgggataagacagtccaggtgagttgagacgttgggtttgaaggatcttcaaaggcaaagaagaattgagagttgggatgtacagggatgcagaaaaaggcatccttaaggtccatgactgtaaaccactctggttcctctggtatttgggaaagcagagtacaagggttaggtacagctgggtatagagggataagagcctcattgataatcctgagatcttgcactgacctccactgtctgttgggtttctgtactcctaaaattggagtattgcaggagctattgcatggttttactaggccttgggcttttaggtccttaacaattttttggagtccttgttgggccttgggtctaagagggtactgcctttggtagggaaaggaggcagaatcctttagtttaatttgaacaggacaggcattctttgttcgtccatattgtccttctgttgcccagacttcaggatggattaattccttcctcaagcaggggacaacaaatggatgttctttctcctatgttcaggtgtataatggcccctgcttttgctagaatgtctctccctaacaagggagtggggctttcaggcataattagaaaagtatatgaaaagaataaagttccccagtcacagcttagtggctgggagaagtatctagtgactgcctgtcctaggaccctttggatagtgacagatctggaggacagttgtctgggacaggagagtaaaactgagaaggtcgtgccagcatccaggagacagttaacctcctgaccctcaatggtcaagcatacccggggttctgtgagggtgatggcatgggctggcacttggcccgggcaccctcagtcctgctgctggatcatctggttagtggcttctgactcggaggactttcatcccctggggcagtgggccttccagtgattcccttgacataagggacatggacgagggggcggcttatttctatttggacaatcttttttaaagtgtccttgtagaccgcactggaagcaagccctattagcattcagtttgcccagctcttcccttttccagagcctaataggagtcattttaacagaagtcattttctttttccctggagtctataagtagggatgtggagctgggaatctcctaactatagacataggtaaggagaaagaaactagcgatgtcttccaagcatactttcttgctagaagactgaagagaagaaaaatgtttttcaatatagttggtcaggtgaactagagtcttctcttggaagactttgccaagcctccctgagtttgttagcatactgagcatagtaggaactagccctttcctttgggctgcttccatttctccatctacacagcaaataagagaaggggaggagaaataggagaggagcttggaggctttctgcccacctctccataagttagctgtcatatcccagggagacagagttccaatttaaccaagtgtgggacatatccctgagccatctgagcacctgatgtataagaagagattgctcgaaagactatcgtggttctcctgggatccgggcttccaaatgcccaagatttggagaaaatgacttattatgtatgacccagaaatatgatgtgtaatctttgatatgatgaaaacaacccattactttagcaatccaaaaattatactcattacctgagtggattttggggctgagtatttgctaaataacctgaatcttcagttataattgttcagtaaagtatgaacagggaaagagtaaactaacagttcctgcttgtcctacccttctagcctgcaggttctatccagtcatgctggtgtgagccctgtcatatctcagatttcatccctgggtctgagcataaagggattgaccatcttaagttttggcatcccatgatagacattcaggacagtgtagataacttgtaagaaggaagagtcattttcttttcagccaataagtatctgctgagtacctgtgtaccaggtgctcaggggagacagaagtatatgtgacagatacatatctgggaaagaacaatattcaacaagataccatcaagtaagctctgtattgccgtttctactaagttcttgaaaatcttgtagaatattaaaatatgtttcaattatattagtaggttcttatcagtgcaaaggttaaaaggttcagtaaagaaaaaaaaaaagactctggagtcaaaccaacctcatgtcaaatgccaagtctcgctagctgtgtcaccttgggtacagtacttaacttttttaagccatatatttatctagaaagtaggaacaacgatagtccttataggattgttgtaaacattaaataatagaataaatgtgtgtggttttaaaatgtgtctataaaaaccttttttacaaaagaatcccaagtgtaatatgtgcagatacttcttctccaggaggtagagaaggagtatctatatccctgaaccttaagtatgggctagacgtagtgactggcttccaaggaagacatgtggaaagggaaaaatactttacctggagaaacctggtagataactctttgaccaaatgatcaagttaacatgatcagagagaatgtacctcctgaaatggtatgatgaaaagggcacttcatctttgtggtaatctttccaaaaactcataaccccagtgtgaccatgagaaaatacatcagacaaacccaaattgagggacatttttaaatacctgaccagcactcctcaaaactatcaaggtcaagaaacacatggaaaaactgagaaactgttccagactagaagaaacatgccaactaaatgcaatttagtatcctggatttggatcttggaagagaaaaagggacattaatgaaaacattggtgaatctgaatacagtctagagtttaatgagtaatagtctactaatgctgctttcttaggtttcacaatgtaccacagtaacataagataatattaagaaaaaaaatgaaaccatgttaagggtatatagaaactccctgtattatttttgcaacctttccttaaatctatcataagtccagaaaaattattcaaaatttttaaaaaatttattttaaaaacatatgttcacaaattctttcataccccttccttcaaaagatagagagattgcctctccttgagtaggctgtatttagtatttcacttctaatgaatacaatgtggcataattgataatatgtaaattccaaggcaaggtcataaaacctgctgtctgggatcacttgctctggaggaagccagctgccatgtcatgaagtcactcaagcagccttcttcacaaagcgacccacagggtaagggactaggttcccctaccaacagttagcaagggactgtgtcctcctagcaacagtcatgtcagtgagcctttttataaaaggaccatccagcctcagtcaggccttctgacaattgcagtcctggctcatcgcttgcctaaaacttcatgagaaaccttgaaccagagcactcagccaagtggctcccaaattcctgaccacagaaactgtgagatactaatgtttgttgttttaagccactaaactttaaaatgatctgttatatgtaagtagataacgaacatgagatgaaacatggttagcaaatcacctagtgtatataggtatgcaatgaatttttgttcctactatagcgttattgttcaaaaactgttatttttcttcccctgatattctggtcctcccatttcctctctacttggaagagtaattcttaaccctggctggatatgagaatcacttgatgagctttttaaaaaaaaaaacaccagggcccaaagccctagaccatattaattgaatcacaaattttgggatgggacacaagcaccaatttttttaaatttattttttatttcagtaggttttgggggaacaggtggtgtttgattacatgaataagttctttagtggtgattcctgagattttggtgcactcattacccaagcagtgtacactatacccaatatgtagtcttttatcccttaccctcctcccactatttcccctgagtccccaaagtccattgtatcattcttatgcctttgcatccccatagccaggcaccaattttttttaagttcccttcgtagttttcatgggcagccacgataaaggactactgctgtagaaacagtaacattcctgtaatcccagcactttgggaggcttaggcgggtggatcacgaggtcaggaaatcaagaccagcctggccaacatggtgaaaccctgtctctactaaaaatacaaaaattagctgggcgtggtggcgcgtgcctgtaatcccagctactcgggaggctgaggcaggagaatcgcttgaaccagggagtcagaggttgcagtgagctgagattgtgccactgcactccagcctggtgatagagcgagactgcgtctcaaaaaaataacaaaaaagtaacgtttaaatatgggctaccaacattccggcttctgaacttaggagtagaaagttatatttcttgatattttatcaaaactggctttatgcttaagagaaaatgtgttatgcaaaagagattcaaaaactgtccattgaaatagcatgtaattatatgtagccttctttgaagaaaattaaacaagctttactataagagtttgccacttgacaggcagaaaccacaggacaattctatagaccttatggcaggaagcatactatttgtagacagtatttcaaagggtagttaatgcttgcttggttagtatactaaactggaattccttccttcctgtttatattttctttctctttgtaaagcatacataccaaagcaacatttgctgcatatgagtttaagaaaatcacctgctgaaggtaattttctaagaaaaaataaattactagtttgtttaaatagaaggtctgcatattttacattgaaaacatggagccaggaaatagacaacctacaattagtgtggaggagtttatcatttcatcccattgtataacccatggaaaaaaaataatctatgtgttgtggccaggaaccaggtctctaccaaagtgagttttgacctttctgttttgtcatctgggcagctcatttaccaaaagggagaagcaaatggtaattcctgggctaagcaggctcatcgctgtccaatgaaactcctttacttagatttggacactaagttgaatatatttaaaaggcatttgttgaacatggattttgtgtgggaactttagaagattttgaagattctgcccctggctccacaggtttgtaacctgtgtataggatgtactttgagtttttgccttctaaatcatgagtaaaatgcaagttcaaagaacgataagcatggatcagtttggacagaaaagatgtgtaggagaaggtagcatttgatcttcataaataagagtagtaggtctttgatatttgacccaagtcatgggtatagtttggataggtaaggaggaaagagagcacctaagccagaagagaatcacaacagcaaaactaagcatcatgtggacagtggtgacatgactaacttatataaagtggaggtttatttcaaaagtaatggaagtgattttgaataagtagatcaggtgatctgatcgggtgatcttcagatgatgctgaagccttgaaggccaaggtgaggacccagtaaccattgaaagttcctgagcaaattgaaattggggggatgtgtacagaaggaaggggagaaggaagtaacctgcaggatggtttgaaaagaataaaacagtagaaggatgaacaaatctgagacataatagagaaaattaagaaacttgattaattggaagcatactctccttttaagggatatgtcctaggctgaaggccagctccaaatggcagacagccataaatagatagtgacgatagtgaaaacacaatcaacaaataacctactttgaacatttgaatctaaaatttgtaaattaggaatataattttataatcttatagctcaagtggaatacatgctaaaacttataaaggtgttgtggtaaaatgctcatctttctattgttgataaactcaaactgtatttcaacaggaaataaggttttatctgcaaatatacatatacttaaaatattccttttaaagtgacagcatcacatctggcaatttgtttccttcctttctaatgaaaattatctgaatttttaagttccagtttatcttgttcagtattatactgaacagttagacatctaattcttgttatggatagtcatagtacttcaaatataagacttccttatatatttgaaacatttcttcctttcatcttttaggtaactaaccattaggtaggcatcctgatataatggtaatattaaacaatccagaaaacgtggaaatattcccagggtcctgtggacctttccatatgactgattgagtatccttacaacatggctactggttttccacagaactggagtctgtgtccttctctgaagactaaagagaagcaatggccagcttgtctagtgatctggtcctgcaggaaactgcttgacagtctctgtagaaacgatttgtttctatcaatagtggtttctcacattttgctatgaccagttgacttgtcataaatgagtagattggcagtttttcgaaacaccatctggagaatactggtttgtatcatatgggagtggttttgaataagttatactatcagatccatagcaaaaaaaatgcatatcgtcttttgttttctgaggtgactataattctagattagctaataaaacaatacaaagatttccacttttttgtagggttcaaagtttaaaccatccttccctctgagaacaataaaagctggacaaaatatactaaaaggaattgctcagagacatgggaagtctaaaattatgggaaaatatggaaaatgagtaagaaatagagaggtgaatctgccatgtagggccacttttccactcagatatcttatggtcctggaagaggtaaccgagaagctgagaaatgtagcagggcttttgacagccctgtaggataagggaataaaatttgaaatccagaaaccaaccaaagctgggagtgaagctagtaaatgccccacactttggattgagacatggctggctactgccaggaataagagtgaagtagattggcccactcagagtctgaagctcaacttcaaatcagttttaatccttgaaattgaatcaagattatcttggattgctggtttctatacctgccaatagcaaagtaaagtacatctcaaaaaaatgtgttttatcaaagcctcaaattatttctacagattttatataaagtatccactactcaggtaataataaccaggatcatgaggagataaggcagtgtgcatgggaaaagaaaacaatgaaaataacagataatggaaacacagggctccacataacacatttactatacacacttttaaaaatgtttaatatgttctatgagattaaaaaagactgggaattttagaagagagcttgaaactaccaaaataaaccaactgaaaaattcaaaaactgaaattaaaaacttaatgggtgggtggatttgcttttattgctgtgttcacaaatcaccccaagcctcagtgacttaaagcagcaaaaatcatttaatctttctcataggaaagattaaatgagtcgagatttaaggattataatttggctggttctctttttttttttttttttttttaggcaaggtctcactctgtcacccaggccggagtgcagtggtgcaatcttggctcactgcaaccttgacctcctggactcaagtaactcctgcctcagcctctcgagtagctgggcatacaggcgcatgccaccacgcccggctaatttttgtatttttagtagagatggggtttcaccatgtagcccaagatagtctcaaactcctgggctcaagcagtctacccacctcagcctcccaaagtgctgggattacaggcgtgagccactgcacccagtttggctggttcttgctcaagatctctcatgaggttgccatcagatcttgcctgggggcagtcatctaaagacttaagtgagactaaagccatctgaaaggagctccctcatatgggtggcagggtggttccttttgatgagggcttctccagagggctgcttgagtgtccttatgacatggtggctggttttcctcagaactagaaatccaagcaagcaaaacagaagttataaggtctttggcagccaagcctcaaaagtggcacactgttgcttctgccatattctattagtcacacagataatccctcagctactatgacagaagactaccagaagtcccttggtagctggctactatgatggatttaactaaagattaagcagaagagaaaattagtaaccaggaaaggggaataataaacagaatagaacaccaagagacaaaatcccgaaaatgggtgtagtatataattggattatcataggagagcacagagagatgaaggtggaaacagtcatatatttgaagagatgatgaccccaaaccttccaaaaccaatgaaaaatctcaaggcacaaattcaggaagccttgtgaaatagtgcaaaaccagagtttctgttatactatgtgcacatataattggtctttagtatttttagcctctgtttgaagacattatcattagtttgaacatggctgttcatttttattttggaaaagtctcaccttcatgtgatatgcaatgttagcactgtttgtgtttcattcttgtttctagcccttggtaactaacctttggatcagcctgaagcactataaaaagggaaaatgtgcattataacagagaataaaactccacttaacttgatgtgtttggggggttttctggtttgtttgtttttttctagagatggagtctcactctgtcactcaggctggagtgcagtggcatgattatagctcaccacagccttggattcctgggatcaagaagtcctgcctcagccttccaagtagctgggactataggcacatgtcaccacacccggctgacttgatgttatctagctataaaacattcagctattactaatgatatagatatctttcatacatatagaaagtagtgatagttgaaattcataaagatgattttgaagtattgaaatcccattagtatgtatattttaatgttatggtgtatttatgatttttttctttaaatacatcatgatgtagtccaggtctttaaaaattgatcatgtatgtataccattgataactgattatttgaatcaccacatataccattccttggtcttatatcagcaggagttaatttgatatatacccagctcgtttatttagaaaaactgccaattttgcttttaccagctgtttttaagtggcaagtattttaaataatagatttaccaatagaaatctattggtagaaatctaccaatcaagatccctaaattttggtatggattattaaacagtagatgctgtctgtttagcaatggaacctggttcttgttcatgcaggtagggacagatggccattctggcttcaaatgtcaatttggtggcaaacataagaatataactaccttaaatcagattgggtttaatccattatctcttagacgggtggttcctcattcatttaaaagtattctccagtgaactttttcttcaaatataaatttgaaataaatgtcttaaaaagttggtttcagttatcaaattatatgaatctatttgtttcttcagtttaatcagaatttgaatatatgagacattcatgtcacatctttcatttctcaatttataactaattcaactcatgttgtttgtgtggctaccttttcattacagagattaacttctccctggtataaaccaccagctttactaaaccagggcaaagtttagaagtaatgttgtttgcaaagttatagctttaaaaaatggaaggagatgctcccaccattggagaaaaaaaatctaatctattttttagaaattaaaatacattattattgttggtaattattatactttatcacccgtgaccacaattaactaatgcacaacttttttttttttttttttttttttttttttaagatgtagtcttgctctgtcacccaggctggagtgcaatggcacgacctcggctcactgcaacctccgcctcctgggttcaagtgattctcctgcctcagcctccctagtagctgggactacaggcacgcaccaccatgcctggctaattttttgtatttttagtagagatggcatttcaccatgttggccaggttggtctcaaactcctgacttcaggtgatctgcccacttcggcctcccaaagtgctgggatttaaatgcacaactgtttaaatgaactaaacagcatgatttcatgtatagtcatggagcacacaaacaatattttctggacacacgtgtttcttcttttaactgtaaaagaaaaaatgatttcacaggaattacattatttaaatctatttccttctcatgtgactgaagtttaaagttcttagtgctgcaatcgcatcttctcaggtgtgttctgtttccgtccacctatgcataggtgttggtgttgttcatgtcaagctgcctaatttgtttagtaggtgttcgaatggggcatacaattctctagacatgtggcaagcacacgggagaagccaccatccaggtgattcgcagcagtaaggctgatcagaaatttgatcctggctcaggggggttccggcagtaatcaaactctattcaccttgggtgagatttcgttatacctattcagccctgcttcagtgaaatctcactcaggaaaatagattctgtctccaactggaatctcccaaagccatgactatgtttctgatcagcactacagctcagatgaagcgttcagttacctgccagccagtcagcatttccccagactgcaaccagtgttggaaccaatctgcaggagtgggtggattggtagtgaaactggttctggtgaaaaaacttcaaaaaattttcacagaaaaatgattgactcccacttaattcaatgaagcaggattactctctgggacccaagaagaggatgccaggtttcagctgtggtggaggggattctaggtccctgttcttagtcctcatacccttcccattattgagctccttctgcacgccaggcagtaggttcagaactatatgttatcttacttggcacctcacgacactatgaagagtacattatcaccccatttatagctaagaaaacaggctcagcgcaattcagtgtgttatctgaggccacccggcttttgtggtatagattgtacccaaatccaaatccttctaacctgacagcccccacccaaccactcattttgccacccttccccattttagtagtttacatctcacctcctccatctgctctttcttatctacctgtctttcatcctctctgttcctatgttttcttcccattctttctttcccttaccttcatttacttttcttttccctaaaaccctagctcaaatagttcaacagaggttacttgaggagtgaggggagggaatgatgaaaactgcaggtgtattccgtttgttccttcgtcttccttaaatattttcataacggtcgtttcggttcgtgcaaagaaaaaaagaatgaatcaactcttaatgactgcctcctactgctgagctctctggactagtcacttcatttatattttctcattttctttattccttactatatttctctgaagtgtcattcccatttcatagttgaggaagctgggactcaggaggattaataacttgtccagcgttacaaagtgagtttaggagccacaattcagattcagatttattgactccaaaatttttgcaggttttaccatagcatgttgcttcagaaataaacagacctggctgcaaaccccagacccaattactctgtgcctttaaacaagttacttcacttctttggtttttgtcacctataaattagggataataataataaatacaacatggaacagttacagtgttaaatgattgaggcatgtaatttgccttacgaaatgcctaactcatggggtgcccttaagaaatactactctcccccacctcctttacaaaattgcatgtctaatgcagtgagaaatgccaggcgtggaagatattctaggtttgatcatctgtggtttcttggccaaaacaagaagtttgagttctacattttattttgagttattaaacattgccatgcatccacaagagctgtattgtggcctgtagagaaacatagcatagtaatcaagagtgcaggctttgggcccacagctctgacctgaggcaaattccctacctctctggccctcagtttcctaatttgtaaagtgtgtatatgtgtggaggtggcaatgactactttgtagggttataatttggattaaattagataaaatatataaaacatttagcatagtttctagcataaaacaagagctaaataaatgataatgattactatattatttaatattattgctgtggtgttttttatactcttgagctaaaaaattttgaagaatcacacagactgtaactcatgcccttgtaattggaccctatttttgaagaatgctggttacctttgtagtttggtaagtgcagcaatcagtgacttatttactgataagctctgctttcctcttgctcaggagctgatactaatgcaggcaatgtgttatgtttcccacgacacccttgaataaaatgccatttcctcaggaacagctagaaataccgatgctaatttttcctatgctcaggaaaagcaagagctctcctgctgcagtgggctggaaggagctctccagaaatattatgtcatcctaatttgcactgccaagggatgagctcatcggggcggggtctcatgaggctgcagctgtgccagttcctcacttgtatgatgtgcgtcctccaagctcgcctctccctcgttacccgctccatccaccccctgcctgcctgcgccaaacaagagccactgcatgatgaattatttaaaacccgaaggcgaactcttgcaaaatataaccaggcatcagaaggcacaaaaaaagcaaactgtgcgttttggttattttgtattatttttaaaaacgaaaaaaaaaaacaaaaacaaaaaccagttgcagaactgctgttgtcactgagaagagacttctgttgtttcttttgcatctccttctttgtctgagagcagaatctttcccctcttccacttaaaacaacaacttgatctatgactgaaccgatgctgggtctgagccgatcgtaagtctggccctgagccacatggctatagcaagggagaaatgtgtgcgatttcccacattcttttcattataatatgtattgtgagtatctttatttaatctcttgctattctacctggcagtataggttgtggttaaagtcaggcaacctaagtttgtattccaacacagatatatgtactatcattatgatggaattgtgttgctgctccaggcctcagtttctccatctgtaaaatggggataataatcaatcctagatcaaaagattattgcaaacattaaatgactattacatggtaatctttaagaacagtgcctggtccatagaatgtactcaataaatgagtgatcattaataatatacagatgcataactgctttattaaccattataggaaactgtgtgtgtctgtgtgtgtgtgtgtgtgtgtgtgcatgtgtgtgtgtatttttaacatgaattggaagatgtaaaggcattagatgatgtactttcaaggaaattattctctcatgaaaaaggcctgttttgtttttacctgttgttacggaaatttttaaacatacactgaaataggatcaatattgaactccctgtatgtccatcatcccagttcagtaattatcaacattttggcaactttgtttcatctactgtctccaccctttttttcaaggtggagtattttaagagcaaatcccagacattatatcattgcacccataatcttttgagtatgtacctccaacagaaaaggatgttatttttaacttaaccacagttattctgacacctcacaacattaaaatagttcttcattattaatatccaatgtccagttcatcttcaaatctcccctgtagctgaaaagtgtctttttacaccttcaaaaaatcatagaaaatattcctcattgcttaaattttttaaaaaaggaatttctaaatatgtcgtaaattcttgcttttacagagctgaatttcaaactgattaaaaaacacatgtgttgatatttatgcagtaagaaaaaaattgcaaatttatttttatcattgttaatctgaataatttgttttaaagtaagaggttctgtactggttaaagtaactaataaatatgtattaattttataattattaattttatatctgtaagtcagatggccaatattttgatatgctctgtatctaaacatacgacttaaaatcttatttaaatcaacacggtatataaacaagaccataatttattgactctttccctattgtagacattaattagcttgtttcatcttagatttaatgtgtgttactcactacctacattagacatttgtttagaaaaatatttaatgttcactatttcctttttaaaagaaatttcttttacttttaagctgttcctgcttaaatgtatatatttaatttttagaaaatacatctctctccatttaagggcaagctctgtatggctccagatgtgtttagaattcatataagcattgttaacagtaagcccccagggagacatgagctaggtccacaaaaacttatatgtacagtctatttttcatgaaggatattgtctctgtttcattgctgactctaagtttgcaggatgacatcatcatcttggacaaatcaaggtcattcagaagcctctctgctggggccctcattacttttccagcatcgtctcccataacttcctcttttccccatcccctatgtatctgagactccaaatgcattagacaatttggcataatctttgtgttttcgtgtccatgttcttcttgttcttaattccatatacgtgatgtagggctgctgtattaagtaaataaaaatacaggaggcccactgaaaattgaatttaacataaactaaaaatctatggtcattgtttatgttccaatattgtatgggatatacttatacaaaaattttgtttgttatttatctgagatgaaaatttaattggaagtcctgggttttatctgacaatttaacctaaggaaacccttcaaggactggccttttttccagaaagccttccccactatactccttctgccctcctaccacagtactttgctggaacctctaataaaatatttaagtgccctaacatttcatagtgatatgtatgtgtctccctaccactttgtaacacaaacactatgtcttattcttcaagtcctaggatttagcatttgcactttggtgaaggggtaggaggtgttgctctaaaagtagatagagagtaggtcataaacactttataaaccacacttagaaatctgcctttaaatgataaacagtggagagccactggaaattgttcagacctggaatggcatgattttatttaacttctgaagagactgcttgaacggcattgtggggcgcagaatgaatggagcagagactagggcagggaaatcagttaaggggttatcgttttgaggggaaggactcggcagagagacaatgagtgcctgaattaggcagtggtggtgaaaaatcagaatggagaaggattttagggatttgttgaagtaaaatcagtagaacttgggttcagtcgggtataaggaggaaagaaggggaacgaagcctgacaactcctaagtttctggcttctacaaccatttagtgaaggtttcattaatggcaggcaggagtacagttttagaaggtctggactggagagacatttgggggaatcatccgtgagtatcgagagttaaagacatgccaggaatagtgtatacaattaaaatagacaggggcttgggaaatgccagttcgcagatatatatttgtcataagtgaactaaagaaaaggtatatggttggatgagcttaaacccagcatgagctttaaagaagaaactttgagttattaacatgaccttgctgttctgcatccagaatgtttttatagataggaagagtcatgggttttatttgatttattattgacaccatctttgactccctaaaggagtatcacttaacctctgtcaaactacctcctacatatttcatcagaatttgttaaagactaattgaatataatggagaaagtactttgaattgcatagaagaaaaaatatcacaaaagtcccagcatcaccagataattattgatgatgacatactatgaaaaagtaatcccatctaagaatcttcaaaacaacaccatttttgtatacattacttgcgtaaatataatacagttccacctaaaaggcttgtaatggttttagaaagtgtaaaagctgatgagaatcagtgtgagccaccaccaaatagcatttccctcattaacaactaactaatagtgctaaaggtcatttgaaatgttggaacagttgaacatctatcagtcggctccctggattaaccagtgttttccattctgttgcccaaaattaacagctgacaggctgttctagattggtggtcttcaaactttttgctcatgaatcctctgcaaggattttgaaaaccatgtaccctctcgcattttaaagttgacatcttagatttttacattttaggtctaaatagttgaaaaggatgtaatattgatattttaactaaaaaaatatagtattacttttaaggttatccagtggaatctaaataccatagagatttgattctcaccatcatccatttttaaaaatacacaaataagctcttttttaactggcagaaattttacttgtttctttttgttttaactcattttccatttcactttctccgcagaactttatcctatttatgatttcaatgtttttttaccaatcacatacttctctaaaacacatttgtaaatttcagttaaaatactttgcatttcctttgactatataatcctgacggtttaacgtttttttctggtatgagttatacttacagttactagtagtggatatttgatcaacacaacatgtattaattaaaagtctgatgaagaagtgaatacaaaaaataaaattgtcttaaaaccatgacttaatgagattgaggagcttttaaaattcatttatcttttgataaatattatatattactggaatgacactattcagctttaattttattccctttttaatgggaagaaaactttgtagttttgttattagtatcattcagttatttgaactggtttcacaagagcatgtcaaatatgacatagtactgtatcttcaaatattatttctaggttatctttcaattttcttgaaaccaaagaattggaaaccacatgcaaaagaattgtttttattcgatacttagggtcattcactgtttgctacaccaacactgatcttcctaattgacaccttgattgccaccctggagggctttccttcctgaggcaattcacaggaagacagataaagggtgccttttttcttaaagtgggagagagtggtttgggatgctgacaaagagaacccactcttcccaacagtaaatatattctccgatcacttgtaggagagagaacacagtagagagtgtacatagaagttgaggagtctaaaaatgcattatttctataaaaactaagttgattgctttaaaaaagctgagttgcttttaaaattgatgacaaactaggtgctgcaaacactacaaaagatggaaaatattttttaaatgtaaaggattatgtacttcttttgcttttaaataactttaaattcttgtttcactttaaatcacaactaaatattttctatatttcatgatttatgcagtgataacttacacttattgagaggtgaccatgtgccaggacctggcctgattaatttgtttgtattcgttaatcttcatgacagccctgtgaggtaaatatcttttcatccctgttttacagatgaggaaattgaggtacagaaaatgtaatctgcctgagattacgtagctaataagagaaacaaacaggcagtcgttttttgtttgtttgtttgttttgttttgttttgtttttttggagtggggacagggtctcactctgtcagccaggctggagtgtggtagcctcatcttggctcactgaaacctctgtctcccagactcaggcaatcctccttcctcagcctccagagtagctgggactacaggcatgtgccaccactcccagctacgtttttttgtatttattgtagagacagggtcttgccatgttgcacaggctggtcttgaactcctggattcaagccatccttctacctctgcctcccaaagtgctgggattataggtgtgagccacagcgcctggccaaggcagtctttctttggagtctatgttcttaataagtaagcctctcctctaaaaccttagcctagattacatttaaattttgagttaaaaataaaatgtgtaaagtccatatatgtaacatttttatggttttcctctttaatagcttttttggttaactgaccaagcatgtgtactacagttcttccactggactataagtgttaaataataatagtaacagttttataaactatgagccaggaatgatgtagaacatccaaaaactgcctagtcaatttggttacaaatgcataataaatcattttgtatatggtggaagtggatattaaaaagttttaaggaactctgagcagattttcaaccaattgaaaattttaaccaaattttacatatttctctgatttcattatgcctttgaaaaacaattctcagaatacctttaggcatactgcagagtaagattaacaatataaatatcaatatattttaattaaactcttgtgaaacttcgaatgcaaaacatctaggactacttatgttctctcctacccagctgccactcactccttccacaactcccagtttgcatttcacgtatctaagatgttcagaccatgaacatctgcatttttcttcctttttattataaaggaatctcaagctctctcctctatttccttaaagttaccacatcattccaaaataaattcagctttatccagatttaacatttaaattgcaaatctctgttcaaacatctactacagttcatactctctattagactctgaaggcagagcagtgagcataggagacagtgctgagcaaaggagaatgtgcttcctccctcacagatcctataggctagaagagggtgtaagcaattgacccacaatcaaagtacggtgagataagtgatacaagaagggtggtggtcacacaatgcgaatgggaccctggcggttgtgctactctgcgggccccattgatgagccattgaaaactcagcctttgtgctaagtccctggcccctgcctggcccaggcatggcaggctgcctgttggctgagtgacttcatgagctccctgggtgactggctgcatgactgagattggtgagactaaccaatgggcagttgcatttaagcttccaagtggctgtagctgactatggggctttggtccgcttctgagttttccctctgagatgaggtgagggctgtgggaatacagttctttgtggtatttccttctttaccctcgtggggaatgagaggagatttctgttggtttcctgtagcccacccatccatggttttgacagctcttgctgctgctgtggcttagaacaaaaaaagggccatgggcagcagaagaacaattcctttccttacccagatagttagccatctctattgctgagttattcaaatagaactttctagactaatacagaaagtgctattagtatatataggaagttcctgtggctacaaaacagagactgttgcataaactagtcttgaaatttacctcatattttagcattgcctatatataaacattatgagaagaaagttcagaaatcctcttataacctgcatgaccttggctgtgaaactttgagaacaggtaggaaaagaaaaagaaagcagaagtggcttggtggctctggctaaaagccttagggatgacttccaaaggagatgggcagagatataaatctccgtacaagggagcttgtcaacctcagatgccacatggactgaggctgatgtccaaggagtcacatctgggtgatgggggcacacagcagggggaatgcagtgggaagcagtgtcctgggaaatgcgtggattttagaggcaggcagacagactcgaatttaaatcctggctttgccatttaatagctgtgtgaccttggacaaattaacatctttaaagctcttcacttttctcgtggtgttattgtgaggaggaaatgagacaacgtgtatagaatattagaccagtgactacattccatcaatctcggtactttccatttcaagtaagctgaatgatttcccaagatcacatccattatgtggaaaccagttcggagctggaaggcagattcagttctcagcctggagtgtgctcatttctcttgtgctcagtaacttgcttctgccagctgcagcagtgacctgctttctcccatccctcagctcctaacacatttcctaaaaacagtgacaagcatctgtgtgaaacatccatgaatttactaaaattcatagtgaaaaggcagaaaatgcccccacagaagatttatgggagcaagaagcccttctgagtacatgtgcaagaccccaaatctgctgcttacaatagagtagcagctcctttgtcctggctccttaaagctttgtgataattgaccggtgcacattttgaaaagggccaccctgccattattgccctagtaactaacagttatttgtatactaatagtagttattgttactttgatcttttctggaagcatttcatggaagtttgtcaaactattttggtaccaccacatgaagcccactaggtagtctttgatgataatcaagatgtcactaatgacttcctctgtttattttaaacctcagtaaattgttcattatccaattgaaaccaacaaaaatgtatagatggccaggagcagtggctcacacctgtaatcccagcattttgggaggatcatttaagcccaggagtttgagagcagcctgggcaacatggcaaaaccccatctctacaaaaaaattaaaaaatttaaaaaattagctggtcatggtggcacgtacctgtagtcccaactactagggaggctgaggtggagaattgatcgagcctgggaggtagaggctgcagtgcaagccatgatcatgccactgcactccagcctggacaacagagtgagaccctgtctcaaaaaaaaagaaaaaaaatgtagagtgctcactctgtgcaagaaatggactaagtcactgaagaacacaaagatgaggacaacgggttattgccaaccagaactttacatgtggggaagaggaatagatgtgtactgtacttggaaaactaaaatacaaaactgtacaaaaattgtatcagctgttggcataataatgctgagtagcaagccacccccgacttaatggattaaaacctcagttacgtacttatttattaattagcaggttgtttgggggtgggttgatctagactggacttggcaggtctgggcttcaaactgcagtttgggtttaggttcactcctcatgactctcatctgccttggatcagcaagccagcccaggcgtgttcttctcataacaatggcagaagtgcaagaggggcaaacagaaacatgtgatgctccatgaagcctagattcagaacaggcacaccatcctgtctgtccaattttacgggctgaagcaagtccctagccaaccccaacaacaactggtgaggaagaatactctacctctagagggagaaactacaatgttagctgataaaggggatggagacagggaggagtgagaaacagagaagaatgatttagccttccacagtaagataataaaagttcaaagcattagggggcatgatatagagattaattaattttgatggaggatatcagtgttactttctggagaacatggcatttgagataaccttgaagagaaagcagaatttcaataagccaagctgggggtttggacattctagatagagtgagtaccacaaagaaaatcataaaccatactgactttaataaaatgatgaaaaatcttatggagtagctaaaaccctagagcacgggatcattggaaggtggagacaaaaacgaggaaggcacagcttagcaggttttaagcattttgggttcatttgagaattcgttgaatgctctgaagccttaacctagaaaaatgcacctttgcacactaacacatttgtatgcaagttcagctctgtaaatatgtgagagagaaggagacagttctagatgggaattagctgatgaatggcctcgaatggcatgctaagaggtttagctttcattcagtaagtaatatagagtcatcaaagatttagtttataaagggagcagtgtcatgatgagagctacatttcaacaagatcactaggaggcagtttgaagaattgattaaagtaaaaaaggagaaaaaaactagtggtagaccagctagccaactggtaataatcccaacaagaggacagaacctaggaaaggggacttaaaaagcagggaatgcattggcaagaacttgcagaaacagaagcaaaagaacctagagttcagattggcaaagaggaagagggaggcagcaaaggtttttgtgcacattctctctcgaatctcacaacgccctaggaagcaggtattactatttccatttgtagttgagaaaattgagttacggaataagtagaaaaacagaacttcaacccagttttgcagtctgcagagtctctgtttgccccattttatccttctaaaatataagcttcaggaatgcagctcgctgcatcctcagtgcctggcatgaacttgcacatagtaggaaccagtgaatatttacagaagaaattataaaatgagtaagtggtactgcatgtgtgaatggtggtgtggcagagcaaccagagagttgaacatctcacagtggtacataacagccctgctgttgatgcaatgaccatgaagtgatgggtggactacagttggatttaagacatttcacacatgtattttctacttaaatctttccctgccaaggttttacattagctaaaagtgtcagagaggctttaaatactggagctatttaaagagtatagagtgcctttgcaacttaaaaatggaagtgtgataaagtttaagcagtgttttaattggcctttcttagctttccctgaggcagataaaccaaacctacagaggaagctgacagtgaatagcagcaagtaacaaatcttgctgagcagcacttaggtattgtttctgacagcatatgccctccatgtagaatttaatataaagctccttcagtaggttaaaactgatgaatagtataatcccagtctgaatagattcttgagttcttgttttcagattttaggaacagacgtgcaatcccaaagatagagaacagagaccagtgccaaaaatggaactattttgcttgaacttgctaagttatgaacaaaaacagtttaaaggacttaacatgtattagaagttttctgaacatgcaattagacatctatccaaaaactttctgtagatcagatcctgacatcataagcttcctatgcacagtcagtatcagttataatgtttaggaatggtaaatgtcttttaaatgacttgggctccaggtgctagaaggctaagagatgtcttgggacgatccaaggatagagggtcacagatgaactatgattccttttgtgagttgctgatttctgtttaagtgacctgatttcctttgaccctatcaagagaaagaagtgctttagaaagcaggctgggcagaagattgatcctgctaagtgttggagaaaattcaaatgtttcttgacctgtgagcaccaaggcctttgaagttaactcccataattccaatatgtcatatgacttgatttaatgctcctgtacgtggtgtctatgatgaaggatgaaggcagttagataatgttaagggagcccctccaaaggtgttggtagaacaggagtcaggagggatccatctgttcatctctaaatcagactcaataattcttttttttttttttcgagacagagtctcactttgtcgcccaggctggagtgcagtgacacaatctcagctcactgcaacctctgcctcccaggttcaagtgattcttgtgcctcagcctctcaagtagctgggattacaggcatgagccaccatgcccaactaatttttgtatttttagtagagatggggtttcaccatgttgcccaggctggtctcaaactcctgacctcaggtgatccacctgcctcggccttccaaagtgctaggattgcaggcatgagccacggcgcccagcccagactcaataattcttaatctgactttgtattagagtctcctggagagttttcaaaatatcagtgccccagccccactcccagagattctaatttaattagtctgggttgaagctgagcatctgtgttatattttaaagttctccaaaggagtctaatgtgcaagaagttttgagacatgcaggatcagaccaatcttacaagcaagactgggcagtagaatagggaacctctggccccacccacttccttgggcctcatgctcccacgtagcttcacatccccaaaacagaaattggaagacacaatacagagggcttaggaatatgccagtccaatccaaatagcaaaaccactgccataaataagttgctgccagggaatattgtcccaaagcactgagctctctggaacctgctctgaggcttgtggagccccctgttgaatctcagtatctttctcagaagaaaaagaataaaacgttcactttgggaagcagcaaatacatccatttcaggtagtgttacattgaaaacaaaggacaagggcaataatttaattcacattttgtgtgggcttatacattaatagtgtccgaaaatgcatcctgtatttctgctcatgaaaacggggaagtgaattatttttttgcaatattatttcattccctgtcccatctgatagatatcagtacctgaatgcagagtatagttatttggcctgtattttaatgagtaatttaatttgatgggtcagagttttggtttttgcagccaagaaatgtgatcagtatggatccataattctttttaatcttagaaatcactattgtttccatggaatcagttgaattgatgaatattaaatctgacttctgcttgtatgcatggaggcaaaatggcagaaaagaaagactagtggtgatagagtgattttgtgccaaacaaaatatttatactgaaagatcacaatcctggccctacctgcctcttgccaccctctccccaacttaccgccgccatgtgacttaaaatgggaccagtgtgttacctaaaattgcacttagaaggtgacttatcagtcaaatagaaactaatggtcgctaagagaaattcaatttttgagctatcttttcttgaggaaaactgccaatgtaaatatgtgaagctaggaaggaaaagatcaaaggcacacaaaggaggccggaggaggagatcattagagtattcagtaatgccatgtaatgattcatgcttgcctagaggtaccaagagcttcctggaggtttctaataccacctcagagccttggtagtagtcaatggtttattgatcaagaaggaattaaaaacaaaatcagacaaaaaaaggaaggtttgatactcaaatgaactttcgaaaaagagtctcatgactacaagaatcttcagaagaggcaaaacttttgaatagtgcagaatttttcattctttcatttcgttcaacaaatatttgttggatgctacatgtcaggcattgtgttcagctctagggatacagctgcttttcatcagtattgatagactttcatctcaagagatgatcaagagtcaggaaaaggtttttcctctggtacatttcatttcccttggcctcagtaggacttcctgctaagtcaactgttactctgatttggctctacaaattctctgcaagatcgcgcttgttacggagaaggagagcatgtgtataatgctgcagctgatggtaaaagaatgtggaccaacacccaagacagctggtattaagtatacaggaaaaagtagcagcagtgttagcatgccctgtgtaacgtatcaagttaaagtaatcattttaggattgcagtgtattcttctagaacccaaaacaacccatccctgtagtgcatgcctgaggggtgctgaagaggatattctactcgatgtcagcatcagatacaaggagggtcaatttcagagtgaagcactttgctgaaatcaatcttaaacaatgacatttagacacagccagcttctaagatgacagcgaagaaataattgctataaaaagaaatgtgtagattaaggggattcccctgaatgacctgtggctgaagaagctcaccatttgaagttatcttgctcattagtttacttctgcattatctctcttctccctgcttcctccatacggcaggtgccttgtcttattcatgaatacttagttcaagttgcctgatacgaattttatcaaatattttatgactgataagaaaaactgaagatgtagatgatacaaacgtggaaaagacatcagactccacatcctaaagttcccaacttagtggaatgaccagctgaactgaaaaggtgacatttaagaggaataaagatgaaatctataattcgagccgcagttaccacctgcacaagggcaagatggggagacttggtttaacagcaacacctatgaaacacttaggggatttaggtggcaataaactcagtaacacgtcaacagtatgaaaaacaaatatccaacatcattactagaagtgagtttcccattacagtcaactgattgtgaacaagggtgacaaaacaattcaagaattgtctttttaacgtcatttaattttttaaatgatgccgaggcgagtgaatcacctgagatcaggagttggagaccagcctgaccaaaatggtgaaacctcatctctactgaaaatataaaaaattagccgggcatggtggtgggtgcctgtaatcccagctactcaggaggctgaggcaggagaatcccttgaacctcggaggtgaacattgcggtgagccgaggtcatgccattgcactccagcctgggtaacaagagcaaaattctgtctcaaaaaaccaaaccaaaccaaaacaaacaaacaaacaaaaaaacccctacttcaaccatctacaaaaattaactcaaaatggattaaagagctaatttcttttttttctgttttttgacacagagtttcactcttgttgcccaggctggagtgcaatggcacgatctcggctcactggtgatacttttttttttattcattacctcacattttcccacattaaaacacaccaacatactatccatttagtataatcttaaaatatcttctgaaatctatcctcatcaggtgagaagtcaggatcatcaacagatccaaacattttcctgtgccctgctccagaacatttataaaatgatcctaagcagcagttctacaggaactcagtttttgacatgtctctggggagatgtgcccattcatttccactttccctccgtctctaaactggttctctatgaaagtttccttcaatttcatgctaattccctttttaaaaaaaatagtctataagattgagcctatctttgtctggtttatattgctataacagaatacctgggtatttacaaacaatagaattttatttggcttacagttttggaggctgggaagtccaagatggaggggctgtatctggtgagggccttgttgctgtgtcataaagtgccggaaggcatcacatggttagagagtacacaagagagggaggtagtagggccaaactcgtccttttcctcaggaacccactcctgggataactaacccactctcacaataacagcattaatccattcctgagggctgagccctcatgacccaaacacctcttaaaggtctcacctccgaacattgttgcattggggattaagtttccaacacgtggactttgtggggagcaaattcaaaccatagcagagcatttgttaagggcatttttaaagactaaagagattaccttcaatgtactacttttcacaatttgaattgctttgggtgttgtttgtggtctgtcctgctagatactatagttatgcatcgatagagacagtgggtgctgtgagccattaccttcactgcttccccttttcccacatgcatatttacatcctcaaaattataatagatgaatcagacataatttgcttttatggaagtcatgtagttcacttagtgttttgtggccccacccttttaatttctccagcataaaaagtaaaaaatctgagcctcagtagttggtagtttctcgtatcccctggaaaaccttataaaacagtcacactggtgttctgtcctttatcacaggacctttaaagacaggttatatattttgaactccacaggtactccctcaagtttctttaaagcagtgagtctttaacctgctggaggttatggatcaatttcaaagaatctgttaacccactgaaataatatacaaaatttttttgcatgtatctatacattttcctttcctgatacagagtttacccctgacctcccattcatagtgggtttctctattcttagtggatgtgacaaaaacatcactaaccccaatatccatgagaccgctgccatttgccactattgactcctgttgccactgctgctactgtcagaatcatcactgccactgggactgttgtcagtgtccattttccctatgactgcttagctagagcctctgatgtctgtcactagaaggctagaacatacagagctgttgaaacaattatggctggaagtacagtaggaaccaccataggatggtgtcaggaaacgctatgttagcctaggcctgagattcatgtgcctatttgcaatgccacagcataccccaagctcacccaggtgggcctcctgctaccaagctggcctccagcttttggtattcctgtctcccggaagaattagccctatgcgaaactgcagctcacatgcctggtaccctctctacttgcctaattcttaccaacctccctccccagtatactggataaaaatgttgtcttattcaacctaagaaagctgattgcaagcaaatataaaataaaaacagaaaaccgctgtcttagtctgctcaggctactataacaaaatatcagacttgtggcataaacaacatttatttctcacagttctagaggcagggaagtccaagatcaaggtcctggcagattcagtttttggttgaaggtcctcttcctggcttgcacatagctaccttttgctgtgtcctcacacggtagagagaggaggctctggtgtctcttcttcttataagacacaaatgctatcctgggggctctaccttcatgacctcatcgaaacctaactacctcccaaagacttcatctccaaatactatcatgtcgaggggtagggcttcaacatatgaatattgtggagatagaatcactgtcgtaacacatacatactgtagtgccagctgcctgggtggaaatccaaaccccaccacttacttcactttacctctctgtggctgtttcctcatccctaaaaaaatgaagagagtaatattgacctcatagacttaagaggagtaactgagttaatgaatatacaggctgaacagtggctgacaaatagggaatgctgcatgatgtttactattatgatttatttaaagaggttgattataccctgggtttgacctggtaggactgtaacctaaacaggttaataagggtaactcttgggcaaatattggagtgactctcaaacagttctggaagataggaggtaggaaggtcaccccagaggctttatttaacctgaccatctttttcccctttaccatgacagcaagtgccacccaggctgggtaggaaaagcacataagcagacaactggtcctcagggaagctggcaaagatgtctagcccagggattttggagctttgtttgaaagatatgagatcctagggacaaaactacataatcaccaaaaggaaatagcacttgtggaggggatggaagtacacccctgatatcttacaagcgaagctgctactgtggggagcatggtggtggacagcctcctgctgctgctgcttcagatccacggcagccaccgaggccatcctccctggggctgctcctctccaaggtcctagcacggtagagcaggctatcctacctgacacaggagccctctaatgggcaaccttttctcaggatgccccattgcctcgggctgacactttcttagaactactccaaagttcttcccacccaatcctgcctttctcacaggggtcaaacctgcctggtggtctggctggctctccctgccttctctggctctcactccaccatccttcataggcaccttccccagtaagtcccttatagaactgatcctgtcttggtgtctgcttcttggaagagtcaaactgacatgccattactgctttttttttttttttttttttttttttttttgagatggagtctcgcactgttgccaaggtggagtgcagtggtgccatctctgcttattgcaatctccgcctcccaggttcacgccattctcctgcctcagcctcctgagtagctgggactacacgcgcccgccaccatgctcggctaattttttgtatttttaatagagacggggtttcaccgtgttagccagcatgatcttgatctcctgacctcgtgatctgccttcctcggcctcccaaagtgctgggattacaggcgtgagcctccacacctggcctgaacttttagaagtttttcctacttacaaaggaaagcacgtgcttatttctgtctatggtagatgaaccttcatagaaataacataccaagtaggaagagaaatgttaatgttagtgatgtgtcatattgaaaacacttttttctctatatttttataataatttttagttggcttactttcccatcaaattccaagtaaatcccagttctgtggtctatgtgcttgctaactccttatcataagctcatgggttcacttgaagtatgtggaaagttgattttaatcagccttcctaataattcaaaacaaaaaaaaaaaggaaagaagacagataggtagccactgagctgttgactaatagaggcctattagtattcgaaatatttagaacttcataatagtgtagaactggaagatagattgaatgagtaattccaacatagttgaatcaacatgctattacagtaagtgcgcctataaactgctgctacacaagtatgacaacctaaatgagctacaaattattagcagaggtggaaattattatttatacctgatagctatacaatcacttttagcaatgctttccacattaaatattaattccagcatcctaggcttagaagccacgtgtattgttttcagaagaaatgttaaatagtagctgcaaatgctttgctttctctggactgtggacttcacttggcttttgcctaagccctgtttggcattactaacctgtattcatccacctcctattacacgaaactggatatgccctggccagtagccacccagccatgttactgatctgctgttatgcccagcggtaaactctgcattgtgtttctggctgtatcagattcttctgcttattcgtttggggaagtcatgttccttgagcacggagtatacgtatctaggtgtgcaattgtccagcctgtggatattcaataaatagatttgatttcatagtgcttagatctattacgaacaaatttttaaatgacagaattaccgttttctagggacaggatacctatattgaaagttcaaattgatcagtcatcaaataagagctgtatgaactgacagaaacatatattggtaatgcaattaaaatataaataaaagaacacaggaaataaagccagtaatgttatgtgtgtatgagaatcctccagacggcaacataggtgcttccacccatttccccaaatttggacactccaagtgtcttatgaagagcactgacaagctttggagcaaggaattctgcgtaaagcaatattttgtgcatggtaggtattactgaattgaggcctgcttgaattaatagtattgaagattatcttcaataaaagccagctccagaaataaaactattgactatacacaccctagaaaagagaaccattgtctggctcattgattgaaacaatcgaatttaaatgagaataaactggttcacttctgacctgtgaaacaaaagataaatagtatttgaattagcacaaatatcaggctgaaccatatgaaattgccatttttatagacaaaaagattaatgaagactcacaatttcatatggttcaacctaataacacagaacaggtgtcagtgtagaggttagagtttgagtatatgagttgaattgaaatttaattattcaaaacattttagatatattataagaatactatttaaagaaaacccacagagatccttttgaaagcaaaacactctttttaaatgagtagtcggcctataatccatatattatgttctcattaatgtggacccacctctatattataaaggaaatacttttcattataacataattttaaatgtatgacctaaaaggaattgcatttagttcacatatatatttcaattataggaaattacatgtttgtcttaaattaaaaacaaagtgatagggatggtcatgcaaacagcattagtgtgtagtataaagaccccattgcgcctctgaagagcacaggcctggctgactggccaagtactgttagaaagttaccaaagtctccatgtttataaaatgggggagtgacatcaacccacagtggcagtttaaaatagtgtatacgtgtcatgaatgctcaataaatattagctattaggagaaagaagatgcagtttttttaaaaagatgacaattttttttctctttaaaactaaatctggaacttaagcagcttaaaaggggattgattcagtagtctgtcactcatcggtttgtcccgctcttcacagtgtaagacagtggaggtatcagccctgtcccaggtgtatccagaagtggctgaaatctgcaggcaggtcccagacaggctgaaggtgaaataaaccaaaatttaaagttacaatgaaaaactctgaataactctcagcctaaagcatctcagcaaattagcccacttgacttgagtctttcatttctctgtccaagtagagcagctgctcctgaagggcaaggccattacccagagcccaggccccactgcctttgtggcacacaagctaggatggctccacagctgctctctgaggggagacacatccccccttgctcctggggagcccaatatgggtggctctgttaggaatgatgtgagtcttctctctttgaaaaaacaaaaaggtaaaatagctacaactgtcacttctagcccatgtttcagtctgttgccaacataatgatgatactatttcaggtaagagaagcagcagaaataagaagtctggtctttttaaaatctgttttttctattaaaaaaaaaactagggaaaaaaatcaccttatttttcttgcattgtaaaataagaaaatgctggatttgttttctcctaattgccctcatgaaataactgctatcaccatgaaaatgtagctggaagttctttacattattggggcttaagtggatttgaggctccaagcaataacatacttaaccccatcagtaagcctggaatgactcaaaatggacacagacgtaagagtgagaggtgcaactttgattagttttcttcttgagaataatcgtgacatttaccaggcggatcgttaacctgcagacttcccaaatgacacagggtacttcaaccccattagcctgggccatgccgcccctgcacatacgacaggctctgctggatgaggtgctccccaggactccaggagtgactggttgacagcctggacagacagcagtccagctaaatgcagcccagccagcagcttcctgcaacaatcaagagcactttccagagtttgatagcctttctttggccatgactgagtagcaagctcatatttagtgggtgcaaagaagcaagcaaggactttgccatcccagagagctagaagaaagaggctggctgccctggcagccagagacagggcaggagacagggtctgcggcacagccacctcccactccctcatctcctcctccatgcacagagcacacccaagtccacacagaagcactgacccacacagacacggagattgacacacacacacacaaatgcatacacggatacacacaggaccgaaacacacacacagacacacacacaggacaccaacccacatagatacaaatgcagagatacacatgcacacacacacacagaggacccagacacacatagctgtgcacacagagagagacacacacccaggacatcaacccacatgaacacaaacacagacagacacacatacacaaaggaccaagacacacacacacaaggccccgacacacaactgtgcagaaacacacacccaggacaccaacccacacagacatagacgcagatatacacacacccatacacagagacacacaaaacacacactatccaaataaattcaggaatttgctgtgttccctctggtcttttttcatcatatgcagcctcagtggcagtcccagaagggagctcttgagaattcaggggtaaacgctcaggctctcccactgcactcccacaacacacttctgacaccaaatgtgtgggagttttccccatacatcaagcaagcaaccagttctgcaggggggtgtcctccaattcaaatgtgacactgtctacctgaagaagtgtcagtcccacaagaattccccacttgtgatgccagtcccaagccccaggttgtttcaggttgttttactgtgcttctgaccaactggctataaatcagggttcccaggacaccctcctcaggtttgattaatttgctagagctgcccacagaactcagagaaactgacttatatttactggtttattatgaaggttattataaaggatacagatgaggagatgtgtagggcacagcatgtgggaaggggtgtggcatttctctgcccttcctgggggcacctccccctgggaacctccacttgtcccgctgtctggaagctctccaaactctgtccttttgggttttatggaggctttgtatgtaggcatgatttagtaaatcgttggccattggtgatcagccctttcccccaccacccccagaggttggggtcggggtcggtgcccggaagtccaaccctctaatcctggcttggtctttcctgtgactggcaccatccagaagcaacatagaagctgcctgccaccagtcatctcgttagcatacaaaaagatgcctatcactggagattccaaggattttaggagttgtacagcaggagacagggatggaggaaaacaaaatatctatttcacaatatgacaggcactcaacatgcacacagagggctttctgttagtttaagactggccttgtgactcctgggagaaaatgttggctgcaatcaaaagcgctaaacctacaaagcaaaaaggccatcaaggaatgttcgagatgcctccctgagctgtgctttgcagcctgctcacatcaagaagtccagctaatcacacagaattattttcaggggatttgaaacttattatttaataatgttattgctgacattctagagttcactgatgtgtctgtgagcctttgtgaatatagaagaattatcacagacactggaacaaaatccatttgcttagataagccaacaatttttagggccagtaaaaaggaaaaaaaaaatcctatgaacgatttatttaatacttgaatttttgaggaattgtcttccacaagaggaaacaaataagtcaccaggtctgacaagatgaaagagagtgagcagaggagaactgcagaagtttttcagatacgtgttctatgcttccccctgccacttctccgggactgtcaccatccttacttaatgcttatttgtccacaaaaccttcattatgaacttactccaaggctgggcacagtggctcatgcctgtaatcccagcactttgggaggctgaggcaggaggatcacttgagtccaggagtttgagaccagcctgggcaacatagtgagaccccgtctctacagaaacttaaaaaattagccgggcatggtggcgtttgcctgtagtcccaaccactcaggaggctgaggcagaaggatcatttgagccctgcaggtggaagctacagtgagccatgttcacaccactgcactccagtctgggtgacagagcaagaccctgcctcaacaaacaaaaacaaaacttaccctaagcaagggtttgtgctagaagttgggaataaaaagatgcaagactaagccctgatcttcgcatggggaggaggaggaagcacaggcagtctaacaacagcacagcagtcagtgcccctggcccttggcaggtggaaggcggcttccaggagcaggatggagctgagtactaagggtaagtagaagcaggcaagcacagaaagagaagaaagcttgttccaagcagagggcacagcttattcacaggtatggagaggagaaagtgagtcttcttatggagaattttcacgagttggaagagttgccccgcagaggacttgtgggaaaatgggtagagagtcgggagaccagagcagagagggccaggtgtttcctgcattggagttaagtctcatgtgagggcaatggggagcctcccaagagtgaatttctgtgtccccgcggctgttaccaagcctttgccctccactctcaggtaaagccctgctgcttgaaggcttcttccacctcccgcttccttaactctgctgacatcctgctcatttgccctttatggaaggcttgagccacctggccacaacttttctctcctcaatgctgccatcatcccggatgacatcagcctcgccatttccgatccagcgactttcacctctgccctgcctctgccctctactcccacggccataccttggactcggccatctctcagaatttttctacatagaaaatctccatccccagtatctccttcctactcataacctcctggtcttccatctcgccttcgcttttgtgtcctcggcacctgattttgaccccatcaagatctctggtttctctcaatttgtccccatcttttccctccaaccttcacacattgcccagtccagccaagaacctatggctctctctccaaaaccttgcactctccatgcccttactcactgtaaaacctggcatagggctagtccagcagcctcctctcacactcccaccccaggcttctggcacagccatcagaccccctctccagtgaccatcacaacaggatcaagctttctaacctcagctgagcctcggttgctgcttgatagacttttggtgtcctgctccattttctctcccagtacccataacagcaattccaaaccttaagcatggcaatgtcctctccactctccacagagaaacctacctgcttctgaggagagacctccagagagaagcatcagcttccccagccccacacctacaagcatgcttgcacccagcccatctttgttctcctcactccaggtagacggggtggttgttcctccttttgtctaaagctacttccattggagcccaggaccctcatcatgctgccccagtaaagaccttgtccattcctcatcccttctctcctgtatcttcaacctattcatccctactagctccttcctgtcagcatttaaatatgctagagttcctttcatctgaagaacaaacaggaaaacactctaacttcctcaaagaaccatgtttcccttcccttcatggccaagctctttaagagtcctctacaatgactgcctctaatttctcaacctcccagtttccatccaccccacaacccacagcagtccacttccactcctgctagagtctctacctgcttccttgctgctaatttcaagggaattaagttaaattccctgtctgtcctcatctggcttgatctctctacatcacttaatgctgtcaacctgttcttcctgaaattctcttccctctcttccctcttgtatctgtaatcactggactcctctcctcatttctttcctatctctctgtccagtcctgtttggtcccttgcatgtaagtggggagaaaacagaagcctattaatagagaagggccagtgggaacaggagagaggaggtcttgttgaaggaggataaagacagcacaggtggaggcagtggcttcaaaaagcaaaataccatgctaacctccctgcgagactgaagcaagaaggtaagaaaggcagaatgtgacaaagaccttgcctagaggcctcaattctctctataatctaggaggaaagggcgtctgctgcttgggttggcaggagctgagccttgcagagagaggtgaagataaggcagaatcctggctagaagcgggcagttgtggtgagcgagggcgggtgaagggcctgctgaggccaagtgcaggtaggatgcgtgccgaggatgggcccggccagcagagtcattcgctgtttcccatcagcactgactgccctgaggtggacagtaaagagcagcacaggaggattcagccagggtttggttcttctgggccagtggagcagaaggctagcaaggccagggattcagggatgctggtaaagggagaaccccgctgagccaccagtggacctggcgggagggaagcagtagccagcagcaagctgttctaggtcagaagtactagcctctaactgcctaggaggaaaggagaaatccagagactggctgtctctgggagatggaggagcagatgcagtgacagagagtagagctagacagaaaaggggaggggggagttgaagtggggcaatggcaagtgaccgccaaaatccaggtgtgtgctcatgctgtattcttgttttaaatcgtattatggaagtttcaaatctacacagatagagagagaatggtctaatgattccctcagtacccattccctggcttcaacaattgttaacattttgtccatcttacttcatctaatcacccccaactcacacttttgaggaaggggttgtgggaggctgcagtatattcacacaaatccaagatttcatgttatttcacctataaatacttaaataggtagaactcaggtttttaacctgagaatcgttcactgaaataacagttttaggtaaaagaggaggataataataacttgagtgtttagtatatgccagatattttacacatcttatttaactcttccaaaccctctaaggtctgtattattgtcatttccattttacagatgaggaatctgaagttttgtgaagctgcaagatttgcctaaaagcactcactaataaatggaggttttggggattaaactgcagtctgtcagactgcaacgtcttttctctccagctcagcactctgctgaatgttggctgggggtggtgggttaaggagacagaagttacgaagttaggatattggctaacttcagtatatctcctaggattataattccaagcaatttaaaaaaggctgtaatttatgtgccaaagtattttatgaatattaggggagagaggtcctgacaggaaggtcaatgcctgaaatagaaaagagaacaagataagtgcatggcctgtgcctcaaagaaccaggagcttttgcatgtgggtgaagggagatggtctcctaagggaggcagatgaaaggcccacaccccacctgacctcactgggggtaaagggatgagtaactccagtggaaaggaggagtgacctacaagggagagcctgggtatggtaaaaggggagagggtgaggtcatgcaagggtcaatttgcaatggaacatagggtccagtgggcagagtgggtggggagagaagttgtagagggtccatgaggcaagaacagaaagcgggagaaagagggacaggagggagtcttttcaaagtttaatggaaattaaagcaactgcctagcttcatgctactcaaagtgtggaccatgggccagtgccagtctgcaagctctttgttacagccatgttgagccaggtacagaaattaagaggaaggggtgcagaaattttccacaggccatagtttttttgtatagtatcgatccatgacatattaaaaatttcttaaaaatgacccttcaccacagatggcttcagatgtactggtgtatattgccttatgtattatgatgtattcactctaattttccatcttgttcgatccaggccagtgaacactttattgcaataggcagctttctaatcttccctttgatttttttttctttttccatcaattttgatgaatactgacttccctatagtcttaaaagaaatagcagctaaaattaattcggaagagttaacatttaccactttttctacaagatttcttcaaaatggaaatgaagttttgtgctttatatttaatagttactgaatccagttttccaaactcttagtaaaagctttctcagaattccaagattggggatgattattatagcctttccagtaaaagattttattttcagacattattccttattttaagaatatcacaagtttttaaaagtgactgaacttggtctagacagcagatttcaatagttgctaagaaactagattagtgctaatctaaggaatatattattcatttttacttccatttgttactatagcactttaattgccgataaatgtcttttatggctctccaaggtgtaaaacatctctcccttagctagtcacaggagacagtgtttatgtgcaccctccaagcaggcagtattcaggcaggaagtggctcaaaagaaggaaaaggcttcttgcggcacaaacaatagctgggtttgtaagcacaggccatagctgagcgctcaagggcagaccagccacacccacccatgcatgagacctggccgggctgcctctgctgatgctgcgcactgcgctgattgcctcttcatgtagtagatgatgtcattctgcaacctgctgccacagtcatcagacaatcaattcctcagataaaagattggttgtcaaacccaagaaactcattttccacacggcagccaaaatgagctttttgaaaagctaatctgatagcatcaccccaaccttacccaacctctcccaaccccattccacttgaaacacttcagtgcttcccagggcctttaagataaggataaagcccttatagagcatggaaggccctccctgggctgcccctcccaagcacactgcacttcatgttcagtcttccctttcctttttaaaggaagccttgccctggctcttccactgcccaaaagctcttctgtcctctgaggcaacacccatactcacttccagtctcagccctgttctcctgttagctagaagtacctaggttggtcctcatcaaatcaatagtactcttcctggcatttatcacatttgtaagtttatgtttatttgtgtgtgtgtttgattaaggtctagttctccaatagaccgcagctgaagagggtagagactgttcatttttacaaagactgttaattctcctgtctagcacagccctagtgctccaagagtgagtattgaaagcataaactcttaaacgtagaatccaaacaagcactctaggcttttctatttgtggacagtctggccaagactcattatgtaatgagcagtatctttgccaaagcaccgactggaaactctagtgagggaccagcagctgcttctccatgagccagttgccagctcttacagagttatagcagtcttttcattatcaaaaataatatacctgccttacaaaaagaaaatccacaactgctagtgctggtgctgaacaagaaaagcaagtgaagtcatctaatgctctcctccctcacggaggacacacgctatggatgtagtcaggaattggaaggttagtaatagctgagataacatgaactctgactgtggctgaggctcatgctggtgctcatatacttttctcatttaaccctctcaacaagtctatgtttatccttcttttacagataaggaaacagtgagtttaagtaatttgcccaaggtcacacaggtggtaatgcagagagtggatctgaagccacattatctaactcattctggagcctaaactcttaatcattaccgttgctgcctctcctggagaggtccagaacacagcttcagcagaaatccaggaaggtccgtactcacagactgaatagtatcgctgcatggaggggcagtgtccctcttaatctaatactttgaggttgaaatgagactttactaaaaacagctgaatagcctgcctcccatttcctccctttccttaaattttccattttcactcatttcttaaatacagattgatcaccttactcccgggttcatgaatgttccatggatgcgctttgcttataggaatacaacaaaccactcatcctggcacacacacccccatagtctggctcaggctctgctctccttttccaccacatccctcacgtaggacccttgagtagtctcccagtaagcccagggctcaccggcttcccttccttgatgtgtttctcccatcttgaaatcctgttcatccacagaagccaggtcagcttcaggaacaaatcatgtatagagtgacaacgaatacttctgttacagattgagtatctctcattccaaaatctgaaatctgaagcactccaaagcccaaaactttttgagcaccaacgtgacaccacaaatggaaaagtccacacctgacctcatgcagcaagtcacagtcacacaacacacagtttgttcagcgtcccctagggtaaaataaacttacctcaggctacgtgggtaaggtgtatatgaaacataaatcaattttgtgtttaggcttgcgtcccatccccaatatcttacattatatatatgcaaatatttcaaaatcaaagaaatctggccgggcgcattggctcacgcctgtaatcccagcacttcaggaggctaaggcaggtagatcacctgaggtcaggagtttgagaccagcgtggtcaacatggtgaaaccccgtctctactgaaaatacaaaaatcagctgagggtggtgacacatgcctgtaatcccagctactcgggaggctgaagcagaagaatcgcttgaacccgggaggtggaggttgcagtgaggcaagataacaccactgcactccagcctgggtgacagagcaagactccatctcaaaacaaaacaaaaaaaatctgaaatccaaaacacttctggtctcaaacattctggataaggaatactcaacctgtatttttaaataattccaaatttaagtcccatactattcaagtatggctggaggaaagattaattgaaaaggtaaaagcctttagcaaacatgagtcttaaggttttaagttgtagattgaaattcaaattaggagagaatatttaatatcacctctagtggtttgttttttatcaataactccaaatctaccagaagggctttgcagcagttttctcaaagtgtaacaaattctactttgtatatcatctcttcatgtttaattataaggatttgaatttacagtaccagttaatcagtaattagatagtagtgtaccaaaagaaattaaacaaagataaaaacaaaaacacaacttagcacaaggccatatcatctggtaatgtttcatgtagcatgattaaaatattccctgagaaatgcaggttaactgagtcattgtgatgtattcctttgactttgttgttgttgttagtgatttccagtgccagcaggaaacttaaaggtaatccaaatccaaaaacactctgattatactaattattccttttttcattcttcattgtaaatctctttatgatgctcaataattattttgaaatgtggtagattttcgcaatgcaaaataaatgtatattttataatgatgcattctgtattgattgtcatattttaaaaaacacataaatcagtatttgagttaattatcaattagacctctaaagcaaaatgttcaccttaggtgtggaaaatcaaaaaagatacaaagcagattgagagaggggcaaaaaggtccctgaaaccaagatgtagaagacggaaaaaggttgtttagcaagtcattgtaagaatcaggggagggggcgaggggaccctctccttaccaaatcatgtcatccacctataccaggtgcacgggcctcctatcctggttcttaaacctttggttagtaagggaataaaagtggactggccgttggaaagagaagtcaacagccctcctaattcagtcttggaagagatgtgggcagcagccagctcaggtgtgccccactctgggtgatcctggagctgggctctgggaagggcagacagttggaggagccccaaggtagattagtggatatgcagcaagccccaacttatcccttctgtgaccagcgttacatgggcagattgagccaacaaaacactcagaattacctgaaggtgctttgcattctttccctggtgccatttcaagaggctttgtctgttttaagaaaatggctttacctttactcccaagtacagggatcttgtaaactgtgaatactgtaaaatctttaaatggtatgccaaatgaatgaacagttttttttgcctctaagtgtatgaggttgtcttgaaaactttgtatggagtggatttcattgtgcactcttaagcttgttttacagaagtattttaattgtcagcctctgaaacaagtaatttgtcttttgatagaagaatttgctaaaaaagagcataaggtgctttgagaagaattattgaagaaaatttcaaagatttccatctgttggtaccttggattgaaagaataggctttgtttaacaatttagtatcatgggtggacatcagagagccaaactgtaacaatttttgtaacttcatgatgaaattaattgagcagccccccaataattgggaaccatttgtttttttctccaatttaagaatttctcttcccactgttttgtgaagcagtgctatgaagtttctatctctaagagttcattgcttttacaaattagacagcacacctgtgaatgaaagccacatttgtcaaagtgacaattcatttgtggatatggcttattaatcctctgttgggcttcttcaactgttctctaatttgaaaatgttcgtctctcaggaggtggtacaatttatttgatttcatcgtacgacacaaacttttgcctctcaattttacctcctttattgaaataagcttaaacaagttgactccggtcaccatgatcataatcttatgaacctttattcagggttaactggccaaaattaatgaaccagagcaacctcttcatctcagtgaatgattaccagtggctcttcactttaacaacatggtaactattcccatgacctactctttctatagtaagtagttttaaaaaatttttttaaagctcaggagttcaaacacccctagttgcatttctcctccagcctctcccatctcagtaaatggctctagttagtgcttcagccaacacctgacagccttcctcgctcccttttgctcatctcccatgtccaagtgcatcagccagtcctgctgggtctcctgccactgtccccaccctagtccaagctcgcctggactcctagcagtcatctcctaagtggcctccctccttctattctaccttctctaagatccattctccatatagcagctcagctaattatattacaaatattcatcatattacttcactaggcctgcttaaagcctcccagggacttcccatttcacttagaataaaattaaaacaccttccatggccactggaccccgtctgactagctctgcaccgctctccccttctcacactctaggatcagcctttaaacattcccgcacattcctgctgccatgcctttctgcaggctgctgcctctgcttgggatgtacttccctgcccctcaggacagactctccctgaccttcacagttcacctcagacgtcactgcctcagagaaacatctgatcaccttagatgcagcccctacaggcaggcactgtcacgttagcctgtttatgcgcttcatagcccttgtcactatcagaaatgactttgttcctcctagcttgtttgtttcctgataagtgtgttgcttcccaccgtcctctaggctccatgaaagcaagaaccttgtctgctgttcacctcatatcactcgtggctagaacagagtctagcccacagcacactctcaatgaacagttgttagatgaagtatggatgatggaatccttgtcttcctaatactgtatgactttgactgaaacacttcacttcatgggcttcagcttcctcatctataaaataaagctaacagaacatcggttgttcatggggataagttaatggagtaaatgcgtgacagcgtgtcacaccttgtgtggcccacagcagatgcagagtgaacagtcaccagtgtcccttcctgttttacaggaaatcttcagaggaactagacatggacaaggtgacagcagcaatggtactaaccagcttgtcgactagccctttggttcgaagtcctcccgtgcggccgaacggtaagcccaggatatgggacttagggaagggccccttgacaccaagagcagggcctttctttgagatgtctcattcctgtcaagcgctatgaaccactgaccctcacccattagcaggaagcaaagagaaacgtggaagaagtcgaggcccccagagctgtcagccccctcttcatcttcccagggagcccactgcttctcattcacccatccctccattcaactcacttttattgagctcctttgttttctgccttgccaggacgtctttgcagtacttgtgtcccttttttcccaggtaaatgaagattgagctaatgaattattttccctagcattatttctgtttgactggggaggcagttggatcaaagaactctcagattaaataatttttaaaaacattttctcagactccttaatcaaatagaattatttaggtcattcatttattccacacacatttatcaggtaccatgctagatgaattgaatacctcattgaaaaagtatccacactcccaggtagtatactatctctttggggaagaaagaccatcaatcatagccatattagtggctagcatttattaagcattactatgtgtcagtaaacaaatactatgcttgccttatcgcctgtaattcccacaacaattctatgaggtattattatcactattttacagatgagtaaactaaggctcacagagattaactggcagaactgaaattctccatatctttttgattccagatttattctcttaatcatgatatgattttgtctcatataatccaatacaataaataaggaggtcaggcagtaggaggtgaagttggagagactgggagacctatcaggaggggtcatttatgcctggctaggagtttggactttatgctgaggctatgggagcactattaaagtgattctagcactgcaaagttatgattaggtttatcagccaaaggaaaaaaaaagatcttggtggtcacagtgcaggtagatacgacataatcgagaaatgtgaagaatgcagaatcaagagtttggtgctggacagagagagtgagcaggagggtgtgtcaaggatgacttccaggcagttggtgtgcttcagcaaggggaggacattcactggggcaggtgacagacgcacaggaagagatgtattggcaaatgtttggttcaagagctgaagttgctgaagaagacaataggaaacatgtttaataggcagtgcctgaggatcattcaaggggcaacatctggtagagatttgggcacatcttgggagagagatctgggctgaaggtacagaattagaaggcaacatttggaagccatgagagtagatgagatcatcatgagagagttatgtaaaagcagagtgagaagagaagatggccgaggaaggaagcagtgaagctcaccatcatgcaagggattggcagtgggaaaagagccgaggaagaccctgaggtgaccagagaggtagaggaagaccaggagagtgtggtttcatggaaaccaagggaaaagcatgttttaaggagaagtgtctgatgcttcagaaggtcacgcattaaaaagactgagttttccatcaagaaggtggtcactggtggctttgtcaagagcactccccaagggagaaagccagttgcagattgcagttcactgaaatgtaatgcactgagaccactgaatgagacttaggatcaatgaaaaccttctctcaaaaaccagcatggtcaatgatgagattaagatatggttcacacacaatttggttttaagcatgaggtgttaaaataaatttgttgaacatacattgaggccttaccaaaacttactccaacctcattataagagggaaagaatgattaagatgctaggaattcaaattaatgtcatgaatcagtattgcccaacaacatcatgattcatcaagctgggataacacttcctctttttttttttttttaatttgagatggagtctcgctctgtcacccaggctggagtgcagtggcactatcttggctcactgcaactgccgcctcctgggttcaagtgattctcatgcctcagtctcccaagtagctgagattactggcatgtgccaccacacccaggtaatttttgtatttttagtagagacagggtttcaccatgttggtcaggctggtcccgaactcctgacatcaggtgatccgcctgccttggcctcccaaagtgttgggattacaggtgggagccaccatacctagccgacacctcctctttatatagcagtagaaaagttgctcttgaaatgggcctgactactcccattcagtgacctgactgctcttctggggggtctctggcaaatgggtactctgatttacctttctcactttggcagtgctaaagaaggattatagtaaaggcaaaactatagtcaggtatggtaacacgcctgtagtcccggcctaggattttggggttgcattgagcttatggtgccactgcacttcagcctgagtgacagagcaagactccaactctaaaaaataaaaaattttaaaaccctggaaaacccccaagacatattctagggaaaaggaattgtagaatttcatggaatccttcgaggaaaaagaaaagtgtattttaaagtaatcattatttttaccattggcttcattttttaattgagaacatttttagtgttcctttgtacttaaaggtcagaattaaaataaaccttttggctcttcaatgcaaactttcgttagcacagtaataaagtaattcagtgctcatttatggtttaaaaactaactactcaactaataaccccaaattgtctgctgtctctcatttagtctgtaagaaaaagcaaattcttaaataggggaagcaatttattataatgaaggctttttttttttttaggaaaaaaagattttctctagaattattgcacatcaatgagtttttggaaactgttgtgatcattttctgtgcctaaaaaggatcattctatcaggaagtgagtctgcaaagagggtgagagtccagcagtgcctgtctccattcttgacaaacagaggtttaatataaggaggctctgtcccctaagaatattataaatcagacctgactttttttctgagaaaaatcatttctatatcacttatagtccttctgactaaatagtctttctaaaggaaatgtcattcacaaatcagtaagcaaattcacttttggcattgacatgaagccatgtaaccacactgtaataatagttggttttcaaaataaattcagtgcctcatacttaacatgattatacatctagcaccattagctttattttattttacaaatgcatactacagtatatttgtaagccacccgggcctgccaagggagtttttcacactaagtaaaatcatcaagccttatattatgctcttcttgaactcctgttgtactaaatggagctttcttatttacaataggcaaatctagtctggtgagcgtatcagtctctgtgtagactgcagggagtgagatgctagtttggttttgttgatgctggcaaagcatgagactgcataaatgaccatttcattctaaaagaacctagctgtaatgagatgggtagtttctcctatttcaacttaaagcttcactcctctaacttaactttttgcttgacatagttgaggaatatggtagaaatccataaataggtaaaggtagttatgaaatctccccatgaatgataatctaccatttgtcttcactccattactaattacacagacattaacagtatttttttaatgaggcatttggggatgttttttcctcgtagttagaacatagttttaatatattcaaaatgcacataaatatggaggagaaattatccaaaaaaaagtaaaatttatataaatgctaattaaggtcgtgcatcttgaaaggtaaagcaaatcttcagtgattaaaagagcacccagaagacttttttttttttttttttttttgagacagagtctcactctgttgcccaggctggagtgcagtggcaccatgtcagctcactgcaacctccgcctcccaagttcaagtgatcctcctgcctcagctcccccagtagctgggattacaggcacgcaccaccatgtccagctaatttttgtatttttagtagagacggggtttcgccatataggccaggctggcagaagacattctaactgggcagaaatctctccacattagcaaacatttcataatgctttccaccacaaatgggaaggtaatagccaatagcaatcttagagtaattattgccaataaattcttatcctatcccagctttgccagagagaatggaggttgtttacagcccagggactgcatgcactgaagaaataggtccaacctcttcctggtggcctgggcccatgagggatacttaccagtcatgtagcaagtcactttgcttcctgctgcctcagggtcctcatctataaaactgggataataatccttattctgaaggacagatgttgtgagaatgcttgagactgtgcgaataagctttgtaaaatgtaaaacactcacaaaatgtaaggcattactatttgttgtaataagcagaatggaaaggggctttagataactatccagaaattatttctcttagattcttaagtgttagactaacttcctataaatgtattctaagaataacagtcctataagaaccccccaccccccaactttttttctgaaacaggatctcgctctttcacccaggctagagtgcagtgacccagtcatagctcactgcagcctcaaacccctgggctcaagtaatcctccctcctcagcctccagagtagctgggactataggtgcatgccaccacgccgggctaatcatttcattttttctgtacagacagggtctcactatgtaacccaggctggcctcgaattcctggcctcaagcgatcctcctacctcagcctctcaaaatgctaggataagagaagtgagccactgccctcagctaagaaatccctttttaaaaaaatgttgaaatcggaggggttggggtgagagggaactctgtgaccaaaccattcaggagaatactgcaaatgatatttctttcttagaaatactgtagtcgataaacccagagctccccaaacttagtgaacaagaaaatcttttttttcatataatccccactatgatcccaaggaatttgtgttgcacaatacaaaaacacatcagaaaactcttagaaaaacctattatcatgaggttaaaataattaaatgtttataaactacaatgtggcttttgggagggggcgtataaatagaacaaaaacttacatacccagctgttgcagatgattgagagggctggggtggtttcactggtgtagaaccaaggctcccatttccccactgaaccatgcccgggcacgcaggggtcctggcactgactgtgtttgtgtgcatgcagagagcctcagcggatcctggaaggagggcggctgcgtgccttccagcaccagcagcagcggctactggagctggagcgcccccagcgaccagtccaacccgtccacgccgtcgccgccgctctcggctgacagcttcaagcccttccgcagccccgcgcagccagacgacggcatcgacgaggcggaggccagcaacctgctcttcgacgagcccattcccaggaaaagaaaggttggtggtcagccacgcggtcttctgcattcagtttcctgaaggtgctttctgtcccctctgaagggccggtgtgagcttaaccttggacctacaccccctttctgtggaaagaagcagcttacgttcctctttaatgttcttgaagtttgaatagaaattgttatggtgataatttaaaaatgacaaatactggtaagtttcctgaaggtatatacacacgtatcccatccatcctctggttataaattgctgacctgggacttaccagtatttgtaagttagaaaattggacctcaggcttgcttcggtatgaactcgctctcttcgtgggacttatttttttcatatgtaaaatataattaatatatttttctcttttctcaatcagccctgaagggttattgggaagaatattttgtatctcatttttatgcagtcatctgtgaaatatacataaaagctgagatataaacaaacttccattcttacatcctagagattatatattaactaaataaaaagtgaaaaagggccaggcacagtggctcacacctgtagtcccactgctttgggagacagaggcaggaagattgcttgagaccaggagttggagaccagcctgtgcaacatagcaagaccctgtctctacaaaaaaaaattaaataaaaaaaaaattagctcagtgtagtggcatgcacctgtagtctcatctactcaggaggctgaggtgggaggatcgctttagtccaagagttcaagactgcagtgagctatgatctggccactgcactccagtctgggcaacagagtgagaccctgctgctttaaacaaaacaaaaaggagtagaagaaaaaaaagacatctaattaattgatttagcaaattaattgattacacatttgtttaatcctcccagcagtcctatatggtaagttttgcatttccatcttgttatgaggaaactgaggatcagagagattgattgtacatttaactggcccctgtcaggcaggttagaaagggacagagccaccattcaaacccagatctgcctgagcctcaagttcatattcttttcattctctttaggtacatttcagttatgttcactcataatttttcgaaaacatttccatttcacagaataaaggaaaactaccactatactaccactaaatctgaagacatttggcattatttttaaaatcaccacataaatgtaaaactgttgttatatgtattggtttttaaatgttgtattggtagcttcattatgaatggctgttcacaaacaaaaatccaatacaaagccctgaggactgcagtgcaaacttttttcctcccccaattcatttcaaagaggaaaacaaagagatggcattgatccaacaatgccttccctccctgcatctctcagcatcattccacatgtgtaacagtggaggtgatatgggcactctctctgagtgtgtacatgtgaaaaaggctgacatttttgtccagaaaagaggatattactgtagtcccctgaccttcccagaggcagtggcctgaagagttgctgtttcacaccagtctgtcatgcaaaggggctgaagttgttctggcaccctgtgggtccccagggacactgggtcttcacttgaccagtaggggagagaggctggcacttgtatcagtgggtacctgcaggcaggacagtggtagggacctgaagtcttttcctgttactttgagcttcacagactgtctccctggggttttctgagtgtgtagttcgaacactcaataggcatggcccagggttgtgacaaggactcacggcccagggttgtgacaaggactcacagtacagggaaccccaatgttatttaaggcacattaatgaaagcctgtcatacccttccatttctgatgtagccactgagccaaaattcacactcttccatcacaattagactgcacttgttagcctcatatggaaggtctacaggctttaactaaattaaggtaaagtcaccaaaggaaaaggaaaaaagcttccttttttacattttttatttttttatttttttattatatatatttatttttattggatgagcacaggcccactccagaagaagctggatagtgggaaggaatgaacaaataagaatagtgtttatccttctttctttatgacttctccctctattcagactttagatgtccccaagccgagacgaataggatgctgattgtagccactaatgtttaatgcatggattttacacagaccaagttgttaccttggccttttgaatttaaagttactttgaacagtgaaaataacaagaaggtgaggctgatgctattcttttttaaatttattaggtgaaccaatatttattgagcacgtatcaggcaaaatgcttattgccctgagaataatgcatagttttttccttcaaggtgtcaaaagttgggtggctggaaattgatgtgtaaaaaggcaataattacaagtggtaaatgctgtgttcgtgatgtgacagaacacagtaactgtaatacagttattttagagatttaaaaaatcatgtttcaaaagatttctaagagttaatttgcttaaaccagacaatatgttctgtctagttggtagaactttctgagttcatcttattttcctctcctttccctcagtttcatagtacccatttaaaacccattgtgatagtcacttgttctgtgggtattgtttgagaaccttctagatcagttttttccaactgcacgtctcaatccaccagagggttgtgaatcaatttaatgagtcactctttaatcaataaaacagaatagaatacactgtacataataaggataagtattgtttcttgacaattttgtttcagtgtatacatatgtgtatgtgctgtgcaaaatgtatttcttattgtggctcatgagcaaaaaagtttggaagcttctgttctttgttataaagagataatacaatttgtggtaaattaagatgtcctgattggaaatcaaaagattcacattcttaactctgctaccctgagaacctaagaatatcatttcacctctctgatcatcaacttcttcatctgtaaaacaggcaaacaggtattaacatgcccctctcaggatagttatgaagattaaatgtggtcttaagtgctggaatgtggcaacattttaatagacatttgaggactctaaacaaaaggggagggagcattgcctatatctgactatgaagcaatgatcctgacctttgtcattattatggaagcttccttatctcttctcccacctccccccacacagagatggctcactcccacctcttgtggagatccatgttccacttatgtaaagaagatgacagtgtgtgatacactgcatagacaaggcattctctcttactatcagtagtgaggaggaaatatttgctgataatcactatatttgcttatttagttacagtttaccaaatgcttttaaatgtagcatttcatttcatcatcccccaaatctttggtgtattcttatccccattgtgccaagaggctcattgaggttatgttaactgtccaaggttgtgtagcttataatgtggcagagatcagtttaacttaaatagcagaggaaacgtttgaggccaagttaattcagtgaatccatatttccttcagcccacagaggagaaaaacgtggagagaaaataatcagacatagctacagctatgtggcagggtgggagcaagggtgcagaaagttcagaaagaaatggagagcagagataggaactccaggctgtctgccggagagcttacttcccacatgaagtatccgtcacccataaggaacctgcagccaaggtaggtgagagtgtgagaagggaaatgaaaggcttctctatcctagctctggaggtcagccagccaactttgtcaagcccaggtctagcagaatttttcctctgggatttcaagacagactggcagaacttccaagctcagagaaaaaccaggttgtgtgagccaggactcttgactttggggaggtgcaatttccgtcatgaccacaaggtgatgcagtgaccctaaatacagccattcggggagttcgtgggagaaaatgaattctatggaaggccaaagagttaaccatcaattccacaagaccccaagaaagtcaagaagcgctgatcagaaatgatttgtgtgccctttccatgccagatccctgattctgtcagattctggattctgtgcattccaaaattgtcatgccagctttaggacttacatgacttaagcaagtcacttggcctcttcagcatcagtttcctcatctgtaaaataaggaaaatggtggcaccatattgatgtggctgttgtcaggaatatacgagaggccctgtaaagagcaataaatgttagctgctaatactttgcctttcctcctcccccctcccccaccgccgtttggcaactgcctgaatggggaatttgagaagcataggtgtggagagaagggggtgcttgcctccaccctccaccctgacccacactgaccgtgccaatgccacagtggctcaggataactccagatccctcagccaccctgtgctcaattgggtgtgcattagcccccctgcaatgcactgggtgagtgcagcaaggacagtagcagaaattgggggcataaaaggaaatctgactcaggactctgcatttcagaacattggcagcatctcagaggcaatttctaaatttcagccttcatcatttccatttatttcacaggtatgtgtcttaaccatgaacagttgtacctgtgtactaggaagaacctcaagttagagaagaaagcactgagttaacataaggtgcttcagtaatagttgtacagtagcaaacaattaatcatttgctccactctgtatttttaatcttccagagccaaaaagctatgaatcactttaaattgtgaatggctgctccaagaagaaaacaaacccgtaaaaccctcacgaataagcatgttgccagtctctctgctgacttaattcctaacccactaattttgagcagagagtgcctcttgcaaaaagaacggctgttccagaaatagatccatctgttaaaactgctggggagggcgatgctaagaacagcagcttggatcaactgcatggatttcatggtgatggtacatacagcattgtcagccagggcagggagctgattggcctcatagagaaaattcaggataaagaggagtgatatctaggtaacttagtgacaagatcttagaataacctgccatgcagtatataggctctgggacattggagttcgaaggactttggaaatcttctagcccagtctcaatctttccaagttaaaggactactcagtatgtctagaaatgtccagacgtccccaaagatgagatgcacttttagaattcattgattgaggaagcacagaatgactagggatttctgttaattcagaaatcgttttgttgtttggtgttgctgttatagaaatcatttaaaatcaactttattaggtataattttcacagaataaaatgaacccattttaagtataccatttagtgagttttgactgtctctacctgagtaaccaccactctaaccaaggccagcactcctcatacgccgcttcagtcaaaggcaccaccaagccccagacaggcaaccaaccactggtataactttcatcactatagattaatgctgcctgttgtagaatttcaagtaaatggaattatacagtgtgtatttttagtatacaaaataccaaatgttggcaacaggaactctcatttattgccggtagaaatgtaaaatggtacaaccactttgtaaaacagtttggcagtttcttagaaagttaaatatacacttaccatatgacccagcaattccactcttaggtatgtatttacctaagagataagaaaacacatgtccacaaaaaaacttgcagacaaatgtttatagcagctttattcattatcaccccaaactggaaacaacccaaatgcccatcaacaggtacctggataaacaaattgcattataaccatacaatgggatacttcaccacataaaagggagcaaactactgatacaagaaacagtgagtgaatcaaaaaaaacattatgcagagggggaaaaaaagccaggcacaaaagaatacattctgggttattccatttacagaactgttttgttaattttgtatacacgtatcaccacagcatctataaacagcacatggaggtgggaggtgtttcatccgtgcttggtatacattgaattcacctgttactttgtattaaccccacacaccttgaagatccaaaatctctactctcattcagtcccctcatcttacaaataaataaataaagcccccaaaaggtaaggcaacatgtatactgtgtaaccgtgaggtagcatgaggtaacatagctgcttctggaacccctaccagcttctaggaagttactaatttttaaatacacgagcgcatttactgatcttttggcacctgctggggatctgtgtggacctcttgaccctgaaagagccattggagccgctgccaaggtgtgtgggttttcatgagacaggcagaggaagtttgtataatgcagccaactcacctgcacagaataacttggccctctctgtccgtcaaggtccctggtcctctctggagaggcttggatgtgtaagcccctgtccctgccctgccattccaaaaccacacacacaagtcacaatacaaaaaaaaaaaaaatacctgaagatccttttagtcacctcagaacatgacgttaactccaggctgctgactgataaagtgacgttcatgtgctttctagaatatagctttagttggacttacacgtcatatgcatgttatacaatactttgaagcacttcaaaaatgttacataattcttcaaattccagccatgtttccactcttggaactgaaggtgaccttcagcagtcactatatcaatcctaagtatcactctgggttctgtcaagaaaatagaagctacttcgtatattccaagtatgaaaccattttttagaaacaggattgaggcttactattggtagggcaagcagagagaaaatcagggacaccttggccaaaggtctcagccaatagacccaaggaagttctagagacagttcagaagctgctgcaaaggcgaaaatctctgggaagttctctccaaccattgtggcccacagcatcaatgttgagaaattctaaagagtttgtctggaagctgctatgcatctcacatcaggcatatgtgagattccaggagtctgctcacgactgcgtggagcttcagctcctcctgggcctgttgcgggtgttaaataaagtacacgtggaagctgctagcacaggaccaggcacagagtggttcccaatcaatggtggcctccctctgttccctttgctttacatgaagaagaccattctgttagacttgaggtctttgctgacgttggtgttctgcagaagtgctttccactggtgtgaattttcagctgttatccatgagatggtggacattccagctttgcaaacatctgttagctctgcgaggagaagctagggtagaagcacagatgggaccattcagatttggctgccgcaactctgccagaagctttgcttggtttggctttcttgggcaggcttggacccatgcagcaatctgggcgttgtttatttagctattttttcatgttctcctcctcccatggcttgcttttctttagtgtaacagcaactagtctgtttgtagacaaaggatttgtttcaactggatatagttaggggactttgaaaagtactgaactaccatttaaagagcctcatgctttgctgcaagaatgtctttggcctatgtagagacaaatcactttacaaaggtgtagacagggttaggggaaatcagtagggggtggtgcaggactccaggggctaacaaccttggaaggccattattaaccctaacccgtagagccttaagaggctctacaagggaggaatttctacaatccagaaggttaccagaactctggaaatatagctgttggagaggttacccaacagatagggtaacttttggaggagagatgtagccactgcccacctgtggccaggcagaaggagagagccaggaggaatcaataccttcctgctttccaatctctcctgcctcccagctgcctgccggtgcctctcattagccaaatccaaccagagatctatgaaccagaagccctgttaatgcagcctcctgggaccctgagcatggtgcagaaaaggcatggtgtagacctgacaggtcaaatacgacaggtcatcaagtcccttaatagatatgtaacttttcacatcaaagaagcttttcttacaacttcatgtttaaggtttaatatacagtcatatggcataatttaaccaatcccctgttgtcaaccttgaggttgtttcttatttttatctagtgtaaaaatctgtgtgatgaatgaatatacatatgtctttgcaaatattttgaattactgtctttggaaagattcctacaaattgaattggctcaaagttataggtgtttcttaagctcttattgccttaacctgtattgccctcaaatttaaagatggcccctatctgtgcatgtgtaaactatgaaggtagagctctgacagtctggactaaaatgggataataaatgtgagatgagatattcaaaaggaatgtcaaaaggaagaggaatgcaaaaggaagaggtcgaggagaaagcagaactttgttttgcgattgccccctcctccaaaacagttgacagtcttcccactatatgtaattatgtttctgagtccacatttgcaactgccttgcaaatccacagcaactttctatatctctaggatgcaacattgttttctaatcacttttgctaatgacctgagtcattataaattagtaatttttcctacagcagattttccattgtctggtggtgaactcagactttcctcaggtagctaccagtgtagggtatgcaagattggaagagaaatgtacgatataaagtgaagagaaaaccatcttataattcaatcctcacaatgcagggcatcaccatggatgtcccctgagaagttaatttacagccaggtaggataagcaagtgttaatcatactgagaaacattaaattctacagaacaaatctttttgacaaacattctttgaacacagatgattcactaagtaaattttacaaagtgctatttaaacaaattaagatatcccaaatgtggctcatctctgaggtcccaaaacacaacctttctgagattgaacataacaaatatttattgagccagacactgtgaggcactgggatagaatatagtctatccccaaagtgcctcttgaaaacccagcaaaaggaaaaaaggaaagaggagacaaagttcatcatgtttcttaatatcattacctaattttctttgggtaacagatttctttggaacctttagcaggggttcaaggaaggtgtgtgtatgtgtgaggaggagataaacaattgctgttggtagttatcctaattccaagtgacttgacagaggataatggtcagcttccttggattctgggggtttgatgcctccaaaatgtatcatctacctgaagtaacaaatgaaaattatggaaagaagttaaaccaatgatatttatttttctgtaatcaggaccaaccttaactacttgtcaatttaaaaaacaaatgcttgacatattattgcaaggacgaacagtaatcttgtaaatagtacttgttatggcacaaaaataccactgtgattatcatatcctaaaacaatcagcaatttgaggccttaaaaaagtcccatgatgtaggaggaatttggctttatatgtcgtacaataattactattatattcagtatgaaagcctacatctgactgactcattggtaagagccatcagatgacactgggtaagtcttgtaactttctggagtcttgtttcccatcatgaatatcagaaatatggaaatagtatcttatgctttgcccattcctttcccactctctaaggcgggggtccccaactcccgggcctcgggctggttatcagtccgcacacagccggttaggaaccccgccacacagcaggaggcaagcgagcattaccgcctgtgctccgcctcctgcaggtcaacagccgcattagattctcataggagcatgaaccctattgtgaaccagattgcgcgctccttatgagaatcttaactaatgcctgatggaacagtttcatcccgacctgtgccatcctctcccaacctgcgccacagtccctggaaaaattgccttccatgaaaccggtcctggtgccaaaaaggttggggactgctgctgtaaggcaagtattttatccttctcaagtatcctcaaacttcatacacaaccttccctctttgtcatcagttctgaccccacttcctgcctcattgaaaaattagaaacagtcatacaggaattcctttttttcccttctccaccaaattagcaaattaactgcatctgcagccaccatctggtttccctcctttttccagcagagaactgtcctgtctcatccaaggcagcccctctccctgtgctgtgtgtattggcgctgctctcctgaccttctgaagaacctcatcctgtagctaacccctgcttctctactgcaccatcagtttccctgtctttgcagtcactcccatcagcatagaaacgcaccttagtataacttatctttacaaaccctcccttgactgctcataggtcagcaaaatttcttgaaaacattggcacttactctctctgttttcctaaatcccacttactctccagtctattaccaatctgatttccatccacaacactctacgagatttactgctatttgggccaccagcatcctccatatgccaaatccaaggaacattcccagtccttgttcaacacagttggtcacatcttccttcctaagacactttcttctatttgtgcttttaatatcatgatctgctgaccacttctctctcttactgctccttctcaatctccaacataaaatattggatgctgcagtgcaccctaatcatctctaactgcatttttccctagatgggctcatccacacccaagctttcagtgctccatctcctgaccccaaatttatatctctatccctgactctccctgattccaggttcacatatccagtgtcctgcgtgcaatctccttttgatacataataggcatctcaaaattaacatatccaaaactcacccacaactcacccagtcattcaaacctaaaacatggaagtcatctttaacaccatccctcttatcattcctcatagtcaacccaacagcaagtattattggatctgcctccaaactatgtcttgaatgtgtctatttttctccatcctctctgcccaaagcctctaagccaccatctcttctcacctgcagtgacttcatgcactgactccatgctggtgattacatttgttttctatcccaaaacagagtaatattaaaaaaaaaaacaaaacaaaacttaagtcatacagtgtcactctcttccttcagtaacttctcttttattttagaagaaaatccaaattccttacctttgtctgcaaagtcccacatgatctgaccctgcttctgcactttatctcaaacaaatcactccctcccacatttcattctaaacacaccgtcattctttctggcctccaagaggcaaggtctttctcatcttcaggcctctgcttttaactcttcgctatgcctggaaaactctagctcttagcttggctggctccttctccaactttcaggtcccagctcaatagtcaccttctacaggcctcatgctatatctgaaatggtcatcatgtattataatttatgtctctcccctactagaatttcacttccttgaaagaagcctcatttctttttttgttctctatccccagaacgtagaatattccttgctaaatagatatttggtttaatgaatgaaagaatgccatcagcaaaaaggttaggaatgaatcaaaaagtgttttcatctatcatgacttcatttccagacagatacttggactgttgggtacgtgtatttttgcttgagtcattggttctcttaagtggaagatattttctacaatatagcttcatcatttgaaaaatgggcaggaagcatttgtagtgtgaggacttgttcattaatgtttgccatagtttgatatggttcatttacctccaccaaaatctcatgttggaatttgatccccagcataggggtgttgggaggtggggcctagtgggaggtgtttgggtcattggggtgcatccctcttgaatggcgtggtgccattctcacatggcatgagagtctcactctcatgagactggattggtttttgagagaatggattagttccctggagagtgggttgttgtaaagccagaacaccccttgggttagatccctcttggcatattcctgcatcacctttgacctccactatgatttaactcaacacaaaaaccctcaccagaacctgagcaggtgctggcgccatgcttcatatgcagcctgcagaaccactacctaaataaacctcttttctttatacccagcatcaggtattcttttatggcaatgcaaaatggactaagacagtattgttaagttatatgctttgaataaaatagtattttgaattctgcagaattcctttttgtgaacctagcaggtttgaaggtgggatttaaatcgccccatctggcgcatcttacatttcatgtgtttagatcactggcccaaggaggtcaggaaggctgaaatttgtgaaccgtctccttggaataaatacaggctcataaggatcatgtacttaaagtctcctaattgtgtctttgcttctccgcattttcacgtccctcaaagagcttcagctgtaactcatgtagctctgggtcctacgcccagcactgcacactgcaggtagaacatcatggagctgggtgtgtgtgcccaggagctgcagaagaaacagcaagattgctgtgctgtgaatgctggccacccaggcagagcctctggggcacagtgggccctgggctcacgaagcccatgtgaacagtgggctccttccgtggttggtaatctgctctagcagactgctgcaatgtgctgccacatttgtcctctgcttgccatgcttaaggcaaccattcaccaacacatgagcactcttcaattctggaagctcccaagtaccattttcaattcagaaacctatggaaaatcttcagcatggggtggctgtccagataaatcatctggatactgattccatcagtaatagctgatgagtcgtcttctaaatatgtgaatgattgcttcatagactcaagagtatgatggtgtgaaccagaagtacttgatggcagatattctagcaggcacataaatcaagctacatcagttccatcagtttgggaaagatgccaccactgctgtatgtgttggtcagggtgggcttactattggaacaacccatttttctcacatgtcagtagcttaacacaataaacgtttgtttattctcatgtcacaatccagtcaggtcagtggaggttccgaagagggtggatgtcttcgctccaaacagccctctggggatccaggcttcttccttctagtgcagaccttcttaacctggaatccacagatccccaaatggatacacagaatccaggaagtcggtgaacctgcatgggggaaaaagtgtatctttattttcaccaacctcttaaccataatttaacatttcctgtaattatgatttaaggcatgaagccataataatgttagcaccacctgtgactttaatacccatcaaaatcatagatgtttcatatcacattacaattttagtagatatcatgaaatatcatttattcataacactactttaaaattatggtaggcattaggcccacttcaaggtattgttatttactacgttaattagagagtatgcatattgccgtattacaaaattttttttttttaagttcaacttttattttagattcagggtacctatgcaggttcgttacatgggtatattgcgtgatgctggggtttgggatacaattgagcctatcacccaggtagtgaacatagtacccaatagatagtttttcaacacttaccccactccctatttccctcctctagtagtccccagtgtctgttatttccatctttatgtccatgtggacccatcgtttagctcccacttagaagtgagagcatgcagtatttgcttttctgtttccgcatcaattcacttaggataatggcctccagctgcgtccattttgctgcaagggacataatttcattctttttcatggctttgtagtactccatgatgtatgtgtaacacattttatttattcattacactgacacctaggttgattccatgtctttgctactgtgaatagtgctgcgatgaacatacaagtacatgggtctttttggtagaatgattcattttcctttgggtatacacccagtaatgggattgctgggtcgaatggtacttctatttttagttctttgagaaatctccaaactgccttccacagtggctgaactaattcacactcccgtcaccagtgtatatgcatcctcgtttctctgcagcctcgccagcatgtattattttttgacattttggtaatagccattctgactggtgtgagatggtatctcattgtggttttcatttgcatttctctgatgattagtgatattgagcgtctttttcctatttttttggccacttgtatgtcttctttgagaaatgtctgttcatgtcctttgaccactttttaatggggttacaaaatatttaatgtttttttctagctgtatttcaatacacttgcatttctttataattttgtgtattttattttaaacattaaaaaccactattctgagaaggattcgtaggtttcaccagactgccaaaagggttcatggcaaacaaaaaattaagaactctgatctggtggttttgctataccctaagacctttgtgtcctttgcatctagccagcagagcagactgggggtgacactgggaagtagttgaggggcaaggcttagaaggaatgtgtgtcacttctcatccatcagccctaattcagtgatgtgatcccatttgactgcaagggagtctgggaatcaaggtctagctgtgtacccagcaggaaaaggaaatggggcttggtgaacacatggaagtgactgtcaccatacccaagggaacagtcagcaaagaggtggcatcccaaggacaagggacctccctggagaaaactcactttctataaaatttactctaggatgcataatcataataatcctgtaatagctgctgttggttgaatggttattcctgtcagcattctgctaactgattcacttccatgatgtcatttaatcctcataataatgctgtgaaacaggtactgttattattcctattttataaataagagcactgagaactcaagaaataagcccaaaatcagtgctctcaatcatggcactggactgttttagaaaatattgccgcagcctgggcaacatggcaaaaccctgtctttaccaaaaatacaaaaaattagctaggcatggtggcatgtacctatggtcccaactacttgggaggctaacgtgggaggatctcttgagcccaggaggcggaggctgcagtgatccaagattgtgccgctgcactccagcctgggtgacagagtgggacccatctctgaaaaaaaaggaaaagaaaatactgtgacccttgttgaagaggtggaattttgtactggtggaggggatggtttctggagccagagtccctggattcgtatttcaactttgccagtagctggttcattgactggacactttttatggagctttctatgcgtctgtaaaatggagattaatattagtatctgtcttttaggattaaaggagataaacacttaagacagcacctggcacatagtaagtgctcagtgaatgttatccactgtttagacagccagaatggccctgtgactaccttcatgaacatgatctgaaatattccagcagagcccatttctcttgaaggatatgaggaaataactgaggtcaccaagatactcacaaacctagggatgcctacaatagtgtgctgagttatagtcaagaggctggggatgctgctacttttctaatgaaggaaaaaaatatgttgggatgacataaagaaaatgttgttagaaaatagtttccattctaatatcactctctcccctttacagaattccatgaaggtgatgttcaaatgcctctggaaaaactgtgggaaggtgctgagcactgcagcaggtatccagaaacacatccgaaccatccatctggggtaaggcagctctctcttcagggatgcagcccccatctgctcagtctagggccacccgcactcagaaattgcacaccacactgtgccttaaaggttctggacactgggctggcttggtcttcctaatctctagagagatggccactgcagatcatctaagccaatatggcacagtggaaagaacaaggatataacatcctagagcctcattagttcacttactgagtcactttaggcaagctgctgccctgagccccagttccctatggaaatttataataatgtcagctcttcagggtcaagtgtgagtgccaaagataaaatgtatgtgagagagactttaaagtacaaaacactagagtaacctggaatctgtgattggacttcaaggggtccttgaacccactgaaattacctgtggaatgaaatgtacatttattttccagtggagagtattcatgactttaagcctcacaagcatatatagcctaaaaagagttcaagagtcaccacaccaatcgatgctgctgttgctgttcttacgaaatcactttctgttgctcagataagccatttatttgtaaaatctgtacttttcctcattatataacagccttctaaaggaaagataaaatgaaggtttaggagccatagcagttacaggtcaccccaggggggcagtggtattccgtcagtcttgtgctttttgccctgagtctatcttgcccagggatctgagaagggaccttgagaggctgtaagtcagaaccagtgttcataaggcaaacacaaatgcacggccaggctcctgtgtgcttggacacagaggagtcctttccacaagataagtgcagagaaataaatgcagcagtcactttacccagcaagggatacatttagaaaatgcttcatgcccaacaagtgatataggcagaaggtgaaaatagcttctaaggtaatctatgagggtggctccatagtgaccatggagagaaacagggatctagctctctaatcatccaggctgatgtttggggacacaccagagccttccagagcatatggcctggagagcactggagataggacctggtaaggcttccctggccagagtctaccttatgtgtaagaaataccaattgaaatacctcagggaagaacaccctccttctgctcctcaagccttcagggaaggaaatcctgcagtgtctcccctgaaatctcatcgtcaagacaattcacaatgtaagcagctcagtttttttaaaggtttagaaagaacttcccaaagctagagccaggaggtagggtatttgttttaaagtctgtctgcccagaaaattgagtcctattcggtcccatcagaagcatatgctgtttatatgtatttatagaccctggaattggtatcacgtgttagtcctgtgagttcctggggtgctctcacagtgggtggaatctaacatgcaaccactttgctttcctgggatcccctttttcctgatgtgcttttagaatttccctggtgaattatggttcatagccctgccaggcaccgtacaggaatgggcctgggttagcaggactctgaggctaatctatgcttatgaagcccggggcctgtgctctctgatgcactgggagagggaacatacatttgcctttatccatgaactcaattacatggctgtaggatgatggggcatttttaatgagtattagctggtgaggggatgaggagggaaacgtgtcaaagccagaagaaaatatgccgtcacctctgatgtgtctgcagtacacaccatgcctgtataaaaagcacacacttttcaatctcactccattcttgtacaccaggggctggtcctgatttaaccccacgtgggacacgcagtgtcccccaggcctatgtgtctattagcagcacttggcagccagcagcagctcaacctgcctttaactgaaaaggaagtggggacaggaatagaacagatgctcgttcttcttcccactctctggggtctttaatggtatgctggtcacaaggccaagccctgccagacctgatacggtacaaagacacctccccaggcgcctcagcctgggagctcaggggaaatggagctaggctgggacaagccactgatttgaacaaaaagacaggcctgtgaagaggtgaggcatggattttatgttagattctatgcagggctcattagtggggaaaaggtatgttccgagtcagggatctgctgctgctgctgcagtgaggggacacccgtggcctctgcccagccatccccaaagccaggtttctagagaagagaagcaccacttctctacaaactcacaaattatctaataaacattttctgacattatagggagttattttattttactcaaaactttctgtggaaaagtataatgttctatgtttcagggagaggaactttgaaaacacctaagaagctacttttcctggtgatggtgaaaattgagaccttctaacatcatctttctttttatttaataagcattttacgtagtgtttatattgtgtaagatctgcttctaagcaccctatatttattagcttaatcatcacaaaatctggtactataattaatgatccccattttataagtggagaaactgaggaacgggggctatatgtaggccaccaaaatcatgcacacaactagaatgtgtaggagtcagggtttgaacctaggaagtctaacctcagaatccattctcttaatcactgtgccacaacaacgtcagctccattcattcactcattcattcaggcaacatttgctaggtacctaccctctgccaaatacaccgatgtgtgtggagtgacacatgatgaacaaaacacatccctagagaatcagtcatagtgaagcgacaaagaggtttaacaaaatacagacaggtagccagtgattaacaaaacgatgagtaaacacacttcagagggagcacagagcactaacagttaggagtgaagtcctaactcccaaccttcagaatacacccaggacttaacgtctcagcccttgcactgcttgcctgtcctgctcatctggaatattgctgacaacagctccttggtggcgtctgcttttgcttttgtcttcctgtcctctatttcccagacagtatccagagtgatccttttaaaattaagttagagttctgaaaacccccagtggcttccaccacattcagaatgcaagccaaagccatcgccgtgggctgcaggccctggatgaccttgcctctgccctgttctcactcctcccgtcactccctggggtcccgagctccagcctctggcctctctgccaggcccacccacttgagagctgtgtgtcacttctccctggtgtgttctcactgcgggtgccagcatggtgtctccctcacttcctccaggcaggtctctactcaaacgtcacctcctcagagaggcttcctctggccactctctttaaaagacaaaattgacaaatgggatctaattaaaataaagagcttctgcacagcaaaagaaactaccatcagagtgaacaggcaacctacaaaatgggagaaaattttcgcaacctactcatctgacaaagggctaatatccagaatctacaatgaactccaacaaatttacaagaaaaaaacaaacaaccccatcaaaaagtgggcgaaggacatgaacagacacttctcaaaagaagacatttatgcagccaaaaaacacatgaaaaaatgctcatcatcactggccatcagagaaatgcaaatcaaaaccacaatgagataccatctcacaccagttagaatggcagtcattaaagagtcaggaaacaacaggtgctggagaggatgtggagaaacaggaacacttttacactgttggtgggactgtaaactagttcaaccattgtggaagtcagtgtggcgattcctcagggatctagaactagaaataccatttgacccagccatcccattactgggtatatacccaaatgactataaatcatgctgctataaagacacatgcacacgtatgtttattgcggcattattcacaatagcaaagacttggaataaacccaaatgtccaacaatgatagactggattaagaaaatgtggcacatatacaccatggaatactatgcagccataaaaaatgatgagttcatgtcctttgtagggacatggatgaaattggaaatcatcattctcagtaaactatcgcaagaacaaaaaaccaaacactgcatattctcactcataggtgggaattgaacaatgagatcacatggacacaggaaggggaatatcacactctggggactgtggtggggtggggggcgggggaagggatagcgttgggagatatacctaatgctagatgacgagttagtgggtgcagcgcaccagcacggcacatgtatacatatgtaactaacctgcacaatgtgcacatgtaccctaaaacttaaagtataataaaaaaataaataaataaaaaataaagaactatctgagactgggtaatttataaagaaaaaaggtttaattggctcatggttcacaggctgtgcaggaagtatggctgaggaggtctcaggaaacttacaatcatgaaaaaaaaataaaataaaataaaataaaatagtgcccgcattactaatcctgcttaacaacactgttatgctgttgaatttttctttctgggacttagtaacacctgatatattaaatatctattttttaaattattttttaattttttaaatctctgttttcagaggttgaatgggggggtacaagtgcagttttgttacatggctgtgttgcacagtgataaagcctgggcttttagtgtaaccagcatccaaatagtgaacgtggtaccccttaagtcatttctcatccctcacctccctcccaccctccccgtttcgaagtctctaatgtctattatttcactttctgtgtccatgtatacacattatttagcttccacttaatatctgtttctttaggggtttcttgtctgcctgtaagttcccactataagttccatcagggcggagtctatattttattcactgtgttatcaggagaccctggaacagtgcctgaacatattagattctcaataaatcgttgttgaataattgattgaatgagtgaatgaattaatgaattgctttaagacatcaaggaagggttccctggaagtggacagttgaactgagtgctgcaggataaggaagagtttgcaaggcaaacaagagggaggaaaagcattccagacagaggggaaatgcatgtgcaagatttcaaggcaagaaaacagattggcttagtatgattgttttactctcttttgcattaggcgcgttggagactctgactacagtgatggagaagaggacttttactacactgagatcaagctcaacacagactcagtggcagacgggctgagcagcctggccccggtctcaccttcccagtccctggcttcacctcctactttccccatcccagattcaagccgaacagaaactccttgtgccaaaacggagactaagttgatgacgccgttgagccgctcagctcccaccaccctctacctcgtgcacactgaccatgcttaccaggtgacttgcaggggactgtgagagcaatcactttgaccttgaccaaaaccaggggccatctggcctatgagtaaaagacaactcagtggaaaaacagcatcacacacggcagcccggtagctttgatttttctccctttaaagcctaagatctcacacagatagggtcctatggtctagtctcagattgcccaatgctgcctgtggattcgatcccgtagagattgttatgatgataaaaatcccttgggcacagtggctcacgcctgtaatcccaaacactctgggaggctgaggcgggcggatcacctgaggtcgggagttcgagaccagcctgaccaacatggtgaaaccccatctctactaaaaatacaaaattagctgggtgtggtggcacatgcctgtaatcccagctactgaggaggctgaggcaggagaatcacttgaacccaggaggcagaggttgcggtgagccgagatcccaccattgcactccagcctgggcaacaagaaaaactctgtctcaaaaaaaaaaaaaaaaaatccctaatgttatctgggcatggtggcgtgtgcctgtagtcccagctacttgggaggctgaggcgggagaattgcttgaacccgagagacggaggttgcagtgagccaagatcgcaccactgtactccagcctggcgacagagcgagactctgtttcaaaaacaaaaaaaatccctaatgttgcaaagccctcaaaatggtgcctggcacattacataagtatctgtttaaaaaaaaaataaggccgggcacagtggctcacacctgtaatcccagaactttgggaggctgaggcaagtggattgcttgaactcaggagttcgagaccagcgtgggcaacatggtgagacccccatatctacaaaaaatacaaaaattagccaggcatggtggtgcgtacctgtagtcccagctacttgggaggctgaggtgtgggaggatcacctgagcccagggagtttgaggctgcagtgagctgtgatcatggcactgcactccagcctgggtgacagagtaagaccctgtctcaaaaaaataaataaaatgtaagcattggaaagctttggcacagtggcagaatcacactccaaatccgggacttcatgccctgccttctaaatggataattaagcatttcagattagagtagtcgttctcaatgttccccaaatcaacagtgccagcatcacctgggaacttgttagaaatgaaaattcttgggaccacccctcttccacaccctcctctgtgccccccaccaaccctgcattctgttttaacaggccctccagggaatcctgagtcatgctaaagtctgagaagaccttagggacaaatcctgcaaatttaggacatgggtaaaactcccttttttcctgccagaagttactttttttttttttttttgagacagggtctctatctttctctcaggctggagtgcaattcactgcagcctcgaactcctgggctcaagcaatcctcctgcctcagcttcccaagcagctgggactacaggtgtgcactaccacatccagctaattttttaaattttttgtagagacgagctctcactacattgcccaggctggtctcgaactcctgtcttcaagcagtcctcccatgttggcctcccaacatgctaggattataggcttgagccaccatgcctggccattaattcttttaaatgttgatttgtttttatacaatgttaatacattcaaattttaagaaaatatttttcacataattctcaactaccttattcaactttttaaaatctcctttacatacttgtaattatgttctcccacccttgttttataaaaacttttcatgtaactaaataatatccaattaaattgaaacaccaaattgttttaatcattcttattgttaggtatttactttttaatctatcctgttttttcgtcattaataactccactgtaaacatctctgtgcctgctgtgttttgttttttgtttaaattctcagaagaataattattgagtccgaggatgtaatatgagggaacagtttatggctcttactatgtattgccagaatgctttccagtggtaccaagtacaaagccactgccactagcaaatatatttgtaattagaaaattacacctatagaggaaaaatttagccacttatttagcagacttaaactcaagagtaattgaatagagctaatatttgaattagttagtgtaataaatttcattcctgactcttattatgttggtcaaaacgaataattcattcatcttcatttatcactgtttcacttaggtcagaaatcctgggtactaacttagttaaatcattttgctcatctatataatgagagagttggaacacacactagttgatctacaaggtccttcccaaagcataaacttagaaatattgagacttttctgtttatagaaattataaatgttcagcatagaaaatattaaacacagtaaagaaagaaaattcatccctaattccaaaccttagttaatattttttgtatgtacttcaagactttgttctgtgtttatacatttgcagtttttaaaagggatctgttgcagaactgtttttactgtattttattttttctatttaatatatcatgaacattttcccatgccaatgaatcttcttcaacaacagtattttaaaaattgatgcctaatatttatacgtatttgtggggtacacagaacattttgttatatgcataggatgtgtaacagtcaagtcagggtattttgaatattaatcgccttgtgtatttatcatttctgtgtgttgggaacatttccagtcctctcttctaggtattttgaaatataaaatacattgttgttagctatagccatcctactctgctatcaaacattagtactcattctttctatctaactgtatgtttgtacctactaaccaacatctctccctaccttgtcccatcacacccttccccatctcctgtaactatcattttattctctacctccatgacatcaattattgtatttcccacatatgagtgagaacatgtgatgtttatcttcaagtgcctagcttatttcacttacatagtgacctctagttccattcatatggctgaaaatgacaggatatcattctttttaatggctgaatagtactccattgtgttcttaccacattttgacacttcatctgttgatggacacttaggttgattccatattatctttgctattgtgaatagtgctgcaataaacatgagagtgcaggtgtccctttgataggctgatttcctttcctttagataaatacccagtagtgagattgctggattatatggtagttctgtttttagattttgagaaatctccatactgttttccataataggtgtattaatttacattcttaccaacagtatataaaagatcccttttctctgcttcctcaccagcatctgttattttttgtctttttaataatagccaatctaactagggtgagacgatacttcattgtggttttgatacacatttttctgatattagtgacgttgagcattttttcatgtacctattggtcatttgtatgtgtgcttttgaaaaatttttattcaggtcctttgcccactttttaatggaattatttggtttttgctattgagttgtttgaattcattgtatattctggatagtagtctcttgtcagatgaatagtttgtggatattttctcacattcaacaggttgctcttcacgctgttgattgtttcttgtgccgtgcagaagctttttagtttaatatagtcacatttgtctattttgtttgtttgtttgtttcttgtgcttttgaagtcttagccataaaaatatttgcctgggcccatgtcctagagtgtttttcttgtgttttcttccagtagttttatagtttaggatcttacatttaagtttttaatccattttgagtggatgtttgtaaatgacaagagctaggggtctagtttcatgtttctgcacgtggatatccagttttcccagcagcatttattgaagaggatgtcctttccccagtgtatgttctcatcgccttggtcaaaaatcagttggttgtaaatatgtggacttatttcttggttccctgttttgctccattggtatatgtgtctgtttttatgccattttaacaacattttgaattactctgtaggtatatcatgatttatttacctttttccctattactgggcatttgtgttatttccaggtttttttttttttttttgagacaagatttcactctgttgtcaggctggagtgcagtggcatgatcatagttcactgcaacctcgaactcctgggctcacataatcttcctgcctccatctccaaagtagctagaactacagatacactccaccacccctggctaattttttttaattttagtagagacgaagtctcactgtgttgccctcgctggtctcaaactctgggctcaagcgatcctcctgcttctgactcttaagtgctgggattacaggcatgagccaccacgcccagccccaattgttttttataatatatagttgtgcaaggaacattcttgcgtacatttctttagaatgaatgcctagagtggaatagctaacacagagaatgctaagaatttttatatgtattgtcaaattaccttccaagaacattgtactagttcacacccaccctcacagtatagcagggtgtattccccaattttatagtgaagaattctacctcacaggtatcctaaaataggtatatgtacatataataaaatttcttttcagaaatcaacagtcaaaaaccatctctttttataccttagatagcttgcttaggtatatatacaaagtttatttctggctactccctttaaccttgtttaatctcttcctattagataattagtccaagttattaatatagctgagaccatttctgaggtcctcctttggtaataagagcttaaagctccgaaggaaaatattccttcataacagctttctctgttttttatttgacaggccacaccccctgtgaccattccaggatcggccaagttcacccccaatggcagcagcttcagcatttcctggcaatctcctccggtcactttcacaggcatcccagtaagtagaaaaacgaaaaagccaaaaatctggtcaaagccaatgtagactaaatttagcgaacaaatagtagaggcatgcaagaaaaatacaaacatcagaatgccagaagtactatatttcttaaatgatatttgtaaactcatcagcagatatcacttcttttcgaaaaggtgttttgactggcatttcagaaaactataagagagtttcaactgttcataaacaacttgttggaaatatatcaagattttttgtgtgttggtagtgtgtttgtatgtttccaaaagactgtaaaattaatagctgaactcagatcttatatggaaaaaatggtgtttatcattataagtaactataaaatttattacttaggaagtgttctgtacgtatgtcattttgaaggctcaaaaaatacatcaaaatcattttttctttcagagtctgaataatccatgctgatggataatctgaaactaaatgagtgctaaaatatgcaatcagacttaagtagtacataagaattgatttgacatattaaatgattcctgtctgataaatcactgtgaattaacttgattcctaaccattcatttaaaaaatatattggatcttttatagtttatcacagaacagccacatgcatgcacactgttgatgctcacagtggtgtataactcctgataaggttcaggaagtggcttatgataacagatattaaccttattttctcttctccacccgtctccccaaggacctcacaaaagcttcttattgtcaaccactggcatctcccggaggtttccagcaaagtctaacgccttctgtggaactgataaaaatgaaagtggctgaatgaattgtgctgtgctctgttgatgaatatttattaaattccatagaggaatagccaagaataaaaagcatactgctagaggcaatttgggaaatggtggcttccagaaaagactctgggaatgtgatttgtaaacaacaccatgggtctgaagtcatttttaaagttgtattttcattgaatagtggtaacttctggtagctctgcaagagtgaccttgttagtagacgttagaagagggcagcttagacgtgttggtattagttttgcttctggcaagaacactgatccactgatgtaggtgtcaggggttaacaatctgtttggggacttttttttttttttggtagacataaaaagacccagagtggctcttgatacatttttgagacagccactctgtattaacctaaaatggcagccacagttacagaattattgagaccatcttttctgcatcctattaattcctgcctttgacttgggaagaattttcaatgatgtatgggaagcatacaccatgttgctcatctggtactatagcatgtagatggaacagcccagttcaaacctctttcagactacctctgtggccaagcaaactggaatgtttttcccctttgcttttctaactaaattatcttctgaagtatagggaaatcactctgaggggctctttactagctccatgtcctccatggttcttatgtgtcttacacactaggataccagccaggataccttatatcactcgtttttcaacaatagaatgttaaaactctgctatggacactgtgtatttctaccctcatctcagtgcccttgattttttacagaatccctcatttcactctgtgttgattacctgggacattctagacaaaagctttgacagaaagtatatatatgatatataaaacataccatatatacgatatataaaacattccgtatatatgatatataaaacataccatagctgggttaagtaggtattccactaaaatcctatgtgagctttttttttttttttttcttgaaacagggtctcagtccatgacccaggcttagagtgcagtggtgccatcacggctcactgcagcctcaacctccctgggctcatcttccccacttcagcctcctgagtagctgggactacagaagcacaccatcacacctggctaatttttgtatttttagtagatacgggggtttcccatgttgcccaggctggtcttgaactcctgagctcaagcaatctgcccacctcagcctcccaaagtgctgggattacaggcttgagccactgcgcccagctgagagcttctaatttattctttcaccagagaattcccaattgtgctgattgtgtaacctgtttcagcaaagactttagactgattttagcagtcaagcttgccattcctatttaaagataaagtaagggtggggtggaattttcaaaggtttttgttttaccctagaaagacaagaaggctacaactaagaatgttctttttgttgctaaactctctggccatgctctaaaaaaaacaagcaggtgctgctgtcctcctcctcctccttctcctggtgggctagctctcataacagcccacccacacagatgcaggactgttgtacacccacggacagcatgccagcagctgtccctgaatgctccaggagtgccaggcaagccacgtagaatttaaaaacgtgaattcttaccctctaaattggtgtaatagggttttcagaccaaagctctaaaagttgtaagttataatgaatttgtattagtgatggcttcaattgtgtccaaactgaagaacagagaaatattcatgtgataaaatgcttttcaaaaaaaaaatacctttatccttgtactctaaaataaataccctgaggttgtcaaccctgtttagagttcacttttctcccacatctttgagacgtggtattgaagagggatacttttgtacacttcctagaaagtgagaaaaacccctttctgaaaaatcccaagggttgcaggattttatttattcatttgcctatgctagatttcctgaacattggactttaataagttccctgggtaagacctcttcccggaggtgtgtagctgagaaggctgaactgcatatttaacaaatgtaactggaagttcagtcttttgtagcctaaggctgtggggagaggggtaggaaagagaacatccttaattacaactttctttgacatgtttttccctaatgacctgccttctctcctaattatctccatttctttctctctcttttcatgacagaaaactaagagccgttggcccctttattaatcagctcaagactgccataaaataccacagacttggcagcttaaacaacagaaatttattttctcacagttctagaggctagaagtccaaatcaacgtgtcggccaattcagttctggtgaagaccccttcctgcttgtagatggctgccttctcactgtgcatgcacagtcgagagagaaagagagagagagagaaatcgagagagagagcacaagcacatgccagggcactggcaagccagggagagcaagcatggaggaatgcaccagcctctgctatcccttcttaaaggacactaatcctgttgggtcagggccccacccttatgacctccttaaaggccctatgtccaaatacaaccacactggggattagagctttatcatatgaatttgagggacacaaacattcgatctataacagcccctaggaaagcaagtataagctagtcaacctgctatccaagttctaggaggcttcaggctgttggggagggtctccaaagctgaaatagcagtgcttatttgtcaaatgcttagctggtttgaggtttcttttttaatgccttgagggaagattcagaattatatgaggttaaaaccaagccagaggcctttttttcctccctcttaagagaaaaacttacaagaaaagaaatttctcctgcatacttacagaagggcacagcatctttagtgtgaggcttacttgcaaatcctggctctggcatttgtgaacgccatgtgatccttctaaagtaatatcctctactctagttctacctcttagagttgtgtcgttcacacagtgcctggcatgtagctgacaatgcagatttcctaccatcattgctgcctttactgtgtctaagcactgtataatgggtcagagaaagcggctcctccctatttaggattgattcctgtaacacagatatactcaacacatgggagagattagtcacaatttttacagactataatttaaaattctttttttttttatactgggaactttccaaatacgttttgtttttgttcttttttttaaattaaagttttagggtacatgtgcccaacgtgcaggtttgttacatatgtatacatgtgccatgttggtgtgctgcacccattaactcttcatttaacattagatatgtctcctaatgctatccctcccccgccccccacaacaggccctggtgtgtgatgttccccttcctgtgtccatgtattctcattgttcaattcccatctatgagtgagaacatgcagcgtttggttttttgtctttgcgatagtttgctgagaatgatggtttccagcttcatccatgtccctacaaaggacatgaactcatcattttttatggctgcatagtattccatggtgtatatgtgccacattttcttaatccagtctttcattgttggacatttgggttggttccaagtctttgctattgtgaatagtgtccaaataaacatacgtgtgcatgtgtctttatagcagcatgatttatactcctttgggtatatacccagtaatgggatggctgggtcaaatggtatttctagttctagatccctgaggaatcgctacactgacttccacaatggttgaactagtttacagtcccaccaacagtgtaaaagtgttcctgtttctccacatcctctccagcacctgttgtttcctgactttttaatgatcaccattctaactgatgtgagatggtatctcattgtggttttgatttgcatttctctgatggccagtgatgatgaacattttttcatgtgtcttttggccgcataaatgtcttcttttgagaagtgtctgttcatatccttcgcccactttttgatggggttgtttgtttttttcttgtaaatttgttggagttcattgtagattctggatattagccctttgtcagatgagtaaattgcaaaaattttctcccattctgtaggttgcctgttcactctgatggtagtttcttttgctgtgcagaagctctttagtttaattagatcccatttgtcaattttggcttttgttgccattgcttttggtgttttagacatgaagtccttgtccatgcctatgtcctgaatggtactgcctaggttttcttctagggtttttatggttttaggtctaacatttaagtctttaatccatcttgaattaatttttgtataaggtgtaaggaagggatccagtttcagctttctacatatggctagccagttttcccagcaccatttattaaatagggaatcctttccccatttcttgtttttgtcaggtttgtcaaagatcagataattgtagatatgtggcattatttctgagggctccgttctgttccattggtctatatctctgttttggtaccattaccatgctattttggttactgtagccttgtagtatagtttgaagtcaggtagcgtgatgcctccagctttgttcttttggcttaggattgacttggcaatgcgggctcttttttggttccatatgaactttaaagtagttttttccgattcgtgaagaaagtcattggtagcttgatggggatgacattgaatctatgaattaccttgggcagtatggccattttcacgatattgattcttcctatccatgagcatggaatgttcttccatttgtttgtatcctcttttatttcattgagcagtggtttgtagttctccttgaagaggtccttcgcatcccttgtaagttggattcctaggtattttattctctttgaagcaattgtgaatgggagttcactcatgatttggctctctgtttgtctgttattggttttaagaatgcttataattggttataagaatgcttgtgatttttgcacattgattttgtatcctgagactttgctgaagttacttatcagcttaaggagattttgggctgagactatggggttttctagatatacaatcatgtcatctgcaaacaggggcaatttgacttcctcttttcctaattgaataccctttatttccttctcctgcctgattgccctggccagaacttccaacactatgttgaataggagtggtgagagagggcatccctgtcttgtgccagttttcaaagggaatgcttccagtttttgcccattcagtatgatattggctatgggtttgccatagatagctcttattattttgagatatgtcccatcaatacctaatttattgagagtttttagcatgaagggttgttgaattttgtcgaaggccttttctgcatctattgagataatcatgtggtttttgtctttggttctgtttatatgctggattacgtttattgatttgtgtatgttgaaccagccttgcatcccagggatgaagcccacttgatcatggtggataagctttttgatgtgctgctggatttggtttgccagtattttattaaggatttttgcatcaatgttcatcagggatattggtctaaaattctctttttttgttgtgtctctgccaggctttggtatcaggatgatgttggcctcataaaatgagttagggaggatttcctctttttctgttgattggaatagtttcagaaggaatggtaccagctcctccttgtacctctggtagaatttggctgtgaatccatctggtcctggactttttttggttggtaagctattaatgattgcctgaatttcagagcctattattggtctattcagagattcaacttcttcctggtttagtcttgggagggtgtgtgtgtcgaggaatttatccatttcttctagattttctagtttatttgcatagaggtgtttatagtattctctgatggtagtttgtatttctgtgggatcggtggtgatatcccctttatcattttttgttgcgtctatttgattcttctctcttttcttctttattagtcttgctagcagtctatcaattttgttgatcttttaaaaaaaacagctcctggattcattgattttttgaagggttttttgtgtctctatttctttcagttctgctctgatcttagttatttcttgccttctgctagcttttgaatgtgtttgctcttgcttctctagttcttttaattgtgatgttagggtgtcaattttagatctttcctgctttctcttgtgggcatttagtgctataaatttccctctacacactgctttgaatgtgacccagagattctggtatgttgtgtctttgttctcattggtttcaaagaacatttttatttctgccttcatttcgtgatgtacccagtagtcattcaggagcaggttgttcagtttccatgtagttgagcggttttgagtgagtttcttaatcctgagttctagtttgattgcactgtggtctgagagacagtttgttataatttctgttcttttacatttgctgaggagtgctttacttccaactatgtggtcaattttggaataggtgtggtgtggtgctgagaagaatgtatattctgttgatttggggtggagagttctgtagatgtctattaggtccacttggtgcagagctgagttcagttcctggatatccttgtaaattttctgtctcgttgatctgtctaatgttgacagtggggtgttaaagtctcccattattattgtgtgggagtctaagtctctttgtaggtctctaaggacttgctttatgaatctggctgctcctgtattgggtgcatatatatttaggatagttagctcttcttcttgaattgatcccttcaccattatgtaatggccttctttgtctcttttgatctttgttggtttaaagtctgttttatcagagaccagggttgcaacccctgcctttttttgttttccatttgcttggtagatctttctccatccctttattttgagcctatgtgtgtctctgcacatgagatgggtttcctgaatacagcacactgatgggtcttgactctttatccaatttgccagtctgtgtcttttaattggagcatttagcccatttacatttgaggttaatattgttatgtgtgaatttgatcctgtcattatgatgttagctggttgttttgctcgttacttgatgcagtttcttcctagcctcgatggtctttacaatttggcatgtttttgcagtggctggtaccagttgttcctttccatgtttagcacttccttcaggagctcttttagggcaggcctggtggtgacaaaatctctcagcatttgcttgtctgtaaagtattttatttctccttcacttatgaagcttagtttggctgaatatgaacttctgggttgaaaattcttttctttaagaatgttgaatattggcccccactctcttctggcttgtatagtttctgctgagagatcagctgttagtccgatgggcttccctttgtgggtaacccaacctttctctctggctgcccttaatattttttccttcatttcagctttggtgaatctgacaattatgtgtcttggagttgctcttctcaaggagtatctttgtggcattctctgtatttcctgaatttgaatattggcctgccttgctagattggggaagttctcctggataatatcctgcagagtgttttccaacttggttccattctccctgtcactttcgggtacaccagtcagacatagatttggtcttttcacatagtcccatatttcttggaggctttgttcatttctttttattcttttttgtctaaacttctcttctcacttcctttcattcatttgatcttccatcactgataccctttcttccacttgatcgaatcagctactgaggcttgtgcattcgtcacgtagttcttgcgccttggttttcagttccaacaggtcctttaaggacttctctgcattggttattctggttagccattcgtctaaatttttttcaatgtttttaacttctttgccatgggttcgaacttcctcctttagctcggagtagtttgatcgtctgaagccttcttctctcaacttgtcaaagtcattttccatccagctttgttccgttgctggtgagtagctgcgctgcgttcctttggaggaggagaggcgctctgatttttagagtttccagtttttctgctgttttttccccatctttgtggttttatctacctttggtctttgatgatggtgatatacagatggggttttggtgtggatgtcctttctgtttgttagttttccttctaacagtcaggaccctcagctgcaggtctgttggagtttgctggcggtccactccagaccctgtttgcctgggtatcagcagcggaggctgcagaacagtggttattggtgaacagcaaatgttgctgcctgatcgttcctctggaagttttgtctcagagaagtacccggccgtgtgaggtgtcagtctgcccctactgggggatgcctcccagttaggctactcgggggtcatggacccacttgaggaggcagtctgtccgtcctcagatctccagctgcgtgctgggagaatcactgctctcttcaaagctgtcagacagggacatttaagtctgcaaagttttctgctgccttttgtttggctatgccctgcccccagaggtggagtctacagaggcaggcaggcctccttgagctgtggtgggctccaccctgttcgagcttcctggctgctttgtttacctactcaagcctcggcaatggcgggtgcccctccccagcctcactgccaccttgcagtttgatctcagactgctgtggtagcaatgagtgaggctccatgggcgtaggaccctccgagccaggtgcaggatataatctcctggtgtgccgtttgctaagactgttggaaaagcgcagtattagggtgggagagacccaattttccaggtgctgtctgtcacccctttctttgactaggaaagggaattccctgagcccttgcgcttcccgggtgaggcgatgcctcatcctgcttcggctcacactcggtgtgctgcacccactgtcgtgcacccactatctgacacttcccagtgagttgaacccggtacctcagttggaaatgcagaaatcacccatcttctgcatcactcatgctgggagctgtagactggagctgttcctatttggccatctaatttaaaattctttagactcttctgaggtcacacctaaccaacaaactatgtacatatagcccaataattttatttagctagaaatattatcatattatactgtccaagcacattatatgctttataaaacatgctacaaaatagaacttggaaatggttaagaaataaacaaattgaaatgcagagaccactaagagagagagtatttgctttatagggctttattttagggcacacattatttacatcaacgatatggcaggatggaagagtgcaaaaagcagggctttgacatcattcggaagtgagttccaaggccagctgtgttcaagtcagacaatggtgttcaaaccctgagtccatttactgtgtggactggacagtgcacttaacttctccattttctcatctataaaatggaaattatggctatgatagggttgttgcgaagattaaaatagataacatatggaagacacttagcttatatagcaggctctcagcaaattacttctgctgctacttttgcctctgggatgttctgcaggccatttccctgctcaaagcctaaatttctctatctgtaagatgtagatatagattatttattttgcaagttttctgtgagaattaaaagagataatagataacctacttgcctgtctttcacattcgcaagcactgaataaatggtagttgactgccccagttactcccttggtttctccaccctcatcctcaactaaaataagaagctgaaacatgactgtcttgccattaaaagtctgaagaaaaaactcacatgtcatattgagcctcctactgaactcagccacatatggaagtttgaagtgggtcctcgaaatgcatgtactgaactccagagttaagagagccattagcaggaagaaggactttggcgaggggtcattcctgcaggaggtccatgttgtggtttgcaagtgtcccccaaagttcatgtgttggaaatataatccccagtgcagcagtgttgagaggtggaacccttaagaggtgatggggtccagaggactctactctcatgaatggattagtgtcattatcaggagagtgggtttgttataaaaacaagctcagccttctcttaagtgaactgttacccttccaccctttgccctgggatgacacagcgagaaggccgttgtcacatgccggcccctcaaccttggactttccagcctccagaactttaaaaaataaatttctgcttattataaatcatccagtctcaggtactctgttatagcagcacaaaaccgctgaagacaatccatgtccctcaaaccctgttcctggaattttcaaaagcctgttcctcatgcctccccgaccctgctgcttctgtaactttctcatctcagaaagtggcaccactgtgcctcctgccacttgggccagaacctgggattcatccttgactcctcaattcatccttgattcatctagagatgcaattttctttgtgccccatcctaacccacaagtcctaggctgtgcctctaaacaacaggaatccagaccctccccaccactgccgccatacctagtctaaaccaccagtatgtctttgcctggtatactgcaaaagcctcttaactccagggctcctttccaggctgtctgctgtccattctccaaagtgccaaagtgatctgtttaaagcattaatcagatgtcttacttttaaaaacactccaatggcttacttattgccgttagaataacattcagatcccttattgcaggtcagaggcatagcttgatacttccgtctcctctcctcccaccctccacctcccacaaagtgcccacccctttttctgcagtgccttgtaggtgaaaggtaacctcctcaggaagccttctcttaccactcaagataaataaatgtcctctccttctattacactttagcctgttatcctatttcatttctgtcagctacttatcactaaaatgatcttgtgtgatttcgtatttattgtctgtcttctcactagaacgtaagctccatgagggcagagaatttgttttgttcacagctatatcctcagaatctgtaacaatgcctggtacatagcaagtacttaataaatatctgttgaatgaagagtatccaataatctcatatcacttcatgcaaaagggctatggcaactttgcatgatctagaaacttccacattatccgtggctgatgggagtagtgttactgtcatgtcaaccaaacttttccagttctctgactaaatgaagtacagtgttcttgggattctataagttctacaagaattgttaatttttatgtttattttcctgataatttaaaacaattcatataagcatatcagagatcatctacagtgactgtagatgtctcaggtattcactccctctagtttgctgttattcatcctgtacaaaaccaaagccattatgagatggggtgaggaggattctgctcttggaggaagctgcgtatctatacacatgaaatgaatgcactgaactccaaagcttttatttttaaaaactctgaatgttacctctgctggcccttgctccacccaactttagcatgaagaccagtggtatagaatagttcaaactcatggcaacaatggttccaaatgttagatttttacttacctgtataatttttttttttttttttgagatgtgtctcactctgttgcccaggctagagtgcaacggcacaatctcgactcactgctcccttgaactctccacactcaggtgatcctcccacctcagctgagtagctgggactttaggtgcacatcaccaatctggctaatttgtgtatttttagtagagatggggtttcaccatgttgcccagactgggctcaaactcctggactcaagtgatccattcaccttggcctcccaaagtgctaggattacaggcataagctaccactcctggccctacctgtataattttttaaatgtctaagttttgtgctgctataacagaataccttagactgggtaatctataatgaacagaaatttactgactaacaacctggaggcggggaagtccaacatcaacatgccagcctctgttagggcctttatgctgcatcatcacatggcagaaggtgagagggtgaggggggccaaactggcccttgcagaacactaatcccacccatgggagtggagccctcatagcctaatcacctcttaagggccccacctcttaatactattacaatggcaagtaagtttcaacataagttttggaggggacaaacattcaagccatagcattaaaattaatgtctgggaaaataacactgatgatctctattaggccatacttgcattgctataaagaaatacctgagatagggtaagttataaagaaaagaggtttaattggctctacaggctgtacaggaagcacagtggcatctgcttctggggaggcctcagggagcttttactcatggtggaaggtgaagcaggagcaggcacgtcatgtatgaaagcaggaatgggcataaaacaaccacagtcttatgtaaactcaagagtgagaggtcacatatcaccaagggaatggtccaagctattcatgagggatccatccccataatccacacacctcccaccaggccccacctccagcattggggattacttttcaacatgaaattcaggcagagacacacatccgaactgtgtcatgtgcattcctttacgttgaaagagaagagaaagtactaatacctgtactagagaaaagcaattctctaaggatgtttggggaatgttcccatgacttttaagtgacaatgctattcctgtgaccacgttggctcctaggtttttaaatttattaaatgtctatcctcctacatatggcaatactgattaattagttgaaacattctttttccgggaggttggcggcgcggggctgaaggctagcaaaccgagcgatcatgtcgcacaaacaaatttactatttggacaaatacgacgacgaggagtttgagtatcgacatgtcatgctgcccaaggacatagccaagctggtccctaaaacccatttgatgtctgaatctgaatggaggaatcttggcattcagcagagtcagggatgggtccattatatgatccatgaaccagaacctcacatcttgctgttccggcacccactacccgagaaaacaaagaaatgaagctggcaagctgcttttcagcctcaagctttacacagctgtccttacttcctaacatctttcagataacattattatgttgccttcttgcttctcactttgatatttaaaagatgttcaatacactgtttgaatgtgctggtaactgctttgcttcttgagtagagccaccaccaccatagcccagccagatgagtgctctgtggacccacagcctcagctgagtgtgaccccagaagccacgatgtgttctgtatccagaacacacttggcagatggaggaagcatctgagtttgagaccatggctgttacagggatcatgtaaacttgctgtttttgttttttcctgccgggtgttgtatgtatggtgacttgcggatttatgtttcagtgtactggaaactttccattttattcaagaaatctgttcatgttaaaagccttggttaaagaggaagtttttataatctaaaaaaaaaagaaacattctttttcctttgttaaaaaaattaatttgttgcagcttttaagaattccagaagctgggaagattacttagtgttaggagacaggtaatgcaaagggctgaagtgagtaatccaggaggggctgaggacagtaggggccctcctctatgactgagggacagaaaagcaacagggttaaacacaggtcctggtgccagggagagctgcagcacagccctgggtctaccatcacacatgccatgacctttggcaagttacttaacctccatctgccttagtctcctaatctgtaaaatgggaacaatagtaatactgcgtggggtcgttgtgaagactaaagctgctgtgagtgtacctgcacatagtgagcgctcagtaagtgttcggtgggtggcatacgttcttgatttgctcagactctctgcctcttgcctttattccttcctgttgggacgtgagagtctgctgatggggtgttttttacaagaatccatgtatttagtggcagtgattgatccactagagccaacagaagacctagacctgcactgtgtcattgtcgcttactagctacgtaatgttaaataaatctcttaacctctctaggtatgtttcatcctctaaaaagggaatcatgagccttgccctacttgacagggttcatgaggatcaaaagaaatagacaggaatgtactttaagatttaaaatattattcaagtgaaaatatggtattatgagccacttgaaatgcatagatatgaagtaaaaaaatgtttgagatattggctgttggtgggtcttctctgtttgggaatgcattttaattctgccatgagcagccctcctccatttaatgtgtggtctctgtgaggaaagtatttcatttcatctctgcttcttttttttttttttttttttttttttttgagacaggatctcactctgtcacccaggctggagtgcagtggcacaatctcagctcactgcaacctccgccccggggttcaagcagttctcctgcctcagcctcccaagtagctgggattacaggcacacaaccccaacttggctaatttttgtactttttggtacagacggggtttcaccatgttggccaggctgattgaactcctgaccacaagtgatccgccctccttggcctcccaaagttctgagattacaggtatgaatcaccgtgcctggcctcatctctgcttctaatggtcaaggatcagtgtccacacagcaaaggttaactaactgcatgggtggagaacctgccccatcaactttcttttccatgtattcaccaggtgtcacccacacatcatccggtgggcacaggagagcagagacagcatgcgcacacggtcctgtcctccccacccagaggcacagtcagcttaaggtacgacagcttaaaaaactccacacacctcaccacaagggaattaactgtaaaacagaacagcagagagaaccctgagaaatgatcttctataaaatttctccacaattgacaaaacaccctttctttttttcccatggtttttaccatccattacctattaatgaagatttgttgtttcggggggtaatgatttacaataaggtttttgttttttgtttttgtttttgttttacagaataggtaatggtgattattgggtctatttggagccatgttgtattaatctctatattaaatgaactataagatacaatttttaatgcagatcaagagtgatctccccagaagttccttaaccaaaatacaatagtccccttttatccacagttttacttttctgtggtttcagttacccaaagtcaattgtggtccaaaaatgttaaatggagaattccagaaataaatgattcataagttttaaattgcacaccattctgagtagtgtgatgaaatttcgtgccatccagctcagtcctgcctgcgatgtatgttatccctttgttcagtgtatctacactgtctacactactcgcccattagattgactgtaacgaactgtacttgtgttcaagtaacccttcttttacttaataatggacccaaagtgcaagagtggtgaggctagaattcagatatgctaaagacaagctataaagtgcttcctttaagtgaaaaggtgaaagttttcaacttaacaaagaaagaaaaaaatttttatactgagattgcgaagatcgacagtaagaatgaatcttcaatccatgaaactgtaaagaaagaaaaagtcatgcataatatatatatagggtttgtactatttgcagtttgaggcatccactggaggtcttggaacatattccccacccttagcagggactgctgtactagaaattgagaatggtggaagcatttgaaagtacctacttaaaaacttgaaagagcaatgttgctctctactggcatttcttgtgtttacttgtttaattcagttttatgaagatgcccaaatggacatgtccacaagtagacaaatagaagcctaagggatatggtagcaaattttaacagttgagtgtagtggctgtgaaaacaaccagcacatattagagtctgaacctagagagaagtcgctgtctcccaggctggagtgcagcgcgatcttggctcactgcaaactccacctcccgggttcaagtgattctcctgcctcagcctcctgagtagctgggattacaggtacatgcctggctaatttttgtgtgttttaagtagagacagagtttcaccatgttgacaggctggtctcaaactcctgacctctggtgatccgcccacctcagcctcccaaagtgctgggattacaggcatgagccaccatggccagccttttttttttttttttcctccctcactcttgcaagggatttttgagctctccatagaatgcccattgaattcctcccactaaactaaccttcctcgtctgtcttacaggaagcccaggggagagggcaaaaagtgtcggaaggtgtacgggatggagaaccgagacatgtggtgtaccgcctgccgctggaagaaggcctgccagaggttcctcgactgagagacccccaggcagaggggctcagggccctgagccgctcctgccctggcctgccactgcaggtgttggaaagagcttttcctactgaataaaacacagttgaagccaggaaaagccctttcaggaaccttggaggaataacagcaaaaacacagaaaaattgtttaagtcaccacctatgacaaaagaaagttgctcttactgagaacccagcttggagcagctataactagttttttttccttcaaaagaaaagtcaactttttttgctgtatgtctagacttaaaactgtggacttctgtagcaattgaaccaacaaagcccattttacctagaaaggaggcatattttgataagctttctgaattatgccattttcaagatttttttgacacttaaaaaacaagctacaggttattcagtagcatttgtacaaagatcaatacttacttttgttgtgaataatcttttccgtatcttccatttgacttcttggagcagtatatgtcaggatgtgttgcaagacagcgcagcactctgggcatcttttctatggctttttgtttgtttttcttttaagaatggccccacactgaaccatggtagagctattagtttgtagggccccagatggcataaactcgagaagggattgtccacggaaatcaccagcagacttcagcccgaagctgagttcaggaagtccagctgtcactgttgggaaacatctaggagtcttccttggatccataagaagctcttcccctaaaggcagcacagctaactctactctctacctgccacaactcagtcaagaattggcacctgtagccatctgggtaagcctcgatgcttctttcagggatgtgacacaaatggcaactcggagctatttgttactgcttgtctgtcaagattgtagccaggttaatgggtcattttccttctctccagactccaccactgactgatttcagaagaggtagagaactccaaactgtcccagcaggtttgctttagacaacagagcacagcccacatggccctacctgttcagaaagtcatgttagatcaacaaaccacttccattctgagtgcacttttataggttttatgctttagcatgtccgggagatgagttaattaacaatataaacattatgtgagtaaatggaaggtccaaactttaagtttttcttataaaaatattggagctattcatttaagaatttgctcaaaagggaacataacgccaaaaggaaaatgcatgtaggtataggaatttctcagtttagtagggccagggcttgcactatgttccatttattgggcttcgtaacttacttgcttgtttgtttgggggatagtggtgtggggagaggggagtcgtcaagccctataaataagctcattctctatctacccgactctcaattgccctgctaaagagttatttctcctatacctatgcaaagtaggaagagcaccttataggaggcactgtatagggacaggggacatgggatcagccataggaatgttaaatgaaattgcacagaggaaagtttaatatatgtctagagattatacatacacttttttaagcgtaaaaagaagacatctagtaatgacagatattctttttatatacaagcaaaagaaagtataaggaggttctacagtgcaacatccacaatctgtgcattcacatattatgggacttttattttttaaactctcatataaattttttaaaattactccttggaagagatcctggtttttttcttcatttatttttttctttaaaaacatttattttaagagaagagaaaaagagcttcatctaattttgcatcttgattaccaatcagtactagtcacagcaccagcaatactgtatgttttagactgacaaggtcagccaggaaatggcatttttttaaacgcagaaatgtgtttgtttcctctactctaacacgtcctttctcctcctggtgtcctgtcaccccccatgcagcaccactgatgcgagatgatgctctggcctggtccaggaagccctgagccatgggcagattgcccagtggccttgggcggccagagcttgtcacctgtttaaacaagttcaccatgtgtttaaatgacagggtacagtcctggaccagaggtttttctcttcagcaaagctccctggcccttgatcgttggactgttactaatagaaaaagattcaagtcatgaagtataaaatccatcccccatcccagaactttgaaacacaaggagggagagatctttgctatggagcagtcctggagcaaagccccgtggcttccacccccagatatataccccataagtagtgctgagctccagcttagctgagccaagctcagtccttatctggtgttcagccagtgcacaggtataagcagaactacagagctgaatgtagcttccctgggatctcttctcctttctaaagcatttttcacacagttctgtacctcctacccaagttggggctgctttctgcctgctagcccacggctctgtgtactttcttttctggcttcaggtgcagacagaccctcagtaccttcctggacacagacacatattccctggaccaaggcgtggaataactagtagaccaccaagccacaggtggctggtcttgaagaaaagggattatactccttacaggccacccagaaagctatgaattccaatatacaccactgatcgtgcaagttagggttttttttttttaaacgtagcattattttgttatattttggaactaaatgaagtgccaaattaaccagacattcgtttgatgccatctctgtggaaccaagttctctgtgtgtgttcgtttggctgggaggagggggaggactgggcagactgctcccacagcaggctggcagtggaactggagccctggccaccgcagggagctcagaggccaatctacgcaaaaggcatgcaaaacaatggattctggtcccaaaatatttctaagtaaggcatgatgtagccttttgattttttttttatcctttgacaccccagccttcagaaaaggtttttcatctctctccaaagaagtcatttcatagtgactgacaggacattctccagagagcgacaaagcagagtggccagcaggcagtggtgttaagccttgggccttcccagcagatgtgtgctgcattggtgggtgggaggcagtgtgacagcctggagaaaacacacaggtagcaagggagtcaggggggaggtacaagagggctgtggacacctggctcttgctcatcttcttggtgctgatcagctggtggtcaccatccctaagtacctcccagggagctgccattttctcctctgggagcagctgcctgaagcaaggagagaatgacctgaagggaagtacctccggccaagagtgcagggctgctgtgcctagcctgagcgggccatctctagcagatatggacttctctccaccacactagctgaaaagttttctcccttggttggcaaaagccagtgtcaggaaaaaagctgtgggtttctgaccaagaatgtgtgcgcttagctgcaaagtgcctgtcagcagctccaggcaccaacaaggtgcccttttattagacaattcctgcccgaacataaccatattgcagatgaaaattttcaatagagaatgacacaattcttgacctttctaaaaacttttcaaagagatagtcacatgtgtatatgttgcaaaagatttttgaaactgaaatgtcctccattaaatctcaagagcactcgagttttaagtctgctgtttctggtgtcacactaagacacacttttgaaagcagccctgggttctgaattagttggcactgctgaatccatgttcccccttcatcagactccaaagtgcagcattcacttgcaaaggttgagagaaaagtggccagaattgtacatataacagagaataccttgagaatagtagcaaaatactgtaaataatattcatttcctcagggaaaaataaagggcatgcaaaaataggtctggagactcctgaaactaggaagaattttgttatcactaaagtcttttatagtcagaacaatttttttttcaaatgaacatggtatcatttcaagacaaatttatgtgaactgggcagtactgacatttgtgaggcataggggagtgccctgggaaaacggtttggagctgacctgtagcctaaggctaacatttgaaccacaggtgcaatgcctgggggtgggggagggggacggggtgggggtggtattcctagactcacgtaaggctttttctgaatgtaattgtgaatacaaagccttgctggtcctttttatcattacccaatggatgactgtttattagctatcagcagaattccgtaggcgaaagcaagccgtgaacgatgtacattttgctttaatagcatgttagcgaacaaacttccatggacttttgtggacaaggtgctgctttttctcatgaccctgtagaattgctatcgaccacatcttctgtagcactgacctgtgtgaactcagggaagaatttgtgcatacaaatgagtggaaacagagcaggattcatgaatatgaatgagaatgtgaatcattttggagaatgccctgggcacacgggtcaactggaaatttcatttctctaagaaagtagccctaccagcggcacggactgttcctgttcctcatacctgtggggattcctccatattggaactgtttcatgtatcttttttgcattgtaactagccaaacctgaagtcagtaaataaaatgagattagcactttttttaggtaccagttgtatcactgagtaatgcacaccaatagagcaagaaagtataaaatgtatttaagaccaactggtttgcttattatgactgactttgaaaaagcccatatccaatgatatacatgctttaaaaggtatatctatcgtaggaccaggaaccaaaatgggaattttacttctggtcctgttttgtaaatagttcctttttttgaagacaatctcatgttttataacttttgttgtgggtctgagaatcacaatggtaatatgtcttggcaaaacataacctttaaatacaaaaacaattataacttaattttccaaataaaacaagaaatacactgattaggcttctacagttctaagagacatgacactttggtaataagcgtcagtactctacttctcaagttaactggaaatattttacaagatgcagtgttttgtaatcacaaagaacgcagacattttgtgagaaatgaccttggttttatacattgtagcttattttttaaaatatagtattttaccaggcaggaagtattaatattataagtaattcttgctcaccaaacaaagggctatgtctcttttaagcaaatgttttgatgcatatctttttaattaaccctctgcagcaagggtagaaatacagatcagatggaatgggtattataggagaatcaagatagcaacagctactccttttaccattactagtgtgttttcaaagtatggaaaaagatgcctgaagagtcattttatatattttaaatctaaaaagtgttaacaggtatgcttataggccatgggagaaatattcttataaattttttagtgtaaaatgataaattctgtgtcacaaagacaagtttaccacttgacctaccagaatcacagatacttgcatttaactagcaagtatcatttggtggaaatttctaaaatcatagtagacaggcccaaagatagaattcttaggtgatcagtagtgtttaaaataattttgtcctcagcactaactatataactgtaatttctacataagaacaagtgcttccaaaatatagtggagggaaaaaataaaaaaggaaaataaaaaaacaaaacaaaaagaacaagtgcttgatttttcactgtgaagaactagcaggcacatgaggttgtgatcagaaagtgactgagttcccaagaaccaggaaacagaggggagttgtgaagagtttattaaaactgtacaaataattcagagctttgccaaaaccatttcataatgctgtacagttttttcaagcccactcactgttaaaacaagaaagcaccttttctttctaagattttagtaatccaaaagctagcctaattagccaagtatgcagataacatcaaaagcaaagctgagatagaacagccatacacccgttgggcagctcttatgaggtggtcagaaggtcactcagaccttggtttcaaataggctttagaatctgcacacttgaggactagaaatgcacagagttagggaaagccatgtacaggcttggctcctagtctttgagatgaggcgtcttgcaaatctctgttttcactccttggaatgtctccattgttagcattaaagtccccaagaagtttttattgctgtacggttttgaacccaatgagtctcatttccaaaagattcctaattctatataggagaggttgcaaatgtcagtgcctcagaaggaccaggcaagttctgtaaatgattgatgtggataaggcaaagaggaacacaagaatggtggagaccaggttgaactgcagaacacatgccctctttgaaggggtgcccacactcagctctagacaatcagaaccatgcagaaatcaggcccagggctgctagatcttctgacgtggaagtatgatattacctgacacgtaagtgttgacaactaactcaaactcttggccaacactgtgcagaccaaagagaagctgtacacagacaggtgcagcctgcagcccccagtttcaactattgggaaaagtggatttcacattccacagttgtcaggtcaggttcatccatcagccccacaaactcacatgtcggcactatctgggcaactaaaataaaagaggggaaagagatcatttctccccagatatcattctcatggcagacttgaatatagatacgctgagttatccagctctctcactctgcctccttttggcatgcccaggctgtgccccgtaaagtgttgaatcactgttatcctaattttcttagtgttttctaccgtggccactgtgatgaggggctggcaaagagcagcctcgtgccttccgagaaggctgccaggagcctctgaagcttgaagcgagcacacattgcctccttgtgccaaagcccttggccagcctccccacactccttccctctccatccggcctcatgagtcttcgttaccaagtaaaattaccactgcttcacctctgatacagcagaagccttgcttcagaactggtaggcatttaggctatttcagagtgtccactaacctcaaaaggaggtttttccacatacaaaaccctagcatctttgaggggaaagcaaaatgagaataaattatgtcatgaaaaaaattagaagttgcttccttcatttagatggactaagttattttaaactctatcttacatcagagtcctgatggtgttgggatagtcactgaccctttcacgtatgtaataagatacgtctcgttcacacactatttcatttgatctttgtaagaacccagtgtagaataggaatatttaaaatcaacattacccacctccaaggccaacccagagtagtcttgaacctgagtcagcctcagtattgcttgcaaggaagagggaaggggctcattaaaggcctggctcaaaccttagtcttccagactgactagggacgtaagaagacccagggacccaccatgttctcaaaccatctattcagtccaggcctttcagcatagacataaagagcccacccgttactcagtcatgttgccaagtgcaaactgatttatccccagatgaatccctttactgtagcagatccctaatccctaaatttcagccaatttggtagttaattataggagtttattagctaaatgtatgttctgagtaaaagttttgactctttggggaaaatttattttgctgctagcatacaacatttgctatgtatataaacttaagtcaatgccagaaattttaaaaccagctcaaatttataatctgtaatgatcaaatcaaaacatactgtaaactcagagttggaaacgcctggtaatatggttaagtcatgtttaaatatgaatgcaatttaaatgacattggcaatgcctgagatttctttcattgtgaatgattaaaaggcagtccaatatatgaatggatttcatcttacctttctcccgttaatttactaggtgtaacatcttgagtgtaaagtcattcacaggcagttgggttgtggagctagaaggagcctcaaaaaaaaactttttggccagactcctacatcatgaacagggtttttgatgaataatatttattattatgtttctaaagtaatacagtgttggagaatgaaacagtttagtcctttcctcttctgatggaaaagaatcatagcgccgttgccatgacaataacaggatgtagaaagacccatgaagaaagaaagaagaaagctatggttccgaaagcaggtaaccacagattttgaaaggaggcagagatggtgattaaactgtagtccttgttttttaaaatgttctttcatgttaggcaccaccacatagttaataactaccaacttctaaagagaagatccccttgatttatttatatcatgaaaatactaaaaatcaattctcaagtctaattaactattacattatcttgctaggtccttttccctaaatttttaattcagaaaattaaccagaattggccagatgcagtggttcacgcctataatcccagcactttgggagtccaaggcagatggatcacttgaggtcagtagttcaagaccagcctggccaacagaggaagaaagagtgaaaacaaaagaagaaagagggaaaccctgtctttactaaaaatacaaaaattagtcgggcgtggtggcgcacacctgtaattccagctacttgagaggctgaggcaggagaatcccttgaaactgcaggcagaggttgcagtgagccaagatttcactgctgcacctggggtgagactaccattaaggaaggaaatttcctttaaacagaaaaaaacaaaggtgctcatctatttcttctgaattctctctacatccttgacttaagaggaaaaccagcactcaagaaacagctttaaaagagaacagtccccattctagctaccagtcttgctttcccccatcttggcaagccccagtgaatttgccattgaaagattaccctcccctttgccctcatctgcctgagctagaggccaggctgttgttaatgttttttcagttccaaagcccctgatgggacattcttgtttctgtgctactgctttctctctcttaaattaaggtgcaaggggataaatattactataactgggatgtaaggctcagtcagtgtggctattccctcccttcgggggaaatattccatctgtctgaacggttttaggtgatcatgaggagagcggcttagtcacacagccagccacgctcatcacaaaagatttgttcagactcactgtaaagaatgacaaggcagatagctaatcctttcactgtgcctcaaagcccgccgtgcaagtcaccaaccctaccggtcctctccacgtgcgaggctaatagagtgatcagaaccaggaatgtgagctgggttccaccttaggaggggacaatgaggacagagcaagagggctccatgtttaattactccaggctctgacttctgcccacaattacagagcatgaaagcagaattggcctttagtaagtgaaaaggaagtggctcctgcagcatataattgttataatttcgtatttatggaaagagaaaaggacttcagtccactcatgttgttaagcacttgtccctcactccactggagcccccttcctatgttttgggcacagatggctgggaccgagaggaaagaggaagagcggctgccagagtgtgaatatacccctcagggatatacagcggagtttcatgataaactacccatactttcccaaaaaaggttgaggagcaatacataactttgcagattacaaacccttgttttactttttaaaccttttttccatactctgcttattggaaatcgatggctgtgatgtgaccaacacctgtgatgatagcaaagcccctcctttcacagtctcctgactgttcggggaacctccttggtcattggtagaaagctttagaaaagacttagctttttagggaagaactaaaaaatctccaaaacatactagtcccatgacttcgataactgaaaatgtcctgggtgtaaactaacccaggaatgtggatcatacatgttttttttaaaaaaaatccctgaatcaatattttcctacaacacaccctaaaattcctatttttgtaattaatggttggacagtgatcagccatttaaacataggctttctggaataaccagacactagaatagtttccaaagtgttttgcgtatcaaaatcctatatacttagaagaagaactcaggataagaaaaaatcgctaggtcccaaagggttcatgactatcatcagatgcaactgcgagtggcctacggtcattttttcaaatgagaagactggagagagagaacaacagtaatcacaaaacctctgttgcccttagtccatgacaatgtttaaggaaactttaaaaaattaagccatcttctgaattgttttctacaccaaatctaaaatattaaaatgaaattattaaatatttaaaatggggtatttagtggaaatgcaatcagtagaaaacattgctttttagtgcctgctaaacaagtaaaggagaaagaatgaagagaaaacagcagtccttcctgtgtgacactcgtgtggaaatgacaggcattcacatgtcattgagtgctaactcaaaagctaggtggcaatgctgtccaatgtttagagatcttttgaaatataattttaccaccattcagaggtaagtacttgcttaacagaagtctttaatgttagtgaatgaatgtataaaattataaactatgcattttcaaagagtagcatgtattttgtatcgaatccaagtaaatttttttcatagctacctaccacaactgcaaattattcaaaataaacttggatacatatccttatggggatatgggaagcccatctatattctcctacttgatgtttttaaagattgaaactttattctgaaacatcaggctctaaaaaattccatcattaagatgaataaatgggaaatggtttatttgttacttcgtaagcataaatgggaaatgttggctgttagaaaatgtgcccagttctttaaaggtggatgttctagtaacactggattaacaagcaaacaaaactgcatgaagtgaacgaatatttcattggataaagttagcataggttttatctgctgggtttaattctcaatcccagaaaaaaatattcttcaaggggtatcagttatagtttcaaagaacaaaatatgaaaatattgtccagcaaagcaaatcattgatcttttttcaaaattacttatattttggaaagtctatatagaatatccacaaatttcttcagccctcttgttgatttcatattttcatgaaactttttcccctaataatttgtcttcgctctttaatcagtgctttactacattactcagcctgaaaaaatatcttttccttcatctgacaatgtggaaataaagaactccatttctgtcattctggttctcttcagtgtccattgagaaagtttctcaactgtttgtaaaatacggggggaaaaaaacacgcatttctaaacctggtacttaaggttatactggattgtttgctacctaattagaagttattggggaaggggcattgtgtctttttatatgatttttagccaaatccagatgttctgatacacatttctgaatacctgtctgactgtaaatacagcctgtggaggttcaggttgataaacctttcacctgactgctccacagccatgctccttgccagcttctggcacattgtacatagatttgttgaatgtttaaatgatgttgtttttctaaatgctgttctctaaaacaattttttgaatttcttttgctttccattgttttggactttgtgtgttcgttttttaaaaaaaaaaatgtttcctaaatatttaacaccaggaaaaatatttttaaatacactggtgctaattgaaacagaaggaaattttcagatcgaagatgtacaatgttaaatgttcataccagttaaactgcactttcccaaggggacagctggcatctacttgaaatgggcatcaagagaccaccaaatgtttacagtttctgtggcccgtttaagtgtaaaatgcagaagtggctctgtccccccagagttaaggatttgctacactggtcctctggaagcatttaagtagaagaaaaggcttatagtcagaatcactttagtaatcgtcttctggtccttggacttttctgttctgtaatgcttgtaacaatgaatatggtgttgccaatctagtctgatatcattgttgacctgtacttactttgtggatggttctacctggggttgcactggcacaaacagagccagaacactggactttcaaaagaccattttgacttctacagtgtccacacacatgaatttaaatgcacttgtaactggttaattaccatgaagtaagtctaacttccacttaataaaagtttttgtgtatctgcttcta

SEQ ID NO: 364 - DNA, 39090 bp, Homo sapiens
aggactggtccagccctcccaggcaggtgtagggccgactgcagcaacagcggccctgaccccagctcccatggctcccctccccccgcactcccaccccccgcacccggcacacaccatctcccagtcacccagtctcgaccggttctcgcgagatccgggttactgagcgctcggggccttttcaaatcgggatccgttaccgcttccccggcagccgccattgtcgcgctcggagcccctcagctcaggcggccgaggcggaggcagcggcggcgggatggcggacgccaacaaggccgaggtgcccggggccactggtggcgacagcccgcacctgcagcccgcagagccgccgggcgagccgcggcgagagccgcaccccgcggaggcggagaagcagcagccgcagcacagcagcagctccaatggcgttaaaatgtattgtcttttcctccgggaaccggggcgaggtggggggcggggagtctaccgggcggctagaggccgggctgtgccccgatgggggacaaccacccccagaccccggcccgcccccgggccatcggcttcctgaggagcaggtgcagctgggccgctcccaggcccttccccgcccgccccaggcctggccgcctgtggtctgggagccggggctgggggcccggggaccagcgctcttccctgatttctagcccgagacagcgaacacccctcttccctgactttggttaaagaatctttgagcaaagctcagcgaccgccacggtttgcaggaaaatggtccccctttaaggaccagtagttagtgttcatcactagggagtatctagggatgacatcatcggacatttcctcttaaccaccgagaacatatttaaaaggaatattcctggcttctttctgagcttcacaagtttagtgttttgttgttttctaaagtgtatgttcatttttaaactgatttataccgagaggaagtttaataatgtgctgttagactctatgttttgtgttactcttgaattggctagacgtactttaaaaagggaaatgtgcgatgtgcgtggcttcccttcccactgggtaatgtgcgtcagctgtggagagtatttttttttttaactcagtgtatgattatcttaagtttggtataatagatggttaagattttttttttcccaaatgaaggaagacttttaaggtcgcagctgtcaccagtgcctataaagaatttagttgaccccaatccataataatttctggttctagggaaatgttatgctctcctttgttcctgtcctgtgggaggatatgaagttaagcgcttactttcatatgcctacctccttaaacctgaagttgaaagtatgttaataattaagtgaaaacatccttttccttctctgttatgcctcagagcagaaagcaatagatatatgctcacagtaaaatagacaagggaaaggtctttctgacctttgtataagcatgtttgaaattgtatggtaagaactggaccagtctgtgtaaaagttggtggcaaaaaagatggggtagctctccccagctctttgacactcttgctctcaaatgagtttgaacaggatcggcagcatcttctaggagaatagaggtgcaggtataagagattggaacttagtggagtttattcctggatgaagagtggtgcacctcagtaattgaggaaccagaaagggaatgaagtgctttctaccatgcttgccaaaatgtgggctttctggaatttggcattaaaaatagaaatgaaaaccggtggaatgataaacttaaaaatatgtgctattcatatctaaacacgagtatacatgccaccttttctcctgaacaaaaagtgcagccttgaattacagagagaagccctcctatacttgggtatgattagttttgatataggggaagtttggtatctaaacctccatcagattttctattcccttctaaagtctcttcatgatttagcaagacaggaaaagagaaaggagaaaggtggagaaagaatccttttctaatttaggaagagaaaaatataaggtgaagaaatgaagaaatattactagtaaatacagattatttccatattgcttataattcgcctctccctttctctttttcccagaagttgaatcgagtccaatttactctcagggatttctcttactgtctattccataagaagatttgtgatggtccagcatgagtcattcaaactgaataactagcgacctagtcctttttttttttttttttttttttacttcgtgaactagtaggagtggataacaaccccaatacataaaccttgagttgattaccatatacttttaataataaaaataattcattgttgattataaaaattaccataatattgccccaaattatgtattggttggaattgaacagagtactgcttgtcatcaggattgaaataatatttgctgaggttaatccatagttattgagggtgggagaccactatgtcttattcttctttgtattcttaaggcctagtaaatatttgtggaagaaatgcagaagtgaactttcatgcttatgaaactcatatacagggaatttagtttgcatattcacacctttagaaaagatccgttttccaactgtagtcttcttctttaacgccaaatggtatactagctctccttttcttaaaaatgaataggagggaaaagagcagtattattataactttattattcatgtgtaattaagtataactttggagtaggtagagattgagagttatattagggtactataaaatattaagcattggagcaaggtaatgtgttctttagctgagtgatttttattaggaataaagactagaactgtttcccccagctttattgaggtaaattgacaaaaattgtatattttgaagtgtacagtgtgatggtttggtatacaaataaattgtgaaatgattaccacaatcacgctaattaacgtatctgttacctcgcatagctaccatattttttggtgttgaaaatacttaagatctattctttaagcaaatttcaagtatacagtaaatatgttaagtatagtcactatactgtaccttagatctacagaacttactcatcttataactgaaagtttgtgcccttagaacatttccccatcccctgctgccctccacctctggtaaacacccttctactctctgcttctgagtttgacttttttaaaagtctgtgtgtaagtgagatcatgtagcatttgtctttctgagtctggcttttttcacatagcccaatgtcctctaggtttatctctgttgttgcaaatggcaagattttgttctttttgtaaggctgaataataatattccagtgtggatgtgttgtgtaaacataaaatataatatatatcatgtttcctttaatcatttatctgtcaatggacacttaagtcgttgtttccatatcttgggtattgtggatgatgcagcgaacatgggagtgcagatatctccttgagatagtgatttcattttcattggatatatacccagaagtggcattgatgaatcatgtggtagttctgtttttaattttttgtggacccttgatgctgttttccataatggctgtaccaatgtatattcccaccagcagtatctaaaggttctttctccacgtcctcagcaacagttgctatcttttgacttttcgataagtcatcctaacaggtatgaagtgatattgcagtctggttttgagttgtatttccctgatgaacagtgatattgagcaccttttcatataccttttggccgttggtatgtcttctttggaaaaattatctgtttggatccttttctcattttttaaattgggttgctattgagttgtatgggttccttatacatttttgatattaatcccttattggatatatggtttgcaaattttatctctcatttcttaggttgcctttttattttgttgagtttcctttgctgtgcaataactttttactttgatgtagtcccagttgtttacttttgtttgtgttgtctgtgcttttggtgtcatatcaaaaaaaaaaaaaatcattgccaaggccaaggtcatggagcttttctcttgtgttttcttctaggagttccatggttttaggtgttataagtttttaatccattttcattttgttttgtatgtggatatctagttttcccaataccattttttgaagagactgtcctttcaccattgtatatttttggtgcctttgtcaaggattagtttaccatatattggggatgtgtttttgagtgtttgttatgctccattggtctgtgtgtctgtttttgtaccagtaccatattgttttgattactatagatttgtaatataacttgaatcaggtagtgtggtacttttagttttttcttcttgtttaagcttgctttagccatttgagatcttttatggttcatacggatttcaggaatttttccgtttctgtgaaaaatgctgttagaattttgatagagatcacattgaatttataggtcattttgggtaggaaggacattttgacaatattaattcctctcatctgtgaacatggaatatctttcatttgtattattttcaatttcttttatcattgtttgatcgtttttcagtgtatagctctttagctttcttggttaaatttatttctaggtattttattctttctgatgctattttaaatgagattatgttcttaattttttggatagttcattattattagtgtgtagatatgcagtggatttttgaatgttgactttgtattctataactttactgaatttgttctaatagtttttttggtgttgtctttaaaattttctctgaataattttctatataagatcacatcttctgcaaacagagttaattttacttctttctctccaatttggttgccttttatgtcttttatttgcctaattgctctggctgtgaccttcagtacaatgttgaatagaagtggtgagcatgggcatcttctctttttcctgctcttagaggtaaaaccttcaaattttcactgttgagtatgacattagctatggggttgtcatatatgacctttattgtgttgaggaacattccttctatactgaatttgttgagagtgtttatcttgaaaggatgttgagttttgtcaaatgctttttctggatctattgagatgatccttgatttttaaaaaatccttcattctgttaatgtggtgtataacatttattgatttatgtatgtcatccttgcgtccctgatatagataccatttgattatggtgtatgatccttttaatgtgctgttgaatttagtttgctagtattttgttgagaattttcacatctgtgatcatcagggatattgctgtaattttcttttcttgtaggatccttgtcttgcgttgttatcagggtaatcttggccttataaaatgatttgaaagactttcctcatgttcagttttttggaacagtttgacaaggattggtattagttcttaaatgtttggtagaatttaccaggtcctgggcttctctttcttgggagatttttgattactgactccatctcccttgttagtggacagttcagattttctaatttttcatgattcagccttggtgagttgtatatttccaggaatttattaatttcttctaagttatccaatttgttggtatataattgttaatagtagtttcttatgattctctgtatttctgtggtatctgttataatgtctcctctttgatttctttatatatttttctattttttcctctttgatttctgattgtttttcccccttaatctagtttgatctttgtcagttttgcttatctttcaaaaaccaacttttaattttattgatcttttctattgtttttctagtatatttcatttatttttgccctgattttcattattttcttctttctactaagtttggactgagctcttttttctagttccttgaggtgtaaagttaggttgttggagatctttattcttttttttttttttgatacagagtcttgctctgtatcaaaaaaaaaatgtgcaatggtgtgatcttggctcactgcaacctctgcctcctgggttcaggtgaatctcctgcctcagcctcccaagcagctgggattacaggcatgcatcactacgtctggctaatttttgtatttttagtagagacggggtttcaccatgttggccaggttcatctcgaactcctgacctcaagtcacccacctgccttggcctcccaaagtgccgggattacagatgtgagccactgcacctggcctggaggtcgtttttcttaatgtagacatttactgctctgaactgccctctggtagttttcctctggaactgggattaatattggatctcatactacaccattatacttttaaaatcacacattaaaactatgtttcttcttttgatgttggagcttgatttttttcagaaatgtatgttataatttagatacgcatagttcaattttaagaatagataacatttttatgactattttagggtttttattttaagtacattgtgggagtggttgtctaaatgaacagtttgggaatttagtacttggaattctggatgtagtaccaatattttggaattatgtagcatcatttccttaagagttttcacatatatttttactttctcttccaaagtatttatgacttggaaatagttcagaaattatataattatggctcagtttcttaataattagatcatccctgtagcctctcaactgttatgccttttatagttttttttctttttttgttatacactgggaagaaacttaagataaattttaattctacatcatagatgagcagtttagcagtatttttaagatgcttcttatgggggaaaaatgaagaaatttactttctctgatcatctttgagtaaatattttaaagaaaatattatatataatgttactgtttttaatggaattttcagattgttgtaagcaaatatttaatctatgtaaccccacctaagtcaagaatagaacattgtaagtacttcagaactttgtgtaattttcacaattggtttaatccaggaagaaaataggcaggggaaggggtattaatctagagactatatagatatctgcttactgaatagagtcttagttactttacaaacattcactgaattcatctaagcctattatgtaaacaggccctttgggaattgaaaagaaaggtttgttcttctatctgcggtactcagaaaccagagaaaaggcctttgtgccttttggctgcttgctgccattttcaaaagtgtcactctgtttagacaggtaggtactttctagatttagacagttgagaagactcccccctaggccatgccatttctgatgaaggaatatgtttgatagtgaagatgtcctttttaaggtctaaaaaaaatggcaaagcaagtttggtccaaatgtctctttctttattctagcagtttttctggcaacatctgtgctcagatgagtatggattcttaattgactgttaattcattaaaaaattatagcacaatgttatatgcagtcaccgtgcgaggtgctgctgataccaaagcagatagtttttgttctcatagagtttacatactatatttatggctgtgttacctacaaagaagagtagtgttcaagaagctctgtatatattatgtaacaaatgactgcagttagaggtgtgtggagcattgcaatgtgtggatcaccagaattgctgggcttagaagataatttagagcctggctcatgaaacttggtttgttgtcagaataatccagaaagctttaaaaaaaatttagattcctgggtgtcatccacagtgatattattagtaatgtttgtgaaaaattgctttaaaattgaagttttgttattaaaatagttttaaattgactagagcacttatttaaataagaaatctattggccgggcacggtggctcacacctgtaatcccagcactttgggaggccgaggcgggtggatcaccagaggtcaggagtttgagaccagcctggccaacatggtgaaaccctgtctctactaaaaatacaaaaattagctgggtgtagtggcagacacctgtaattccagctacttgggaggctgaggaaggagaattccttgaacccaggaggcggagattgcagtgagccgagatcttgccactgtactccagcctgggtgacagaatgagactgtatctcaaacaacaacaacaacaacaacagcaacaaaaacccccacaaaaaaccctattgtttgtgctgtaaaaaagacttgttttgaaaagtaaattgcattttaaaatagaaatccaaatttttatctgtagggtttaagtgtatgcctacatcttttggatggttggcatatgacatcatagagttgcattgtgattacggtattataaattacttttttttctagttaaggcctcattaaaaatcaggtttggccaggcgtggtggctcacgcctgtaatcccagcactttgggaggcgaggtgagtggatcacgaggtcaggagttcaagatcagcctggccaagatgatgaaaccccgtctctactaaaaatacaaaaaattagctgggcatggtggtgggcacctgtaatcccagctgctcaggaggctaaggcagagaattgcttggacctgggaggcggaggttgcagtgagtcgagattgcaccactgcactccagcctgggtgacagagcaaaactccgtctcaaaaaaaaaaaaaaaatcaggtttataaaattttggcttacgttgcttttatgtactgcttctgtcctacattacccattgtaggtaatattaatgaaactgcataatttgatgaagtaccctattctagtttataggttaaaatgtaacataaaatattaggatactttataagttttctgtgttgatcaaaattgggaatagaagaaagtttgagagtcttaatgtgagtatattcatatatagatgtggatttatatacataactttgtattttaattatgcttctaattaagggaggagaaagttctgagaagaaactattaacctttaagagatgaactttttcagagtatcactgtgtaagttagtttttaaaaaagtttttaatgatgcccagaaagttaattctccatcaaaggtggcagttttagataccttagaagtaaaattatctgctcttccctctgttccagtctaatagcatttattaattaagtagtgtgatgggaaaaactgggtgattgtttggatgcttacaactatttaatgtgggaaaaaaatgaggactgttaaatgagaaaccaaatccttgctttgaaatagcattgggtaatttcaaagctctcaggctgattctccagctactttgctgaggtctagcttagtggagagttttgtgaggtgataaatatggaatacttatttaatatagacttccattcttataagcacaactgagggtttttgtttgtttgactttttttaattcacagggagaatgatgaatcagcaaaagaagagaaatctgacttaaaggaaaaatctacaggaagtaagaaggccaatagatttcatccttattcaaaagacaagaattcgggcgctggagaaaagaagggtccaaatcgtaacagagttttcattagcaacatcccatatgacatgaaatggcaagctattaaagatctaatgagagagaaaggtaactatctctgaaataacccactgttggataatcttcatataggcaggggagggaactacacaaacatttttattcctctgagccacacagactcaaaaaattgatttttatttcttgacatgtgaattaatcttttcctcttctttctcttgacacaatttcattacaaggtagtatggatatttttctttttgccattttagtgggatagtagcgagccagcatatgcatgccaccaagaattttgttaaagtgattgctttgtctagttgaagtttttatagattttaaaagggctattgcattagttaagcaatacatttagcgtgttaagaatgaataataaggtctgattatttattttttttccaaaagctgttttgttactatcttggtggagtctggaatctggctgtggaatttattttgtttgcattgtcatgactgccatgatgctgtctttgcagttctaaattaaaattgcattactgctgttgcagttttgttttcagaataatctgaaaaccttcatcttatatacatggttggttttggggaaaaataattttaatacttgatcttgtaaaagttagttttgttatctcttgaaaaattgagtttcaacagtcctgcaaactatgtacttggctttgaggctgatctcttctaataaatttttttttttaaattgcattggtgtatctgttgtaaggtgacaactatttgattggttttattcattgactttatttagaaagtgtgtggcttgctgtgaagcatgatttgtaaatttagtttactgatggcaaacatgattgaagacattcaggtagaaagtcaccttaaaacagctgttgtgtgtaggctgaccaaagttatttgaaaagtgctaatgttgatgttttttaatatgataggttaagggaccatttgtatgtatatgtgcatttgttcaccaactatatcatgctggccaaaatatgatctgtagtatgaattaggttaatatggttgttagcttttttttagagaatgtggatgatgtacatttctgaaaattagttaaatttacatagccattgataggaggtatgttggtctggttttgattgttggtgaataataggtgcttctctgtagagttgtgcacaggtgtgcagtaaagcaagatactggtgtttaaatgtattgtttcttggtatcttccttttgtatgtcttatgtagttggtgaggttacatacgtggagctctttaaggatgcggaaggaaaatcaagggtaagtgctgtgggcaataatctgcttgaggtttaaaagttcctcagcagtttactttttgtataatacttgtaccagtttttggaaacttaagtttcattttgttttactttattatgcaagatttgaggctctataccagcaagtctgacacttatacaaacctagctgcctggaagggatgggttttgtaaacactccaaaggggcattcacttttccaatgctctaaggtaatacttcttcttagccaataagattttagcataggattttttttgttgtattttgatgtcttcaaggatactttaaaagtcactgaattgataatattcctgagttttttgagggctatagcttaaaggtgttagttcagaatgtatttttgaaattttactgaaaagttaaatttggtagcctgcaggactacatgagaggcagtgctctgaccaattggtatgaatgacatttacgattatattgacgtagaaggaattggttgatagtatattttgatttttagcaataagaatgcagtatactgaagaatacaatggaaaactcttagcaatgtttcattatgttagtaaaactagttgggtgcatgatgaataaaaattttgtcattacattcatatgggactttgaatggcaatcacagggaattattttttaaataactctccaaattaatttattattagtttatagatgatttttacatacttccaactgggtgctgttaaatgtgcagccagttttaatctaatagagaacttgttaaaaataaaattaatatttattcactattttgattttaatagagttgaaaaatatgtcgtagacaatacattttttgaaaatatttgtaactacagaaggataggtctattggagcctttagttatttccttgaattcctgttgatttaatttgtgcagtgacattaattttaacttaatgaaaagtcacctaaaagtgaaaaatgtgctccaagcttgttacatgttagagtctactatctttaatagatatatttaaaaatttagagaaaatttgtggttacttgcctgttatgttctggaggtataaaagatgaagtgattctaccatattattaattgccttaatgattgaaatgttagaactgattattaacttcatgtactgatctaaaactttttttcttttgcatattttgacaaatctacctggatatagggttgtgggtaagaaattttttctttaagtatcttaagtcaaattaaactttggaaaaaaattagcacataaacatttcctataaattttttccctattaagtgtggttgaattcaaagatgaagaatttgtaaagaaagccctagaaactatgaacaaatatgatcttagtggaagaccccttaatattaaagaggtaagatttctcatatttagaatttaaacatttgactataaagacatgttttccttggattttcaatttggtaatatatttgcctgactacaacttttttttaaaacataggtgttcattaaagcattatatattgacgaaagttttacttgtacatgattttatatttgctgttaagcagttatcctatatacttgattggttccaagttgttaaaaataaaagcacataatttaaaaaaatttgaggacctagaaattcaaaggggataaactttaggtgctaagtttatttggtacagacattttcaatatttagattttgttatttgagaaatataatatccttgtaattgataattaaaggtcacttaatgcaaatatgttatggatttgaataaaattgatattcactttttatcagagttacttggaaactgtactagattaaaatttaagaaaaattataactttgttagtgaaatttataactagaagttggaatcccctaaaatggaaatgtcttctttgtacaaaattgtagcagtgtaaacaggttgacaaaaaatgactagaagatacaaacaaaaaatttacagtttaaccttgagaatgattggcttgaatagcactcatcttcataggttcctttattttgtattgttaatcttaatagtttgattacagacctgttatgtacatatacttgctaaagtctgtgttaaaagagataaatagtgtaactttgggaccctgaagattttgtactaatactgatgctaatcattggttgtagagcagtactgtcacccatggcatttaatagtatactaatgatttgattcctggctttatcactttctagtgggtgtctagacatgctacttaatttctctaaactgaagtaatggtagtagtactactgataatagaggcataccttggagctattgtaggtttggttccagactactgcaataaagcaaatataacaataaactgtgtcatatgtatgttttggttttgcagtacacataaaagttacgtttatactatattctgtttaaagtgtgcaatagcattatgtctaaaagcacaatatacatgccttaatttaaaaatactttattgctgaaaatgctagtgatcatttgaactttcactgtaacctttttgctggtggagagtcttgcctcagtgctgatggctgctgactgatcagggtgatggttactaaagtttggggtggctgttgcaatttcttaaattaagaacaatgaagtttgctgtatcagttgagtcttcctttcataatagatttctctgaagcatgtgatgttgtttgatagcattttacctacggttgaacttccttcaaaattgaagtcagtcctctcaaacctgctgctgctttatcaattaaatttatataatattctaaatcctttgttgtcatttcaacagtgtacatagcatattcaccaggtgtagattccatctcaagaaatgactttctttgctcatacaagaagtaactcctaatttgtttaggttttatcatgagtttacagcaatttattcacatcttcaggatccacttctaattctagttttcttgctctttccatcacatcttcagttacatccaccattgaaatcttgaagccctcaaagtcatccattaggattagaatccacttattccaaactcctgttagtattgatattttgaccttatgaatcacagatgttcttaatgacatctagaatggtacattctttccagaaggtttttaatttactttgcccaggtctatcagaggaatcactgtctatgacagcaatagccttacaaattgtatttcttaaataatcaggcttgaaagttaaaattatttcttgattgatgggttacagagtggatattgtgttaatagacctgcaaacaacattagtcttcttgtatatcttctttagcactcttgggtgacaagtgcattgtcaatgagcagtaatatttcaaaaggattttttttttgagcaagaggtctcaacagtgggcttaaaatattcagcaaactatccttaaacaggtgtgctgtcatccaggctttgttatttcatttacagagcacagacagagtagatttagcctaattattaagggccctaggattttcagaatggtaaatgagcattggcttcaagtcaattaaggttaccagttgcattagcccctaataaaagagtcaatgtggcctttgaagctttgaagccaaacactgacttctcccttctaactctgaaagtcctagatggcatcttctttctatagaagactgtttcattacactgaaaatctattgtttagtgtagccatctcatcaatgatcttagctaggtgttctggataactttctgtagcttctacatcagcacttgctgcttcacttgcacttttatgttatagagatggcttctttctttaaatctcatgaaccagcttcaaacttttcttctgcagctttctcacctctctcagccttcatagaattgaagagagttaaggccttactctggattaggctttggcttaagggaatgatgagggtgctttgatcttctgttcaaaccactgaaactttcagaccactgaaatgttataagcacaaacaagtgaagtatcttaatagttcaagaagcatcttctgtgttgtgttatccttcttccccaaaggtaaccggtatcttaaattttgtgtttttacctgtttttgaaacagcattaaggctgtttcactttctcatcattcgtgcgttcactggagtagcactttaagtttccttcaggaacttcgatgcaagaggcccggcttttcacctgtctgaacttttgacatgccttcctcactaagcttaatcatgtctaacttttgatttaaagtgagagacttgcaactctttcttttacttgaacacttagaagccattttagggttattaactgacctaatttcaatattattgtgtcttggaatagggaggcctgaggcgacggagagagatggggagcggctggtcggtggagcagtcagaacatttattgattaagttcgctgttttatttgggcacggttgatggtgccccaaaacaattaaaacatcaaagatcactgatcacagatcaccataacagataataatgaagaaggttgagatattgcatgaattaccaaaatgtgatacggagacacaaagtgagcacatgttgggaaaatggtgctaatagacttgccggacacggggttgtcacagaccttcaatttgcaaaaagtgcaatatctgcaaagcacagtaaagtgaagcacaataaaatgaaatgtgcttttatttacctaataggatttttatgaggattaaatgagatacatggtaaagaacttatgttctggcatcagagaacctctctaactcagggcaaattacttaaactttctcctttgttttcataattactaagatgggagtaatgatagcacctacctcatagtgctatcaggactcgaagagttaatatatgtaaaccatttagtgttggctatttattatgcttgtgatattaccagtgtacaaagcactaagcacagtgctcaaaatattttagctacataataaacgttagctttagtaatgatgattgttactcctgtccaagagtcttttgttcctgagtgtgagataatagcttgaaatcaaaggccatgctaccaacatataacatgtatcccagatacctttatttgagcttgcttccaaattattctagtcctgtttgagtctggggtttattattaaaaaagttattaacaggaatgtatagaattagcagagaaaattttgactgttgtggtttgtgtcagccaattattggtggtttttatgcataagccagggccagtgcttcagaaatatattggtatcttaattttctttaaattataataatcagaatgattattttgaggattaaattaggttggtgcaaaagtaaatgcagtttttgccattaaaaaaagctttgaattaaaataatggcaaaaactgcatttacttttgcaccaacctgacaattttctgttttatgttttctgtttctcttcaaaggacatgtactacagattcttagtgtctttttcttttattggaaaaaaaagtttattggatgctaaatatcatccaataaacttccatataatattggatgctaaatatcatgttattgtgttcttttaagtttcagcacattgtagatcctcagtaatatttcagagaccctggagttatataatccaagttgaaagaggatgccgccatttttaacttttttaagagaaaaaaaaaaggctaaatttggcctagctaaatgatgagggatttattcagttgacttttttgaattaatgtcactttggcagtccctttcctgggatatctaatttatagaggggtggatggaatgaatgcttagaactgctactgaggaaagtctaaggaaggtgtatttccaatgttccttaacagactttagagttacatttttttcatttaattaaatgcagaatagtagcagttataaactgctattgtaggccctccaaaagcaatagcagtcagtaaccagcaggctgacagcaaggggaaaagaagagtaaaagtcatgttatatagtaggtggtttgttttatataaattttattttatatatgttttatgtatgtatgcatgtattgtatgtgtatatatttctgtcatatatatgtatataaaagacagatcaacacagcaatacatcttgttaatgttataagcacaaacaaccgaaatagcttactatactagttgaagaaatatcttctcttctgagttatctttcttccccataggtagccactgtcctaaatttcgtatttttacctctttttgaatcctcaggcctaaagaatttatttattaacttatatgttttgaagcattctttgatacattttttttttcttttgtaatcctttttattccttcatagtgaagaaatatgttgcaagccagaatggttttattattttaccttttcaccttttattctccagccatcctagagaatttattaaaatcacttgactttctttttattagtactgtattcccagactgaggccagcaaagtagatttgatggttacctttacacttcatcttagcctaaagatagagaagtgatgatggggtgattacctttaacataatcatttggcattgcagatgatagtctatccatgtgtttatgtggtttttgtttatttatttttgttttttagtattccacctagtgggatgagtgagaagtacatttatgtttgtgtgtgtgtgtgtgtgtgtgtgtgtgtgtgtatgtttggttttgtttaaaggtagggtgtttctcttaaaaaattaatgaacctaacaaaaaaacaatgtttaatatcatttctcacttggacatttagccctcctttatctctcctctcctccatctcagattataatcattgttgaagaaggtaagagtttagaaggtgggtaactgtattttgttcaggaataaaatttacagattacagtcggccatcctatcctctaccccagtatttgggttttataacagtctgttccagtattgaaaagctttgaattagtctgaatttggcattccattgggcatccaatagtgagaaatgaccattcctacattttggaaagaaaagttgcagtgagtacttcgctcttctttgagttacatgtatgtatgcatgtaccctagtgtgagagcaaaattaaactaatttcaagttcttaagtggctttagtgattggaaaaaaaaattaactgacatctctggaggctgaaatattttgtttatccacaggtttttatgggactcaattctctggatgagaaaaaagctcactcttcaagagggtcaataatttgagccagacaggatagctactgtagaatttaaattgttattttaattttgtagaattagtgatgtatttagtggaatttaacattcaatgtgtgttataggatcctgatggagaaaatgctcgtagggcattgcagcgaacaggaggatcatttccaggaggacacgtccctgatatgggatcagggttgatgaatttaccaccttccatactcaataatccaaacattcctcctgaagtcatcagtaatttgcaggccggtagacttggttccacaatttttgttgccaatgtaagttcaagctttagtctaaaatttgtcattcagatagatagctaatttgattaaatgaatgagttataggtttatagaacattttgcttatttttaactaaagtaagtgaaatagtaattattgtaaactcaaaatcaattgacgtatatacatatatatacacacacacacacacgcacaaggttagagtttaaatacaactatttggattttttaaacatggaactgtgcagtttatacacattcaagcagttcttgaaattatatgtgttttggtttatattggtaaatggatttctttttttagtcttgatatttgtgaatatgcatgccatagttggtttgttatttgttctaagcatctgaaagtcagtgaaaacaatacttttcaaaatctggatttctcttggtaaaaatagatatgcaagtttcaaatgtacaaaacaggtttgagcagttgagagatgattttggaaattaaaaaaaataaggataaggaacaatgtagacgtagcttaaatgattttaagcaactgaagatgttttaaaatttgaacattatcaatatattgttgaactagaattatggttctttatggttttaagagtttagaaaagattttttgtatttacagatggggagatggatttattaggtatgtaactttatacaattttatattaagcttgacttcaaagttggttggaagaagctaaaggaagtgttcagcatagctggaactgtgaagcgggcagatattaaagaagacaaagatggcaagagcagaggaatgggcactgtcacttttgagcaagcaattgaagcagttcaagcaatttgtatcctgatttacatttcagcattgtttatgaggttgaagaagcataataccacctttgttttggcggggggtaattgaatttaaggttgcctggcttagagatgtgtgttagactttagtctccagcaaataaaacccttagtaggtccaagtattaaagtcactcttaaaacttgaattggccatattgtacagggctggtatgaagttttttcttttctttcttcctaccacaattaattgtatacatggatttaacaattgtgtaatctattgtatattaatgcagttactttaagcgaagccttacgagtttacttttttcaatggttgaattaaaaatacatcttattgatgaaataaaaccgtaaagcaaagaattgaatatttttttgagtatatgaaagtggctaatatcaataagtattaaagatgttaattaaaatatcagagagttggactctaagattattaaaaattagtttgtgttctgttataattttatagttatcttaactgactttccttgactgaaccaacagctatgttcaatgggcagtttttatttgatagacctatgcatgtgaaaatggtgagttcctgtatatcacttcaacctccaacctcttcagatcttttattggctctcttctacattacagttctttgtggtaatatgttaaccatattataaactttcttgcaattaggatgacaagtctgttcctcatgaagagtaccgttcacatgatggtaaaacaccacaattaccacgtaagtaaaagctattatgagaaacaacataggctttttttggtttgttttattatgtgctaagcaacactttgtttttgtgcctacatcctagtttctcacaatttgggattagtttggagttatgaagatagtttggcgctattgattaggaagactgagaagataagtgttacgtgccattttttttttctctttggtaacttttcctgactaatcagcaatacattctaaaatgtttggtaaatttatacacttgaaggaaaaaaagtcctctgtaatttcaccatctgtgggtaacctcattataacatttttgtgtattttcttctagcctgctatgtatattttttacatagttgggaacaaaaataattttgaattattttttgtttaacattagagtataagcattttttcatgttgaagattcttttcaaatatttttattggtagtataatagtctatcatatagatgttccataactatttcactgttctgtattttaggtgttttaacttttcttttgagtaaccacagagtaacacatgcctttttgttcacaaatctttgtaatgtttttgagtacttccttcagacagatattctgaagtagatttacagttctcatgggttagtattatcaaattgttttccaaaatgactataacagtgtaatatacttattgtattatgtgtctcagtgcctctgtgtctcagtgcctcctttgaaaagtggggagaataatattgtctacgtcatggggttgacatgagtattacatgaattaatatatgtaaagcacttagaatcattttggcataatgtaaacactcaataaatattagctattgtttttactatttcactgcatcttctctggtttttaaagtattcttataagaaatcttaaatatacagacaaaagtaaaattactcatatagttatcatatgccatatttgttgtagatttttttctttaaaataaataaaattttatggtaaaatggagcttccccatctcccttgcccatctttcaacttatgccttatccagaggaaacaacttatggatagagtatttatcatttaggttttaataatttgactacacatttgtacatccataaacatagggaattgttttgttggatttaaaattttgtttgagtgatatcataatgtattatgtaacttgcttttttttttaaattgtttttgagattcatttatgttgatagatgtagctctagtttcttcattttaactgctgataccacattttatacatttttctgttttttaggttattttaatttttagttattgtgtattaagttggaaagtatttgctattttttatcagaattatatgttctctttatatttgctagaaattatgtgtaaaactggccttcctctgttgtttctgggaagtttttaactactgatggtttatattttctgtcttttttttttgagtcaatttttgtaatttctatttttctaaggattttttctgtttttgttcattttcaaatattttggcttaaattatctcttaagtttttgctacatctatgtttctgttttaaaaattctgaatgcaatttttatttttttcttggttaattttgttagaaatttgtcggttttaatagagtattcaaataactgaatttggatgttttgtatttctaatttctgcacttagccttattattttttccttctatttattggggtttagtgtgtttttgtcctaactccttaagttgaatgcttacttcaaattggtagcttttcctttctaatataagcatttatgactataaagttagtacatgggttttgctatggagcatttttatgatgggtcagtttttagagtatttaaaaattaccattatgggccgggcatggtggctaacacctgtaatcccagcactttgggaggcccaggcaggtggatcacttgaggtcaggagttcgagatcagcctggtcaacatggtgaaaccccgtctctactaaaaatacaaaaaaaagtagccaggcatggtggcgcatgcctgtagtcccagttactcaggagactagggcaggagaattgcttgaacctgggaggcagaggttgcagtgagctgagatcgtgcccctgcactccagcctgggtgacagagggagactctgtctcaaaaaaaaaaaaaaaaaattaccattatgatttcttattgagccatgtattatttgaaaatggaagttttcaatttccaaatgtatgagtttttttttttttcctttgtactttttcattttaatgtggtcagagaacatggtttatatgtgagtgtgattctttggaattcatttggacttatggatggcctaccatatggcacatttttcttaagtattctgggtacagttggtgagtgcagtgatctatatgtgttcattaaatcaagtttgctaatcatttaaattgtcttagatccaatactttttctgctgtaacactgtttatcttattatcttatgtgtctggtaaaattgcccaatagaatagtggatttgtctactttttcttgtttttacttaaatatttttaagctagcttagtaggtgcatctagattagaattgatatattttcctagtgaattaaaaattttattgggtgattttttttctctagtagttactttgagtctttggtctcattttaatgtaagtacagcagctttattttgtttagtacttgcctggtacatttttcctatttttttactgtttcaggcatgccccttataaagggtgttattgctgggcttagactttttaaaaaaatcactttgatagtttttttcaccatgaaattgaagagttcaatttcttcacatgtattggttcatttggattaatttccattatattgtgtcttatttttttgtcttacaaatacttattttactcctatcttggattcttctggatattttaatatttctgtgaagcctgaagttaatataattattcttttatgtaatagtagagtgacctttggatacagtcactttcctactgaattatactatcattgctcagcattttagttctgtattattagttctgtactatttttttttctgtcctgcaaattagacaatgttatttaccattttcttgtgtcatcactcctctgcttttatagactctggcactaatttttttcccctgaagcatatatgttagaagctcttttaagtgaggatcttttattagtaaattctctcaattttgggttttaaatgttttcaaagatagtttaacttgtataaagattgataattattttctctaagcactttgaaagtattctacagtcttcatgtttacactgttgctattaagtcagctatttgttgaatcgtcctttctttataagtaatctgtccttcctgtgcagtttgtgcagtttgacagcaaagaccaaagtcttaaaatcagctacatgtcattatgcaagcaacctaaggtctcaaaaatttcctcttctatggacaatagatgtggaaacacttaaggtgccatataaatataaataaatatttatatcaatgagaaaactaggtaatataatatttgccttattcagtgttatactttcatggttattgactttttagtttgatttgaaccatttaaaaagtaattatcaaattttaagtgggtctacaaatttgggcaagatactcattttcagatatgtgtgccatatataaggtgatatgatattattcaaaatcctctaggtattttattattcctctcagtgtacctttaagtggggtataaggtgtactttgtattatatcatgttttatttcataaaacacttctcattaataaatggttttatagtcgggcttcagtgtgctactttctagacaaaaacaagaaccagtgcttttatatgaaaatttgcagaaattttacagatactactacaggtatatagctttttaaaaaattttattgccaattagttaatcatatatggatctttgtaatgattgttctcatttttgttttaggtggtcttggaggcattgggatgggacttggtccgggtggacagcctattagtgccagccagttgaacataggtggagtaatgggaaatttaggtccaggtggtgagtattctaacttcctcttttctttttaaatgatacatatgctagctaataaagcctccattgatgtggtctgtaataatgtttaaaggactctaattaatagttagatatttacggtgtcacttcattctgaaaaaggaatgaaaccttgagcacagctaacatgaaagagataggcagaagtcaggagggtttctttggggccagctatgttgtagctagccttttagcattttggattttgaaatgtcttgaaggcagaaggagaatatatcatctatgaacagtatttatggagtagctgaaatgctaccatatcataggcagctaaaatctgtttatccatttgggaaggtggcttttcaggtagttatttggctgctcacctggaagaactcacagttcatttttagagattggtttttaaactttggtgttaggacccttttatattttaaaatttgttgagaacccgaaaatgctttgtttatgtagttataattaccagtatttactgtattataaatgaaaaattagaaattaaaaaaattacatattaaaaaatgataaactcattacatgttaacatacataaaagttttaagaaaataaactatttttcaatgcaaaaaagaaattggtgaggagagtggcattgttttacctttccacacatctttttaatgtttggcttaatattgctgttatatctgtttctgcactttagttttttgtgatattgtacatcatatagtgtttggaaaattacaccttaaactcaagagaatgagggtaaaacatcaaataatgtcttagtagtatttggtgacttaaatagttttgacctattgaaccctcaagagtccctggaccatactttgtgaattactgttttaattgatggactaataaatgctatcagattcctattttgtcaagatgctgtagtcacactttaaattatgaggctcattatcataatcattctgatccaaacaagttttctcccttacccttagactctcacacctacctaccctctcctaaatacatactatttatattttgaaaatttttactgctcttttaactgcgatgtttagagagtccttacattctggcctgatctctaaatctgctgtaatgctatttctgtgtctatgctggaaaaaaaaaatcattgatagtagtatttctgtgtttattgtggaaaaaaaagtgaatgattacctagttcaagatattctctaactgaatgttgtgggtgttactagtgaattttgctttcttgtctgataaatgttcaaagaaacccttttgaagattcatgattagacagctgctatggcatagcactttaaaccatgcctcctgtaccctaccgcttctctagtgtttcattgtggttataccagtggtatctattttgctataatgcattatatcatcttttagtcataaaaataaaatatacttaaagtacatactgtgtattttatttgaggtatgggaatggatggtccaggttttggaggaatgaatagaattggaggaggtatgtataaagatttgtttttttgtatgtacccatcaccatttttaataaactagaaactgtgttgagaattccatgaaaaaaaagtcatggtttattgttggctcatgttctaaaggctgctagcagaaattgagcctggtacatacttaaaggaaggtgatgtgttaagaagtagctgcacaaggtagggtggatgaagagcttactggtgagatttaacatttacaaaacgtacctttcagctacatgactgacagttggatctcaaaattaatctttattccataggaatagggtttggtggtctggaagcaatgaatagcatgggaggatttggaggagttggccgaatgggaggtaggtaaatgtatgcagtgggaagtgtgtgcatatttagttttccctattattaatatttcccccctataacttaggaatgtgtgctaaaaatgtcttcagaaggcatataggcactaggggataaggacaggcctggggaatggggatgatatgtgtggcatgtgaggtaaattgggtaaatgacagactattttatatttgtgacttacgcgtcttttcataatttagatacattcctgaatgttttcaacatgtattgatatatttgaaaaggttaatttgttgcacaattttttcagagctgtaccgtggtgcgatgactagtagcatggagcgagattttggacgtggtgatattggaataaatcaaggctttggagattcctttggtagacttggtagggctggctgcatacttctccttttctttttgtaggctataatttttgaaatttggtttctctttttttgtgaaaaatcagaaaatcataatgttttatacaacttattacctgaagaaaacactttaaggattttaatatgctagctctctttttcaacatcttacatatttgaactctattttcagaagactttatgcttttcatttattgtaaatcagagcacatagtaccttgggaattttaaagtatgattatttaaaattaattagtatattatctttccatccttgtttaggcagtgcaatgattggagggtttgcaggaagaataggatcttctaacatgggtccagtaggatctggaataagtaggtttaaattttactagaatttattcagtaatatttgagtgcttgcaaagactttgcaagagtagttatcgtagtatagtaatactttgttcttatacgttaatgtgtcttgctataatttgagaaaccttgataattgagcaaagcctttctgtttgattattgtttgaaatttctaaattaactgtttgaattttacttttttgatatttctaaactatgtgttaacagccaatccaggaaccttctttccaactaaggaatctggggatttctctgatcatgtttcaggagcaacttttgctttagcaccaactttgtttccttgcttattttctataatagctattagtgactagcttattttatttgtaaacatctatgtcttttggtaaatgcagatatagcactcttaggcatctcctgagcttgagtcaggctaaggttgaaagaggtacttaattcttttcctcttgaacctttcccgtaatagcatcaagagtagttgcaacactggggaatgctgaatctcccatccgtctatttccactcctaccttttaggccttatattaagcctgaatacatggattatttatttatttttttaacctcttttgcttactgggacatgtctctgagctctccatactttattgacttcctttaattgatcaaatttcacaaatagaaaatacaacctatttaaactattctaaaagtaaattctaaaatcctgtcagcttaagacgtctacttccattgtatcttgctccttttattcctccttccatcatcttttagcctcagccatttcctattagtcctaacttccttaccttcctcttttatctcagtgtttgtacttctgtttccctgattttatattggttattcacaaaaagccaatttgagggtgatgttaatttttagaatttccatgtttggggatattacatacaagacaaaaggtttgataatgagtaagatgggagcaattgaaaaggacaggaaatcgagtcagtgcataagaatgaagtaggtatgagttcggagctaaattcttaagctctggctaacgggaagtgatagcattttttgttcccttgacaagttccgtgtaatattgagattaaaagttatgttttgctatgagtattgaattaccatgagaataaaaactgggaaacagaggtgaagatgctgaggtgaaagataagctaggaaaggagtatttacttgtaggagagtatgatgagagcggcttgagtgctagagttgtaataatttgcatttatctctgtgtatctttattttagcaattattatgcttgatattattggaaaataaaaataaggatcagaacaactgtcctgttattggaagcagtgattggtagaggatttatatatttatatgatatatttagtgatcagaatacaattttatacagttatatatgcataatgtatttatacagtggctagaatttctcagctaactaaatgtatatgtaagcaaattctgttctttggaaagttgttatctgtatgaaaataattttatgtttttatattatttaattatataaacaaattaatttcccccttctttctcaaaaatgtttatctccttttcctcctttctcctcttctccttttccttatgtttttgaaacaaaaacacaaaattcccaaatccccccgtcctttcttgaaaatccaggtggtggaatgggtagcatgaacagtgtgactggaggaatggggatgggactggaccggatgagttccagctttgatagaatgggaccaggtataggagctatactggaaaggagcatcgatatggatcgaggatttttatcgggtccaatgggaagcggaatgagagagagaataggctccaaaggcaaccagatatttgtcagaaatgtaagcaaataaatattaaggataattcaaattcttttttttcttgtatatatgttactaatacctcttttcattctagctaccttttgacttgacttggcagaaactaaaagagaaattcagtcagtgtggtaagtatgcaaatgactgcagatatgttgatattgattatggaggaaaattggttttaaacttttatacactgtgtttagacctttgcctgtccggatgcctattcctggatagtcttgatagcgtgccaggtctaattccacttcaaataaatgaattatttcactatcttttgacttagagcagtgctattactactaggtaataacaaggtttaggtaacaaggtttaggatataccctatcattgttttctgttaataaagatagggcttattttattacctcattttaaaaagataaatatattatcattctttgcattaaactttttttctcatgagaaatattaataaatggtatatttatttccttgtttatagtatagtgcaggggattatcagcataaccaactgagatgctgatgtccaattgataaaggagttaataggtgagacccattctacatacactgtattcctacccaacacaggaaacctagctggtagcatacaacccactgtcaggaatgccttggacatgggtacattttggttgcccttcttattcttttataaactgttcttaactataatgatactacttatacaaccttaatgtgttccacaggtctgtggaagattaggtggtttatcacttttaaaaaagagctttttatataccatacttaacttttgttacaaatatcttaattgactaaattctcactttttctttcttttgcaataatgagagaattcatgtgagtgttataaagtaaaatattttttgctagtattaatatttttctgctattgcatggaatctcagcgactgtagtcacaataggaaattacataagatagcatatatataatttctgaggtcatgaaggaataggtttagtgttctgtcacaaaatagcctttgtggccactacagagataatattatctcatatttctttatatctaactcttttgtagcttttattatattaatagttatttgttcaagttttcttccatcctacgtggaagctcttgaaggcaagaattgtctttttatcttagctccttttattgcctctgtacatatggtaagagtttatgaaaagtttataagttaagcattctgggtagatgttcatttattcagtaatttattcattaaatccacaaacatatttttggcagtctgttaggccctagaattttgaaggtgaacaaagtgagatgctcctgccctcaaagaacatacaacatgaatttgtctaggatgttctgttgactctctttcttgatcatccttttattttgaactaatcaaaaattcaagaaaaagttgttgaaaacaagttaactggttaatagtcaccactaagagaaagcaaaatagtaaagtggccttgaggtattggtcttctttgcaggagtaagaagatctaccagaatgagtaagcagtgtctggccatgaatcctgtagactacagaggaaagaatgtatatagggtcttagtgaaatacatcaaatgaggaacagtggcagcaagtataatctgtgttgatttagtttgagtgaaaaaaaaaatctccaaatgagatatgacattatgttaaaagtagaaatgaaacttagcaagataaagagcaaagcaggacaaagaaatgacaatgaaaaggtgaccattgttgagttgactgttctttattctttgtaggctgctttctgtttgaggttagatatgagcaaggcttgcagcaaacttcaagtgtttggtgggcttctggttggagtggcattgttttgacatgaggacatcagcaattgcaagacattttttgaaaggaaaaaacattcaaatctacatagaaaatttttatagtatgttagccatataaaataatggttaaattattattctttactttgctattttagctctattcttataatcctttttcgattataattatattttaagattaatgatttttgttttatcaattcttttgtaaaagtttctgactcttagattttatattaagataataccatatttacacaattccctatatctcccttatttttaaccttgaactacattgatggaaaagttataataatatagaattaagtgtccagctattgacaactatacaaattatctagctagtatgaactgaaccatccatttttctgccatgtcacttatttataaatctttttcttagtatgagacatttctttttaacatgctgcaagccagtaatggcctcttgggcagtaaaaggcagtcttctgttgttgtttttcttgtaagcccaaagagagtaagtatattctcttgcttgcttcttagtaagaatctagtagtactccttgcatctcccataaacaatatctgtcagtaaagggtgccactggcaaccccctctgcttataaattatctctagtgattaactgttcttgatggagtaattacaaaggctgagtaaatgttatattatgggttatattaccctcaatagaacattttctcagcctttgtaattcagaaaagattgttttcagatctttccaaatataacaagatgagaaataagtgaatataactgctattttctggttccatcaagcccctaaaggtaacatttttgaccccaggctggtaagatacacatctttcctgtagcaaaagagatctatctttttatcttgccttgtgtaattcctcagagagatgcattttcaaaaaggctgagtataaataaattaacctatttagtattggaccccacatcatttcagcttgtgctaatagggtcaaatgggcatagtcttttaaatgtgctcccatgtcatctgtatactttagctgcattctggccttctggctcagtatgatgcaagactataacattttagaacttcagcacaaggaaaacccattctcagttattcctgctataagccatataaacagatataactttgttccacagatttccattatgtagtatttctacatcagtgtgcttgtcaactgcatggaaaatggaggcttatggtagattttattgattaaagtacttgctgcttcaagcattttgagtggactttagaataacttaacagtaaaattgcagtaatagtacaaatgatatatgatgagcattcattgataggctctgtcttttgtttgtaaagaaacaacagaatactttgcttttctatcccttatatccttattatgttttcttatcgtagaatttctgattttcctgttttcatccgtggttgtgttaacttcatgtaggcagtagattttattgaacatcctttaatttggtctatttttacatgtgtttttatactggcatatcccaaaatataccccacaagatgtttatagactgggttaaataaaacagaaaggtttcttttactgtgggacaaatcctttttattactagtatatgtaacagcaatatgtttgattattctgtgatactgatttctcatggcatactattttgtcctgtgctgttgccaaaatatcagtcctgtttttgttttcttggaatcgtacaagattattagatatttaacttagttgaggaagttctcagagcatgtaaaaagtcaggcaggtttgattttaatcagctatttgaaactaatttttttctcctcaattatttatctttagaaaagaaaatatttcagttggtgtttttataggatcaggaagaaacttagaacatctataactctttctggttctgtactgctgggattctttttaggggagcagtctaaccataaaacaaatatttatgggctactgtccatatagcttgaacatcagaactgtgaggaagttgaagtatcttagctgagggaacttgtcaactagaaaatttttgaggtcattgtgaggtcaggaatttggaggtctgagtgctgatttctaaactgaaagaggcaatttaagagaaaaacaaaaaagagaaactgtcctgaaagatcgagagacagattatgcaagaaatagtgacatattttcttttgaggttttgaagatttcttgcttaggtgaactttactattgctgataaatctatgatgggatacttaagaaaaactctacgtttttaggtaaaattaagataaggaagaacctttaaccttaaaagcccttgaaaatcctccacagttcttttcaaaataactgtaaggtgctgtcatttaccaacagcttctttaattaaacttgctttttttcaggtaccagcattcaagatattaagaggactctggaaattgtgctgcatttatctttaaattgttttaaaatgtgttttccagtttcattttatgatgtttattagaaagtgtgattgctatgtttttgctttttttccccatttcattccagttgtgggctaaatattatttggatctactttaaccattatcatgtaatttctctggagattagcctattttataacttttcagaacacatttaaagactatctggcctgtgtaacaagatactggttttgtctcagtatgacatttattatcctagaccatttaattagtgtttagtaggtgagcagttgactaccagttggttttcaaaaagaaatgcagtaatagggagtggatgaaaaagtgaaagtataaagtagtccatcatgttataggtaagagattattcagatcaagatttcaacagaaaaaaatcttccttatggattgatattaaagtttgatcttatcatctggaaagggcttatgcagtttttcgacaggtcctcttgcttttacctttctccttttttttctcctcccttcctagaactaaatatgtctggctgtctgatttggttgccagactaaaattagcccatagtgatctggcaactataatatttaaagtcttctaacttgatttgttttgacatgtacatctagtggggagggaaatattttggtaagtagtcacaccctaaatttatgacctgtttggattgagtgaccatgtattccagtttgcctggggatagtctccctttacatctgttacttatgtgtaattattgataactcccccttttactctcaaaagtgttctattgtagtgatgaattcttatggccactttttattttgataaatggtattgatttacttcaaatacgagtctctagagttagcaatgatattataactgcataaggacaggtttctggttttcttcctctttcctgaagcttctctgatattctccttgacatcactgtttttacctttattgatttaaatctgtgctatctcttcccatgactatttccgtagcatatttggtgccattcttaagactttgagctcaaactgtgatattgaataaacggctttggcactgtggttgcaaagcagaattagtggggccctttgtagcctgatagaaattagatttctggtcagttgcacttgtttgcaggggataaaggagtgaaatgaggataaaagggaaggaagagagattagggagactgagcagtaagcaaccgtttattctaaaaataattttgtttaaatatgtaagtttgttatagggcatggtgagttggcggcattttgtgctagcttgacttattgcttataaaattaacctcaggaattagggatttaacataaataaaatacattaaatcctaagaaaatctttcctgattccaattttgtatattctaatatgtatatatttattactttgtatgaattgtattttagtccaaatataatgcttatattatttattttaaataattaatgtttttaatcaaattaattatcacaattggctatgaggaatttcaaacctataaagtgaaatagaacttatttaaactgactagtaattctgtaacttttattttacaggtcatgtaatgtttgcagaaataaaaatggagaatggaaagtcaaaaggctgtggaacagtcagatttgactccccagaatcagctgaaaaagcctgcagaataatgaatggcataaaaatcagtggcagagaaattgatgttcgcttggatcgtaatgcataatttcaagccatggttggaacattcctacatctgttttgctgaatctcctagtaaaagtcatttttttaaagtaatattgtatgcttacaaaagctgtaaaaatgaacttttaaaactcccaccagcttttaacagtataatgttaaaaatatactgtaatttttgttaatctcaagtttgggtttttaaagacagcaagtctggtcattcagtttaaatgaatggttatactgtttttaatgaaataagccattttcttgttgttttcagtactacatagttggatttgtttgttctagtttctccagtttttgtcaacttattgtatggtaaaacatagattttttccccccaaacttctgttttataatatgtaatttttcatgaaaagaaagggctcagaaaaattaggatgtgattttggttggttttaaattactgtaagttttagattctaaggttcaagatttttaaaatttgatttaaatgaagaaatggatttttctctctgcccctccctgccattcatattttctgcataacactattaataatatcaacctccacagccccttattttattatttccaataattccaagttcatatagaactgataatgtagcaagccccaagtatgataataggcagactattcccaactttctgtctagtttccagccattgaagtgaactgctaaaaaaagaaaaataattgaaatgttgagagagatggttatgtaagttagtcctctgctgtttacttctgcaggagctgatccatttataaatgcagttttaataaaccatggaataccaaggcacaacatatcaaacacattggatcccacgatgttagacatagccatatctcctttccctacaaaagaaaagcatactgttaaaatgtgcttaccaatactgtgttttattaataatcttcataagaaaagaaacactggatacttttttgttgttgattcgttttgaaaaattgttgttagagcaaaagtcttactgaatttgtatttttaaatttttcttgggttagtatttaaagtcttaacatttatttaataattatatttattaaaccatttttcaataaggtatatagcttatttgttgcttttcattgtaatttaacatggttaatggttaattactatttaacacacatttcaaatgaatattatttgggggattagattgagtgaaattaacctgctattaaatagtaaacttttcctctggagtcacttttttcccccttcaaagtatgttactgaggaagtaaacttttttttttttttttggtttttgttttttgagacacagtctcgctctgttgcccaggctgctggagtgccgtggcgcaatctcggctcactgcaacctccgcctcctggattcaaacaattctcctgcctcagcctcctgagtagctgggattacaggcacatgccaccacgcccggctaatttttgtatttttagtagagactgggtttcaccatgttggtcaggctggtctcaaactcctgacctcgtgatccacccgcctcggcctcccaaaatcctgggattacaggcgcgagccaccacacccggctggaagtaaacatttttaaagctacttttactcattctagccttgtagaatgaccattgcagcttgagggacctagttcttaccttttcttgcaaccaacacacttgcaattgtgtctggtatgcttgttcctgctgctaataaagtaaggcccattactgtatcgggaatttctagtgtttcccctgtaataaacagatatttcaagttacaaatcttaaagattcactaaccatcctttgcagttattttggatatttccttcgtgaacaaaaataaaataggcacatttagaattcagagccaatatgtgcttgcttattagttttttagctagcaacatatttgaatcaggctggtaattcgggtaacccaggtagcacagatttttaatgacatatctaaagatacgtaacagctaaaattctgccagtgagaaattttcctgtttgatattcttacaaaagatgtttatgtccaccattatctcatcagggctgtgctgaatatttgataatgagactgatcattccgctttttctttcttaaaaatattagtcagagttaagcaaattaattatagctatctttaagctataaatgtgttaacatgtatatataccatttattatgttctactttagtgatataccttaatttagtgggctttggcagggcgggggagggggaacgttcattaatctctgaggaaaacaaaacctgttttctacttgagtctaacatatggtcccaatttattaatacttctgttaaatttgatgtcaggtcaacatttttcagaaatgtatttattctcagaaacagaaccagagagaagttaaacaaaaggttatgtaactgttcctttaatgttgtaattgaaaacttggtttagcgtcttttttttctttctctttttttttcttaaaatgccaactaaaataattagaaagtagcttatttattgcatgcttatacattgatattggaattggaattggttgttaatttctgttactggctttgctagaattcatatgtgcataaataacactaatatttatcatcttgggggctgttctgtgatctattacatgatttttgctctctttttatttttctagtatcaaatgtgttctggctgagtgaatttggatagatataatatgcaagctaattggactttttcatttttctcattaaaaaaaggaagaagtagtccactttttgctagcatactattctgagacttacattaatttgggaaaagtcaagggtcaacaaatttttgtgtctgtgaggggccagatagtaattatttaggctttgcaggctgtgtgatttctgttgcagttattcagctttgccaatgtagtgtgaaaacaatcatagataatatgtaaaaccttactaataaaaacaagctgggttatgttggcacacaggcagtagtttgttcacctctgctgtaagttaatttgggttaacctttgtaggagaaattacagattatttttgtctttgttcatagtttttttgtttagggactgtagtggattatggccaagcagcagtagctagttaagtcttaatcatgaaggtagtagaaacctagaataaaattattatgcccttttcactcatttcataatatgtttgtattgccgtgttgaaaagccaaataaaatacaatccagttaagcagtgagcacccattgttttcccaaaaatagagctccttgctttgtttttgtttttttgttcttttttttttttattatggaatggaattcaatataaagagtttattgtggaccccatggaatgtgattaaattattagcataataaaaagacatcctatgaatttg

SEQ ID NO: 365 - DNA, 3019 bp, Homo sapiens
agtcccagctcagagccgcaacctgcacagccatgcccgggcaagaactcaggacggtgaatggctctcagatgctcctggtgttgctggtgctctcgtggctgccgcatgggggcgccctgtctctggccgaggcgagccgcgcaagtttcccgggaccctcagagttgcactccgaagactccagattccgagagttgcggaaacgctacgaggacctgctaaccaggctgcgggccaaccagagctgggaagattcgaacaccgacctcgtcccggcccctgcagtccggatactcacgccagaaggtaagtgaaatcttagagatcccctcccaccccccaagcagcccccatatctaatcagggattcctcatcttgaaaagcccagacctacctttgagcctcagttgccccatctgtgccctgggtaggaatatcctggatccccttgggtctgatggggtagccgatgcctgatttgcacccacaacgtgggaggttataacctgtccccaagttgcaaatggggaaactgaggtacagggatgccagggaccctcctgaatgtgcacagcacctgggaaacccggggacggggtcgggcgtgcggtgtgggcatggtccctgacctgggctggggccaggatccaagagaaacaatgggggtgtggtgcatggatagaagtttgtgatgggcagagccagctggagctggttctgaatctgatgaaatcgcttgtcaaggcactgctaaagtcacatgcaacgagcgacttgttaggggaggaggagagtattttccccatctctgtgccctccatggaggctccaggggtgcagggcactggatgaggtctgggctgtggtgggacccaggagggggcaggcagaggggcacactcttagcccgccctaaacccatctgtgccgtgtgactccggcaaacctctcacccttgctaagcctagcaactaggttaaggcaccctcaaaccccagtctccccagtctccctaacacttgtaccagcctgaggggctgtgattcctagaggctcagtagtctggaatgtgatgggtttggcactcttcatttctcgggattacacctgtaatcccagcactttaggaggccaaggtgggagcatcgctttaggccagaacattgcagcctgggcagtatagcgagaatccatctctaccaaaaatgtttaaaaaaaattagccagacatgatggtgtgtgcctgtagtctcagttattcaggaggctgaggcgggaggagcacttgaatccaggagattgaggctgcactgagccatgagtgccccactgcactccagcctgggtaacagcaagaccataataaataaataaataagtgaagcaagtaagtttttgactgccagaagaaaagcagagccatggttggaatctcaggctgcctgaatatcagatatacattaattccttcaagtatttactaagcacctattgtgtgccaggcacagtgtcaaccaagctaagattctaagtagggaatatgaatgatacacaaggaaataaaatagggtgcttcctattttaggcaggctggaaggaagaggaggagccagccatactgagattcaggagattcaaggggagaaatgcccttttttttttttttttttttttttttgagagggagtcttcctctgttgcccaggctggagtgcagtggcacgatcttggctcactgcaacctccaccgccccgattcaagccattcttctgcctcagcctcccgagtagctgggatcacaggcgccagccaccatgcccagctaatttttggtatttttagtagaagcgggcgtttcaccatattggccacatatcggccaggctggtcttgaactcctgacctcaagtgatccacctgcatcggcctcccaaagtgctgggattacaggcgtgagccaccgcgcccgcacggagaaatgctcttggtaggggaaataacttgtgcaaaggcgccgccgccgtggtgagatccagcttggcgtgttaggggaaatgggcaccctcgttcctggaaaacggtaggcctgtgggtgaccagcttccctatctgtcttcccacagtgcggctgggatccggcggccacctgcacctgcgtatctctcgggccgcccttcccgaggggctccccgaggcctcccgccttcaccgggctctgttccggctgtccccgacggcgtcaaggtcgtgggacgtgacacgaccgctgcggcgtcagctcagccttgcaagaccccaggcgcccgcgctgcacctgcgactgtcgccgccgccgtcgcagtcggaccaactgctggcagaatcttcgtccgcacggccccagctggagttgcacttgcggccgcaagccgccagggggcgccgcagagcgcgtgcgcgcaacggggaccactgtccgctcgggcccgggcgttgctgccgtctgcacacggtccgcgcgtcgctggaagacctgggctgggccgattgggtgctgtcgccacgggaggtgcaagtgaccatgtgcatcggcgcgtgcccgagccagttccgggcggcaaacatgcacgcgcagatcaagacgagcctgcaccgcctgaagcccgacacggtgccagcgccctgctgcgtgcccgccagctacaatcccatggtgctcattcaaaagaccgacaccggggtgtcgctccagacctatgatgacttgttagccaaagactgccactgcatatgagcagtcctggtccttccactgtgcacctgcgcggaggacgcgacctcagttgtcctgccctgtggaatgggctcaaggttcctgagacacccgattcctgcccaaacagctgtatttatataagtctgttatttattattaatttattggggtgaccttcttggggactcgggggctggtctgatggaactgtgtatttatttaaaactctggtgataaaaataaagctgtctgaactgtt

SEQ ID NO: 366 - DNA, 8597 bp, Homo sapiens
aatgtgtgcgcgctgtggtatgggtgtgcaagtgtgcgaaggcggcgtgttgtgtgagcgagagggtagcggatgtgtgtgtgcgtgtgcgcgcgtggctccgggtgtgcgccgctgcgatagcgggtcctttcccggggcgggcgacgggcgggctgggaaggtctcctcccctcaccacattgagaaatctcagtgagtcaccgagtggttctgcatattaatgagctcgctcgctgcgagggcaggagcggatttaaaagaggccagggcgggcggagggaggctgtggagagagcgcggagacaagcgcagagcgcagcgcacggccacagacagccctgggcatccaccgacggcgcagccggagccagcagagccggaaggcgcgccccgggcagagaaagccgagcagagctgggtggcgtctccgggccgccgctccgacgggccagcgccctccccatgtccctgctcccacgccgcgcccctccggtcagcatgaggctcctggcggccgcgctgctcctgctgctgctggcgctgtacaccgcgcgtgtggacggtgagtgcggggagctccccttgtcgccgtctcgtcttgtcctgtcctggggaacccaagcgccaatttctaggcatcctgggatcccgcggggggtggtctgggtgggcaccaaggtggtcgaggggcaggagaccgcctagcaactaagccgttgccccgcgctcgctcgcagggtccaaatgcaagtgctcccggaagggacccaagatccgctacagcgacgtgaagaagctggaaatgaagccaaagtacccgcactgcgaggagaagatggttatgtgagttctcgctcctcaccttgagggggtgcgcactgctgtcaacccaatgccagggcacagcctgggcctgggtcgggctaacaaacatttctctccgactttgtcaaggccctggaaaagcctttgtaattgcccagagagtccttaggacgctggcgagacactctggaagacagtcgggaaggggggtcactgtcccgctccggaacagcgcctccaagttcacccttgctaggattcaaatgagcagtctccctatttgtaccatgggccacccactctgctagggccatcaagggttaaagggttcccttgtgccaactcagaaaacctagactgaaatcacttaaaacacactcacacccaaactgtgaggcgtgctgccttcctgtcactggatagaggactaatgcaaacactatcttaaatcctgagtctccttcagagccttgttccagtcagagacaagtggaccgcaagtttttggctcctagagattttattttgagaacgctccacgagcttccctcaccgactgtactccttgtgggtccccaatacggagcagtactgcagaaagtgctctgctggggttaatgtgccacatggctggagccctgcttggtggggatgtggggaatgttggaaaaactggggcagagtgagagaacacttagtttcttgctcctccgccttcccaattaaccacttgaggccagcaccgctgcctcctcatcaatatgctcttggccaggaagggagcccttggcaaagcggctaccaaatatttgccacagaccattggcccctcttcccctcccccagaaacaggacgcactttattctcagtctgggcaagtgccctccaccagctggcccccaccggcgcaaaggccttcacagtgtctgcgaaagcagtgcacacccctacccagcaccccccatccccgtctaggggctacactgtcaggctgaaattaggggaattcagaaatccactggaactgagctgaccccactgccttccttcacagacacctaaattaacttgcttgtccctaccccttgccttgcagaccaaattcaaagaaaatacccaaaaatccttttgggtgggggccaagtgtcaaatgagctgggaaaggagctccaagctcctcagggcttccagtttgggggctaagaatgacaggggaattccaagttaaatctcactcgtctaagagctgaaaaccactctattaaccaaacaagtttctgagaccttgcaggggaagaaagcagggtaaaggatgcagtgatacctaaaaaggacagagccctcagtaaataggcttgctcttttcctggctaaacttttccacatatagagaaaaactatagctaggcaagtgtgagaaaggctttacggagccttgtagaaacgtgcaggggcctcaggagatcagcacacaatccaatcaccctctactaaacctctaacccaccccctagggcctcccactccatccctgagggctgggggctcctctccccctccacaatcctaaaactctccaaatcagatgaggggccagcacttttgcaaagcaggttttcagccacaaaggctgaacaaaagcaaattttccagcttaccctgagtcacccagaaatctctgctgaggctgggggtgggggcaggagtaggggcggggggagaggtccgctttgcaagtgggagtccttgcacccagaaggatccaggagagtccgaattctagaaagagcaatttgtgtcataggtccatggagctctcaccaaaacccttacccccaccgccagaactgtggaggagagggtcacaggactcagaatttctgatagttgctggagtcacaaatccctatgtctgcactccacaaccgattttcataatcccagtattatgacgtggcatttgagcactgtagtgagagggctgagtgacccttcctgctctcccttcctgctctccctgaccttcaggatttgggatgcacagcctgcacactgacctaactgagaaagggtttttatcaggcattaccacgtcctttccttcagaatgctaaagcagccttgtaggcagaaagagaaaagcatttgctaaattcctgcagggtgactgggcacagtgggggagagagacaaccagagttcactctgaagcctggcctgtgctcaaggctagaggaatgacccggagtcacagaggagtccagtcaaggcaggcaccatcacctggcatcagcaggaagacccgcccctgccccaaggagcttaggccctagcagggaccccagaaacccagagcacggagaagggaagagaacaggttgcctaggaacattatgcccccattctggtggcaagatccgattttctttccccatcaactgggagactgaagtaatgggaatcctgtcccttctagaacttagcccatataagccatgacattttccatttggttaacagtggggaactagctgacctctgtccctctcttctcactctttccactctcacttccagtctccccctttgccctccaagcccattccagcaccccagtctaccatcatggcttgcatggctgtgacccctcaagaagtggcatcctcacctctcaccttgcacttttccaaataccctaggtggtctcttattccccacaactcctgtcatgcctgtggcctagaggtgctcagaagttctgagcagcaggcttgcctcgccctccaggctggagcccccacagcaaggctactctttccccttggccacttcatcttccatgaccaatgactagtaacagtaactgttaattgtgcatctaccaggtcctgggtactttctaaagattgtatcttttaatcatcccaataaccctgtgagatagtcctattattatacccattttacagatggccaaactggattcagagaggttacccaaggtcccacagccaaatttgagattcagtcccaggcccttacagtctgcacaacacctgcttctctaccacatggctaggcttctgctgggtgttgggacattggctgatagaggcctgagatcttcaggctgtgcagaagagaggtcttactcttctgcttaggggtgagatacctgggacctcccacaaggccaacaagactttgcctcaggatcaggagatgcccagccctgggacaatctgtggtgggtcagagggaactggggttgaggagacagaaatcagagtgtctgcggggcatgtctgagccttgccatgagctcctcaaatccaaggacagaggttttggcatgtgcaccttgctggcattagctttctccacctcctgatcccaggctcagagaggctgggagtcctctgacctttgttccccaaaagaggcctgagccctggagacaacacactgcatgaggttgggggtgggagagaccatcccagactctcaggactcccaggggaaaagtgagggctgctcactacatacagggttaggccctaacatggagtcagagaataaggggacaaccagaaccttccaaagagccagcttggaagtgagcacacaagtcggctcccttgagaggaggcaggaagccacagtctctcagggccctgacttagcccagggctactcacaggccacacaagaggcaacatgttattcaggctcctcaaccctccacctcatcctgctccgtttcagcatcaccaccaagagcgtgtccaggtaccgaggtcaggagcactgcctgcaccccaagctgcagagcaccaagcgcttcatcaagtggtacaacgcctggaacgagaagcgcaggtacgccccgcctctactcaccttccttcccaccagacccagctgtggctctcaggatgggaagggacccccccaccaggtcatctagccccatctaatatgtgaacacccaccacaacatccacagcaaacagatactcagacaatgcttacatacccccagggacaaggaactcaccacttaccaaagctagctatccatctcttgtccatttgcaagcatggcaggtttgtcattttgtaaactaaagtctgtctcactctaatatttgcattataatcttaattcctctttttatttcagttacgtaagttgttaaatggcagagtgagcactggcatggctgccaggggagctctgaggacttcagtggggtgaaatgtgaccacttaggtgactgtgtatgttggctataaaactgcgctataaaaccatgaggtgctgaggatgatccttgccagaaacatgttttcttctccaaggtgccccactccctctgctgcccagaaacctgataaactccttccttcgcaggtgctggaaggcaccacaggtttggctctttaaaatcagagccactgttaaccaaggcgggcagcagtgttaagaccaccagcaccctgaaccagccctgtacttactgggcactgtttccttaaaatcagaaggtggcttcccatctctggtttcctggggtcttatgtctgtcctcggagggagaatccagttcctagctcccctgtaccatgcgaaggtagcctgtcctgtctcactcctcagatacgcagagtctgtttacacatttgcctgcatagcatgatcaggaagcacacacacacacacacacacacacacacacacgcatgcatgcacacaccatgcaggtgacttccccaggaactagtgccagcacccctgctgcagagggggatatcaaggctaaatggaagagaggggtgacttgcctgggagcacagggcaaagccaggacagcaaaccaggcctcctggtgctaccccaccagctgccctcacagggtggaaggtacagccatagtgggtgcctgcattgccctcccctcacctggcccagccatgctaccccaagctcagccctgtgaccagctctcccagagctgacactcgggctcaacccctatacctgagccttttttgctgcctccaaaacagcctcatctgcagttgcttgaaatagaaagtgatgagagcaataaattattttctataaatctgctgggaatgaagccctctttctggtcaagccaggcagctcatgtggcaaaggccagaactgcgcagtccacactctgtcaccctccaggccctgtgtcatcaaaactggcagaaggctaatcccatgggcaggttatggaagaggctgagggcatcttgatctgattgctgggggatactcaaacctttagctcaccttgcttctcccctccacctgagctgcagcctggaaaaggaggcacccacaggtctaaacatggccctgcttttttttttcctgaaaattccaataacaaaagcaacgagagcctctcactaccaggccttctctcactttgctataaaattagttcacccctctttcttagagtgttgaggtccctgccctccccacctccctcccctgaaacaagttgaaaatatcttaatgaacatagaacagtgataaaggaagtgtttgaagtcctctttgtacagagagagagagaaagagaatgccaaagctaggttggaggaagtagaagggtatacggtgggctcaggcccatgggggccacacagaggagctctgtgcacttcagagaccagagcttccagggagcttctggccaccacaggaagcagcctagtcaggcattttatttcaatggataattcagtggtcttactcagaaatcaagaacgagacagaaaagtgataggctaagtgtaacgtatggccccagggcagccatggggcagaactagaagaaagcaaaatatctaactgggcacagcttgagaggtgaggggaaggtggggctgggaacgagtagagatgaggcaatgcagccaggagcagggactgaggggcacaggcctcctgcaccactgccccaccccaccaaccacctcttctgtctccaggaagcagcttctagagctagcattcttctggaggacatgcattatttgggcaaaatacaaagaaatatacaagcctaagtcaagtaagggaatgcctcccacccttgctattttctctaaatagagaggctgagtacagacgcggaaagaaacaaggaggtgtgggagcagcccgccatgctagagaaagactacattcctgccactaacagtcggtggccactgggcaaatcttaagtctgtggtgcctcagtttcctcatatgcaaagcgggtttgttccataggcctctgaggacaaaatgagattgcagaagtgagattgcagatggttagaaaagacaaagccacactggtgtgagttttcatggtccccgggaccacatcctcagaaggatccctcccacttctcctgggggttcctgcagttctgggacaggggcattccctgcagaccagacgtgaatgaagccgcttagccagcatcttgtgaacggcctgcctcatgtcctgagccacttacacatgtgttttttctccccagggtctacgaagaatagggtgaaaaacctcagaagggaaaactccaaaccagttgggagacttgtgcaaaggactttgcagattaaaaaaaaaaaaaaaaaaaaaaaaaaaaaaaaaaaaaaaaaaagcctttctttctcacaggcataagacacaaattatatattgttatgaagcactttttaccaacggtcagtttttacattttatagctgcgtgcgaaaggcttccagatgggagacccatctctcttgtgctccagacttcatcacaggctgctttttatcaaaaaggggaaaactcatgcctttcctttttaaaaaatgcttttttgtatttgtccatacgtcactatacatctgagctttataagcgcccgggaggaacaatgagcttggtggacacatttcattgcagtgttgctccattcctagcttgggaagcttccgcttagaggtcctggcgcctcggcacagctgccacgggctctcctgggcttatggccggtcacagcctcagtgtgactccacagtggcccctgtagccgggcaagcaggagcaggtctctctgcatctgttctctgaggaactcaagtttggttgccagaaaaatgtgcttcattcccccctggttaatttttacacaccctaggaaacatttccaagatcctgtgatggcgagacaaatgatccttaaagaaggtgtggggtctttcccaacctgaggatttctgaaaggttcacaggttcaatatttaatgcttcagaagcatgtgaggttcccaacactgtcagcaaaaaccttaggagaaaacttaaaaatatatgaatacatgcgcaatacacagctacagacacacattctgttgacaagggaaaaccttcaaagcatgtttctttccctcaccacaacagaacatgcagtactaaagcaatatatttgtgattccccatgtaattcttcaatgttaaacagtgcagtcctctttcgaaagctaagatgaccatgcgccctttcctctgtacatatacccttaagaacgccccctccacacactgccccccagtatatgccgcattgtactgctgtgttatatgctatgtacatgtcagaaaccattagcattgcatgcaggtttcatattctttctaagatggaaagtaataaaatatatttgaaatgtacc

SEQ ID NO: 367 - DNA, 21215 bp, Homo sapiens
gatgctgagaagtactcctgccctaggaagagactcagggcagagggaggaaggacagcagaccagacagtcacagcagccttgacaaaacgttcctggaactcaagctcttctccacagaggaggacagagcagacagcagagaccatggagtctccctcggcccctccccacagatggtgcatcccctggcagaggctcctgctcacaggtgaagggaggacaacctgggagagggtgggaggagggagctggggtctcctgggtaggacagggctgtgagacggacagagggctcctgttggagcctgaatagggaagaggacatcagagagggacaggagtcacaccagaaaaatcaaattgaactggaattggaaaggggcaggaaaacctcaagagttctattttcctagttaattgtcactggccactacgtttttaaaaatcataataactgcatcagatgacactttaaataaaaacataaccagggcatgaaacactgtcctcatccgcctaccgcggacattggaaaataagccccaggctgtggagggccctgggaaccctcatgaactcatccacaggaatctgcagcctgtcccaggcactggggtgcaaccaagatcacacaaatccctgccctcatgaagctcatgctctcatggggaggaagacagacatacaaagagatctagaatgtgaggtcaggtgttgacaagagccctggagggaatagagcagggaaaggtcagaaaaggaagacccagggtctctagaggaggtgtcagggaagggatctcccaagaatgccctgatgtgagcaggacctgaaggcaatggggagggagccgtgaagacccctggaaaagcagattccacacagggaaatgccaaggtcggaggtgctaaggaaataggagacacactgctgaccttgacctagtaggacacacacacacacacacacacacacacactcactcactccagggctgggggatgaagagacctgctcaggacccaggaccccatttttccaccctaatgcataggtcccaatattgaccgatgctctctgctctctcctagcctcacttctaaccttctggaacccgcccaccactgccaagctcactattgaatccacgccgttcaatgtcgcagaggggaaggaggtgcttctacttgtccacaatctgccccagcatctttttggctacagctggtacaaaggtgaaagagtggatggcaaccgtcaaattataggatatgtaataggaactcaacaagctaccccagggcccgcatacagtggtcgagagataatataccccaatgcatccctgctgatccagaacatcatccagaatgacacaggattctacaccctacacgtcataaagtcagatcttgtgaatgaagaagcaactggccagttccgggtataccgtgagtgattcccccatgacctctgggtgttgggggtcagttctacttcccacacacaggattatcaggcctgggctgtgcctgtggccccctctgcattacgcaccatgttagggtttgggcatttagtgcaggatacacacagaagagacaaacttcaacagatcagaattcctttccggcatccagaccctgcagacactcactgcagaggaaggacagtctgatgtgggggacttagcagggggaggtcagtctcagccaagcaccccgtgccctccccgtaaacctgaccctgagaaagaccctggagaactgcatcagagcctggcctgagggacccctgggatattcacagagaagctcagccccagggctcctggttccaggtgactcaggggagcctgtgccagggctgtgttgtggcctcctgggcaaggctaactggaagcaaggacttagcagctgtccaagggctgtggctcctggagctggattctggatgcagaatcggactttctggccacacttgttccctgtccccagagtctcatttggacaaggacagagccttgtcctttacttgagactcaatgtggggaggatagatagacaaggttattagggtgtcagtccattgccctggggacataggtgactccatgggaagctcagtgtccccaggaagaggaacagaggagagaagatgctcccggcagctccttgtccaccagggatcaggcccagggccttctctcttggaggcaaataaacataaatgatgttcatttgagcagctcctctgtgcagagctgagatcaagtaattgtaaatattttgaggttaattcacaaacaacctcacagccaaatagcacttatcctacttattgaaaggaaattgaggcacagggagacagtcactaacaagggtcacacaggccataggtgtcagattgaagtcacatgaggtctgtctgtagccacagccccctcctctcctcaactgggggtgggtggggctgtttgttgttaggcatctgcatctgagaccagtcatgggcttgcgttcttttgtcttgggcatccacagctcagaagcggagattctggtctggagagtgataagtaaatggagaaataatcagttttactctagaactagatcacctcaacagtcagggtcagtgccgggattgtccaggcctctccctgagatccacagccccctcacatgacctcaaatcctgtgtttcccgatgtgtcagtgtcactcccacggaaggataaaggaaaggacttcgctttctctccccactcacaccctgtgccaacagaggcccaaagtgagacacacgcttgctcagtagctctctcatgaaggggggaatgagtgaaggaatgatccataacctctatagagactggatcctggatgcagaatcctgggaggttctgaccacacctgttccgtgtccatcaggggctgagatccatgtaccattcctctgaccccctgtcccgaaagccaccctatctcatgtgactctggggttccttggccatgggagggttttcaaggctccctggtcctggtcgggacagccaagggactcctagtcctggggtctccgaggtcactataccccgcatggctcattgccatgggcatttctgactttcttctattcctccatgttcttcgtcttcctccctcttcattccagctgagatgcccatccctgaacatcttcctccactcttaggccttccccagacactcccttgaacaaggctggctgtcctgttttcttgccgctcacactgtgtcctggcccacttcccaggcaatagggaaggcacagaaatcacaggcaatagggaaggcacagatggagcccctgccaggctccatcacaagccaatgtcaacaggtcaccaggagaatgagcttccgctgtgttcctgcccagggctctttacttccatgaggccaacacacggaacaggcagcaggacgggaatgagcgactcctccatccactccctacactgactcaccagggggtcagaggcagaaggacaggtctgcagtccccaaagcccgcatgcttatttcactcacttcactacccactccatcttcatcctggtgtggggctcacatcctccagtggatcctgggacctcccccaggtggagctggccaggcaggtgctgtctgataggtttgctgcccattccacatacacctgtgtcctcatgatgatgccattgtcataaggtggagtcccttggactgagaagtgaaccagccactggcgtctcacttagactctacccagttacaaaaacttaaactctagttgtgttttctgaggttgataggagaggaagaaaacctttcacatgcctgttttgaggcttctcctctttttgcctaactctgcacaggaactaggggcagggagcgctttctaaatttactaacatcacacacattgcttctcctaacttggcatcatttctccctttatgtaattgacacacctaagagttcctctctgaccggttctgtcctcttaacaggtctcacatccctctctctgttcagggagtcactgatttcaaaccactttcagcatcttcctttgagcataatgtgatcactttggaattcagagcagacctaaaccttagcataatattaaaagaagtactacttccagcaattgatcttagatctttaggccattgataagaatttccacttatggaaaaaatttaatgtttcccccaaatgtctttcacttttttaactatagtcagaaaataacatgagatctaaactcctgacaaatttttaagggcaaattatagtactacagattgagtatcccaaatcctaaaatccaaaatctgaaatgctccaaaatccaacattttttgaccactgacatgattctcaaaagaaatgctcactgaaggccgggcacggtggctcatgcctgtaatcccagcacttcgggaggccaaggcgggaagatcacaaagtcaagagatcaagaccatcctggccaacatggtgaaaccccgtctctactaaaaatacaaaaattagctgggcgtggtggcatgcacctacagtctcagctactttggaggctgaggcaggagaatcgcttgaacccgggaggtggaggttgcagtgagctgagatcgtgccactgcactccagcctggcaacagagcgagactccatctcaaaaaaaagaaaaagaaagaaaagaaaagaaaaaagaaaggctcactggagcactttggattccgtattttcagatttggggtgctaaactggtaagtatattgcaaatattcaaaactcaaaaacagtcagaaatccaaaacacttttagtcctaagccttacacataagacatactcaatctgtatgaactataggcaccaagctgaacagcagatccctagaacctcctcatcctgcataactgaaactgcagacccatgaacaactctccattcccccagttcccaggctttgacaaccaccattctactctctgattccacaagtgtgactactctagggacctcatataagtggaatcctacagtatctgccctgtgagtggcttatttcatttagcataatgtccaatgggagaaaataattgcaaaacttcttctcaaagttctgtctcataactgtcaaacacacatggtccttgagggccagatttccagcagttcatgctcccccttttccaccagtcagttctgcatttgcaaatgtccacatgtatttatggagagatccacagcatcctcgcctgccctctgcaaggggagaagggacattaaagaccaaagacaggccgggtgcagtggctcatgcttgtaatcccagcactttgggaggccaaggtgggcagaacacctgaggtcagaagttcaagaccagcctgaccaatatggtgaaaccccatctctactaaaaatacaaaatttagctgggtgtggtggtgggcgcctgtagtcccagctactcgggaggctgagacaggagaatcgcttgaacccgggaggcagaggttgccatgagccgagatcgtgcctggccaacacagcaagactccatctcaaaaaacaaacaaacaaacaaagaccaaagacaaagaacatacatatggttctgctgttaaatccgggcagctcctgcctgtcacctgaagttctagatcattccctggactccactctatctttaggggtctctggctcaagtcagtcatcatcaaacacctgggaaaaactgccccaccttgtgcctccactgcctaacgactgagctgacctccaggcttgcctctggtgtcccctgtgttatttctactgaaacatccagtcccaggccaggctgcacaatatgtacagggtttaaggacaatgggaagacccatcactatccatttctaggatgtccttgcaaagggaaaccacagaaaaaatatacctagggaaacaaagtaggactgaaggtggaagggacccagcacttgaatgttccaggtgaggaccctacagtgggccaagtagtcaactggtcagggagggaccaggagaggcaccaggagctgtgacctcccccccagtcctgtgtctgttcacagcccaatgctgctgcttaattcacacttgagaaagtctgtgcttcccccacaccgagcaggcagcctcgcagtctctgagatctcagatcatcgtgcatctgtcttgtgacacatgcacccaccgtgggtttttaagggctcaggtgggctgagaggtggaaggtgccaactctgattgaaagatgcctgtgaggaatcaaaggtgccacacagggcaatcttctctctgttatctgcacagcggagctgcccaagccctccatctccagcaacaactccaaacccgtggaggacaaggatgctgtggccttcacctgtgaacctgagactcaggacgcaacctacctgtggtgggtaaacaatcagagcctcccggtcagtcccaggctgcagctgtccaatggcaacaggaccctcactctattcaatgtcacaagaaatgacacagcaagctacaaatgtgaaacccagaacccagtgagtgccaggcgcagtgattcagtcatcctgaatgtcctctgtgagtatatctgctcctctctggcccaggctgccagcccaaatccacagggccagaggcaggatttctcagtccctctcaggttcaagtacacagaccctcaaccctggacatccagactgtctgtgactttctgccccagaaaaacctgggcagaccaagtcttgaccaagaataggaggggaggggctgcttctgtcctgggaggctcagggtccacaccctatgatgggagaaacaggtgaatatctcagactcaggctcagtagatacaagaggggtttggctgagactttaggattgtgattcagcttagagggacactgtggtccttccatagaccaggaacttccacttccctctgacaatatcacctgtggctttattttgtttgctccagatggcccggatgcccccaccatttcccctctaaacacatcttacagatcaggggaaaatctgaacctctcctgccacgcagcctctaacccacctgcacagtactcttggtttgtcaatgggactttccagcaatccacccaagagctctttatccccaacatcactgtgaataatagtggatcctatacgtgccaagcccataactcagacactggcctcaataggaccacagtcacgacgatcacagtctatggtaagtggatccacgaagcactgacatcatgttttgaggtggagtctgtctggttttcaaacaagagccaggaagacattttctatcccagcctgtgtccagtgggcacaagcaaatcccagattctcccactgaacctccccaatatgtctctacagactcttttcttcttgttctgatttctcatggcgggccccaggtccagcttggaatgtggggaggaggctccctcagccccacagccctgtgtagtggaggaagcttcacagagcgggaaggagcaagggttctcaaggtcaagttgcttctctctgtcaccaatgtgtccctttctgtcacctctttgtgttcttttgcctactccatgagctacaagcaacattcaaggctttgaaacaagctcatacttttttcccaaatgagagaaggaagccccttgggtgagggagacacagctcagactgctccctgctctgctctgggctcccctgggtgactggccttgcctgactccacctaggtgggaacgaggtgtgtggagaaggagcccgggtggtctgtcctgaattcggctaaatcaagctgccaatcaacaccaaagcttcccttcgtcccagtcaggctgcaggaaaatggaaagagagggagcctcagggcagactcctgagctgcgtcctggctctgatgtcaccagctatatgaggctgtgggcacagcacatgggacacagcacaggggacagcaagtgacccacacttggagaaatcaggagattcaccacaggggctctgcacggcagggaatggcagtgtcaaaaatcgtgtgtttatacagatggtaacagtacatatctaacacaaacttaccatcttaacttttctacacatgcagttcagtggtattaaatatattccccttgttctgcttccatcaccaccatctacccacaggactcttttcttcctcccaaaatgaaactctgttcccatcaaactcctgggcagagctgccccatctatggcccacagtctgatccctgacttgtcacctctagacatgctcctagtctcctgcactatttctgctcaaacatccatctccatcatcacctatctctaggatgtccttaaatagcaaagcctcagagcaaacacaacttggctgggtggtgtgggactgtgcagctggaagaaacgcagctccttcaaattccaggtgaggaccccaatgggccaggcagccagccagtcaggaaaggaccagaagtgctgggggctgtgacccccagccctgtgtctgtccacaacccaatgctactgcccaattcacacttgagaaagtctgtgcttctcccacacaaaacagccagcctcatggtctctgagccctcagatcattgtgcatctgtcttgtgacgcacacacacctgccatgagcttttaaggactcagttgggctgagaggtgggagatgccaactctgattgatagatgcccgtggaggaatcacaggtgccacacagggcaatcttctctctgttatctgcacagcagagccacccaaacccttcatcaccagcaacaactccaaccccgtggaggatgaggatgctgtagccttaacctgtgaacctgagattcagaacacaacctacctgtggtgggtaaataatcagagcctcccggtcagtcccaggctgcagctgtccaatgacaacaggaccctcactctactcagtgtcacaaggaatgatgtaggaccctatgagtgtggaatccagaacaaattaagtgttgaccacagcgacccagtcatcctgaatgtcctctgtgagtatcttctgttcctctgtggctcaggctgccagcccaaatccacatagccaaagtccaggcctctcagtccctctcaggcccaaggacagagacttttacccctggacatccaggctggccctacccccagcaaatccatgcaggcccagtcctgaccaagaataggaggggagggtctgctcctgtcctgtaacactcgggatccacagctagtgatgggagaaacagatgaatgtctcagactctggctaattggatacagtaggggtttggttaggacttcaggattgtgacttggctcagggggacactgttgccctttcacagaccaggagcttcccctttgctctgatgacattcacctgtggccctattctctttgctccagatggcccagacgaccccaccatttccccctcatacacctattaccgtccaggggtgaacctcagcctctcctgccatgcagcctctaacccacctgcacagtattcttggctgattgatgggaacatccagcaacacacacaagagctctttatctccaacatcactgagaagaacagcggactctatacctgccaggccaataactcagccagtggccacagcaggactacagtcaagacaatcacagtctctggtaagtggatccctggaccgttagcaatatgttctggagcggaatctgtctggttttcagaaaagagccaggaagaaattttctttcctagtatgcatccaatgggcacaagcaatcccaaattcaatcctgagcactcccaatttgtctctacaaacactcttccccttgtttttctgatttctcatggctgaccttgtgtccaccctgagaaatgtggggaggggtcttcatcagccctgagccctatgtagtggaaggggcttcacagagggggaagcaagaagggtcctcaaggtcaagttgctcctctctgtcaccaatatgtccctttctgacaccactttgtgttcttttacctaatccatgagctacaaggaacaactgaggctttgaaacaagctcacactttttccccaaatgagaggaggatgccccttggatgagggaggagcagctcagactctgctcccggctccgctccgggctcccccagtgactggccctgccctgatttcacctggggtgggatccgggcatgtggagaaggtgctcaggtggcctgtcctgaatctggctaagtcaagatgccagatgaagccaagccttcccagggtcaggctacagggaaataagaagagagggagcctcggggcagactcctgagctgtgtcctggagtctgaagtcaccggctgtatgagattgtgggcacagcacatgggacacagcacagaagacagtcagtggcacacacttggagacacacagagattcacccatggggactcaacatggcagggaaggggcagtgccaaaaagtgtgtgtttatagacagggtaagaataccagccactatatatatctaacataagacaccattttaacctttctatgtatgcagtttagtagcattaaatattttcccattattctgctaccatcatcaccatccacccacagaactcttttcttcttcctaaaatgaaactctgttcccatcaaactcttgggtagagctgcccacctgtggcccacagcctgacccctgaactcacctctagacttgctcctggtctcctgagctatttctgcttaaacacccatccccgtcatcacccatctccaggatagccttgaaacaaaaggttcagagaaaacaccccacggttgggtggtgtgggaccgtgcagctgaacggaattcagcacccacaagtccccaggttggccaggccgtcagccatcagggaagaaccaaaggaggtgctgggggctgtgactcccagtcctgggtctgtccacaacccaacgctgctgcccaattcacacttgagaaagtctgtgcttcccccacacaaagcagccggccttacagtctctgagccctcagatcatcgtacatctgtcttgtgatacacacacctgccatgggcttttaaggactcgggtgggctgaagggtgggagttgccaactctgattgaaagatgcctgtgaggaatcaaaagtgccacacagggcaatcttctctctgttatctgcacagcggagctgcccaagccctccatctccagcaacaactccaaacccgtggaggacaaggatgctgtggccttcacctgtgaacctgaggctcagaacacaacctacctgtggtgggtaaatggtcagagcctcccagtcagtcccaggctgcagctgtccaatggcaacaggaccctcactctattcaatgtcacaagaaatgacgcaagagcctatgtatgtggaatccagaactcagtgagtgcaaaccgcagtgacccagtcaccctggatgtcctctgtgagtatcttctgttcctctgtggccctggtttccaacccaaatccacacagccagaggccaggactctcagttctcctcaggtccaaagaggcagactcccacccctggacacccaggctggccataacttcctgtcccaggaaaatttgggcaacctcagcctggaccaagaataggaggggagaggctgctcctgtcctaggaggctcagagtccacagcctatgatgggagaaacagatgaacgtctcagacccagactcagtggacatgagggttatggtttggactttttttttttttttttttttttttgagacggagtctcgctctttcgcccaggctggactgcagtggtgtgatctcggctcactgcaagctccgcctcctaggttcacaccattctcctgcctcagcctcccgagtaactgggattacacacacgtgccgccatgcccagctaatgttttttgtatttttagtagagacggggtttcaccatgttggtcaggctggtctcgaactcctgatctgcccgcctcggcctcccaaagtgctgggattacaggcgtgagccaccgcacccggccgatttggactttttaacacaggattgggacaggattcagagggacactgtggcccttctacaatcaggagcttcccctttcctctgatgacatcacctgtggctttgttctctttgttccagatgggccggacacccccatcatttcccccccagactcgtcttacctttcgggagcgaacctcaacctctcctgccactcggcctctaacccatccccgcagtattcttggcgtatcaatgggataccgcagcaacacacacaagttctctttatcgccaaaatcacgccaaataataacgggacctatgcctgttttgtctctaacttggctactggccgcaataattccatagtcaagagcatcacagtctctggtaagtggctccctggagcatcagcatcatattctggggtggagtctatctggttctcaccaaagagccaagaagacattttctttcccagtctgtgttccatgggcacaaggaaatcccaaattctatcctgagccccctcactccatctcggccaactctctcctccccggcttctctgatatctcacggctgacctcgggtccagcctggaatgtggggaggggcctcccttagccccagaaggcccccaatagtgaaagggacttcatagtccagaagaaagaagggtccttaaggtcgagttgctcctctctatcaccaatatgtccctttctgtcacctctttgtgttttttcacctactctgtgagctacaaggaacaaggaggctttgaaaccagcccacactttttccccaaatgagaggaggaagccccttggatgaggcaggagcagctcagactctgctccctgctctgcgcccggctcacccggtgactggctctgccctggctccacttggggtgggaccggggcatgtggagaaggtgtccaggtggcctgttttgaatctgggtaaatcaagctgccaatccacagcagagcctcccttgggtcaggttgcagggaaatgggaaaagagggagcctcgggacagactcctgagctgtgtcctggctctgaagtcactggctgtatgaggctgtggacacagcacataggacacagcagaggaaagtgagtgacacacacttggagaaatagggagattcagccataggggctctgcatgggagggaacaggcagtgccaaaaagtgtgtgtttatagagagggtaagactatcagccactatatatatctaacataaaacttaccattaaccatttctaagtgtacaattaagtgaaacagcataaatatcaatcaagtatattgcccggtgtggtggctcatccctgtaatcccagcactttgggaggccaaggcgagtggatcacctgaggtcaggagttcaagatacagaaaaaaaaaaatagctaggcatggtggtgggtgcctgtaatcccagctactcgggaggctgaggcaggagaatcgctcgaacctgggcggtgtagtttgcagtgagccgagattgagccactgcactccagcctgggtgacagagtgagactacatcacaaaaaaaaaaaaaaaaaggaaaaaataaatcaagtctttttatactcatgtctaaccatcacatcacactatccatttccagaactttttcatcttaccatactaaacctctgtacccaataaacagtaactccttctctcccctaaactctggtaatctccattctactttctgtctctaggtaatcaactattctaacgatcttacaaaaatggaattatataatagttgtccttttgtgtctgccctatttcacttagcataatgtcttcaaggttcatccattttgcaccatgtatcacaatttcttccttgttaaggttgaagaacattccattgtatggatacacctcatttttctatccacttatctttcaatggacttttcagttgtttccaccttttggctattgtgagtaatgctgctgtgaacatcagtgtacaaatatctgttcaaatcactgccttcaattctttttggtgtatgtccagaaatggaattggtagatcaaatgttaattcttttttttgtttgtttgtttgtttgtttgtttgttttttgagatggagtctcgctctgtcgaccaggctggagtgcactggcgcgatctcggctcactgcaagctccgcctcccgtgttcacgccattctcctgcctcagcctcccgagtagctgggactacaggtgcccgccaacaagcttggctaatttttttttttttatttttagtagagactgagtttcacagtgttagccaggatggtctcgatctcctgacctcgtgatccgcctgccttggcctcccaaagtgctgggattacaggcatgagccaccgtgtccggccccaaatgttaattatttatttaattttttgaggaaccaccataccattttccacagtagctaatatttcacatttctatcagcaatgcactagagttccaatttttccacctccttgaaaacacttattgttttgtggccatcctgatgtgtgtgaggtggagtatcattgtggctttgacttgcatatctctaagtgttagtgatgttgagcatatttgcatgtgcttgttggccatttgtatatcttcctaggagaaatctctactttagtcctttgtccatttattaattgggattttggatttttgtggttgttgatttgtaagagttcttcatatattctggaaattaatcccttatcagatatatgatttgcaaatatatttcccatttcataggttgccttttcactttctcgataatgttctttaatatataaaagtttttaattttcgaggccctgcacggtggttcctgtaatcccagcactttgggaggccgaggcaggtagattacaaggtcaggagatcaagaccatcctggctaacacagtgaaaccccgtctctactaaaaatacaaaaaaaattatccaggcgtggtggtgggcgcctgtagtcccagctactcaagaggctgaggcaggagaatggcatgaacccaggaggcatagcttgcagtgagctgagatcgcaccactgcactccagccagggtgacagagcgagactctgtcaaaaaaaaaaaaaaaaagtttttaattttcatgaagtccagtttatctatttttttcttttgttgcctatttgttgttataaccaagacatgactgtgaaattaaatgtcattaagcttttttccctatgttttcttctcagagttttatacttttcactcttacatttaggtctttgatccattttaggttaatttgcatatatggtatcaggcaaagattcaacttgttcttgtgcatggatattcagctttccctatatcatttgttgaaaagactgtcctttccccattaaatggtcttggcaccgttatcaaaaatcatttggccatatatgcaagcatttctttctgggctctatattctattgctttggtttcaatatcttcctttatgccaataccacactgtattgattactgtggctttatagcaaatgctgaaatcaggaagtgtgagtcctccagcttcattctttattttccaggttgtttggctatttagagtcctgagattccatatgaatttcaggatatgtttttctatttctgcaaaaaatgtcactgggactctggtacaaattgcgttgaacctgcagctcactttgagtggtattgtcctcctagcaatattgagacttcccatccatgaaaaaaaaatgtctttccatctattgatgttgtctttaatttccttcagcagtgttttatagttttcagggtacaatcctttcacctccttggttaagcttatttctaactattttatactattttatgttaatgtgaattggaaattttttcttaatttccttttagattgttcattgttagtgtgtagaagtacaactgatgtttgcgtgttgattttgtatcctgcaacatcactgaatttatttattaactctaacaagttttttaatcttcagggttttctacagagaagtccaagttatctgaaaacacagatcattttacttctttccaatttggatgtctttttttttcttgcctaatttctctggctaggacttctaatactgtgtcgaatagacgtggcaaaagcaggcattcttgtcttgttcctggtcttacagggaaagctttcagtctttctccattgagtatcatgttagcattgggcttttcacacattgcctttattatgctgaggtggtttccttccattcataattagagtgtttttgttgtgaaagaatggtgaattttgtcaaatgcttttattggttctatctaattataggcctattaaatttttttgtgtttccaggaatttgtccatttcatctaggttattcaacagtttgttggcatacaattattcatagcattcttgtagtccttaatatttctgtagaatttgtagcattggtagcaatatctccattttctttttttttttcttttttttttttaagagacagggtctcactctgtagcccagcacaagctagagtgcagtggtgccatcatagcttactgcagcctcaacctccaaggctcaagtgatcttctgccccagcctcttgagaagctgggactacagacatgtgacaccaagcctggatagttttttaaagaaattttgtagacactgtgtctgcctatgttgcccaggctggtcttgacctcctgacctcaagtaatcctcttgcttgagtctcccaatgtgctgggattaaatgtgtgagccgctatacctccattttcatttctgattttagtaatttgaatcttctctcttttttcttagtcaatctaataaatgattgtcaattttgttgatcttttttgaagaaccaacttttggtttcattgattccttctattgtttttcaattttccattttatttatttaaactctaatccttattatttccttcatgtactatctgtggtttgaggtggttctttttctgtatcctgaagttgtaaagttaggttgttgatttgagatctctctttatatttaatgtatttaccattaaatttctcacacaagattcttaacttctctgagccttcaattcttcaactgaaaattgtaataattctcatcaccaggaaatggaggaaaaatgaaaattgcaataagaatgactgtttaacagtattgttttaaagatttaatgtaatattcgattaagctttcagcaaaatgctacacacagagggaaacttcataaatattagctgctattatcactactgttattattagcttgaagttaggcagttctagagccaaatcctagatccacttctcactaattatatgactttggataagttttttcaccactccaagtctctgtcatttcatctgtaagatggaaatcatgcctacccaacagggttattgtatggatcaaatgagatgccagaaaagcatttacagtagctaacatagcattaatcatcagcctgagttgactagtgagagccaagccccaaatgaaaacccactaggacatggttactggctaaaaatgggggagagaaaaaaaagttaagtgcaaagaatcaagcctggtatgttagttttcatccactgagattcagccaagatggaattagaggtgcaagataatttaccggggggaaccaccatgaggaaaagtggagtagaagtgggaggagcctgagagagccctcagaccacgatgcagatctgattcctgagaaggagaaagaggagagagttttagatagtgatgcagttctcagagtttccacaaggctggtggggcgtcctcaagcccctcacccatgagagagaagcagagtcccccagaactgggcttttcattcccctggtgggagcccatgagaagcgagttctctgtgcaacggacttagtaaatacagaatgcactagcctgggccttctgccaatcaagtccctgccacagagacccaacagacttatttatgcctaccacaactgagacactgagaaaaagatgcaaccatgaaaagatagaaagttctaatgacacgcaaaaatagcaatcagactttctcaaatttcaaagccttcagaaatagctgagtgcagacaggccagggtggaattgacagaagactgatcaccaactagcaacacagtgagagagaaaaaattgcaactttcccacaaaactaatgcattccttgaagcaacaagtagagactgcttcatgctgagagctggaacctggggcaccccactgtaaaataacatcacattcattccttctcttttctttccatgacggacgattcagcatctggaacttctcctggtctctcagctggggccactgtcggcatcatgattggagtgctggttggggttgctctgatatagcagccctggtgtagtttcttcatttcaggaagactggtaggtataatggcctttcctcttgttctgtttcctgcagtgctgactgccatgcttgggagagggaagggatttcttcacctgtatctgggactggatctcttcctcctacccccaagctcctgcttctcagcactaattcctgcaggtctcttcttccctggtcttcatgctccctgtacgccactgtctcttagatataattatccccaccctctgctcatttgtttcccagattcaatacattgtcaaagcctcttggtccttttttaacatctcacacttgtgtcattctctccattcccataaacctcaacaactgctcaaagtcctgcttgaccccttgttgccagtctttgaaatctttcttgcatatgactgcctcattaccttcctaaaatctagttcactcgcctactcaagaagacacaggggcctactgtggtgtattagataagttcacatttcttctctttactaatcttttttacttcctttaccaccactcccttatataattccatcatcctaatagatctgtttccctacacatccctgcctctccaccccacatgtacacagaattcttagttccggtgttacacctaaaaacatgtcaaacagggtgacctccttccactgtctgcactgtggagttacccacacccttaatcacaagcaacttctgacctcatgaagaacaaagactgtagcattaacctgtgagtcttaagctcaggacacaactgtgcctgtgactgagaaccttttcctgataaccaattcatatgttcataacagatacagaaatgaagaaggcaaggtccttaattctataacaggagacaaaacctgaaaaataatcataatgccaaaatagaaaggagtgaacatcacaagaaattagagaaatctgacggaaaatatagctacacattggaatcactcagaaacattttataaaatggatacttaagtcccaccgataaattccgatttactggtctggagtgggacccaggcattcgtaatttttaagcctccccagatgctactaatgtgtagccaggatggagaaaccctgttctaaataggtaggacttggggctaaacccatgactttcagctaggaggattagaattgcccatggagtttttctggctgggcacggtggctcacgcctataatcccagcactttgggaggccaaggcggacggatcaggagttcaagaccagcctgaccaacatggtgaaaccccctctctactaaaaatacaaaaaaatcagctgggcatggtggcacgtgcctgtaattccagctactcagaaggctgaggcaggagaatcgcttgaacccgggaggtggagattgcagtgagccgagatcgtgccactgcactccagcctgggcgacagagcaagactccgtctcaaaaaaaaaaaaaaaaaaagaattgcctgtggagtttttcaacatacgtaagcctatactttgttggccctgttcattaatgggctccaccaggaaattaggaatctagttgagaaacagaagctgaatggaaaggccaccttatttgatatgttaaattatatgggaagcactgtcaaatcattagtgatgttaaaccttctctaagttatatttatgagtatgttattgatgtattccaaaagttatataagaaattctagaaatctaattggttatcagccataatgtcatatgccacagaagtaactaaatttctatgtgagttgtgttcttattataataaattatcatcagatttttaactgtactcattttaaatctttgtcattcacagacagttgttttgcttcttccttaaagcatttgcaacagctacagtctaaaattgcttctttaccaaggatatttacagaaaagactctgaccagagatcgagaccatcctagccaacatcgtgaaaccccatctctactaaaaatacaaaaatgagctgggcttggtggcgcgcacctgtagtcccagttactcgggaggctgaggcaggagaatcgcttgaacccgggaggtggagattgcagtgagcccagatcgcaccactgcactccagtctggcaacagagcaagactccatctcaaaaagaaaagaaaagaagactctgacctgtactcttgaatacaagtttctgataccactgcactgtctgagaatttccaaaactttaatgaactaactgacagcttcatgaaactgtccaccaagatcaagcagagaaaataattaatttcatgggactaaatgaactaatgaggataatattttcataattttttatttgaaattttgctgattctttaaatgtcttgtttcccagatttcaggaaactttttttcttttaagctatccacagcttacagcaatttgataaaatatacttttgtgaacaaaaa

SEQ ID NO: 368 - DNA, 90133 bp, Homo sapiens
aatcacggtggaagtatgatattttggctgtggatctgagttgatcaatctgcttagtggacttgagtccccccacccccgcttgtctgattggggctcctgggaggtaagtagagctgggcaggaggctcactcagcggctgctacgggagctttgccgagggtagcagctcaggctttattcttattattttttgaatcagatccggattcaaatctgagagaatcgatttgtatcttctttgctcctgtatttatttatttgtaaagtagtaaaaataccttcccgtgttgctgtgaagattgagatgcagagcaaaattgcttggtagagggtagacaccaagccagcagttctcaacctcggctgcacgttggaaccaagggaaactttaagaatgactgctgccaggcttcaccaaagaccagtcaaatcacaatcccagtggctctatgcggccagcgttgagaacccctgtactaaaaacttatttgtactgagaaaaacctctctttagagataaagaagaggagtggagtttggataacttctagtcaagtattgtgtagttaactaccattgattttctttagtataaagtggtaacttagaagaagtacagctacctctgtcctgtaaatccctttagatatagtcctggttctaggcaattccctttgtttctcatacttaggagagcagacttgggaagatctgagaattaaaaaaaaaaaaaaaacaaaccctctggagccctccctttttgagaagctggtctatctaatcaggtttaaagcaggagcatgtgggctaagtgagactccagcaaggaagtgagggtcctccgccggcctcctcccaggcctccttagaagggatctgacgctggctgaggctcattgatagagccagatggtctctcccaagcagggcttctgttctcccctcctcctccactgcactgtgggctgctcctgtggaccacccaaggcaagggaattacacagattgcagatgtgagctttcatttcctgtgtttcctcctgtagctattggaaaattctagtttgaagataacatggcttttccagaaactcctggattgttcctgagaccaggcccaatgtaatcctgagtgggaaaactaaagggaggagaatttggcctccttgtctcctgagttactaggtttagtcatgtagaaagaaaatagtcttcgttcaggcaggcagttgagtcaagtttatctagggctgaactgcctgggctgagacactatcagaggggctgaggggccattatgcccacattgtcattttctactttatccagggcaaagataatctttgtgtactgaaatgttcttattcacattttaaaaacacaaaaaacaaaagaggtcaaataataggtaaaattagttaaaaaaaaaaaaaaaacctcgtatacttaaaggaaaataaatgattttggaaaccgtaagacatttccgataatagaacaaaatgatctgaagggcctagaccgaggtaactgaaaatgtttagcctatgttttgtatatttatgtcagttcaatttcattattttgcagtgaatatgcattagttgcagggaatactttttttaagaacagctttattgagatataattgacatatcatacagcttaccaacttaaagtgcacaattcagtagtttttagtgtattctcagagttgtgcaaccaccaccacaataaaacttagaaaatgttcatcactttcaaaagcagccccatgtcttttagctctcagctctaaattccccctctgccccccaactgcaggcaactccgaaatcttctttctctgtctatggacttgcctattccagacatttcatgtgagtggattatataatattaggctttttttgtctgacttttttcactaagcataatgttttcaaggtttagtcttgtagtatcagtatttcatatctttttatatgaatattctattatatggatagacaaatattctatcatatggataccacattttatccatcagttgatgaatatttgggttgtttctatctcttggctattatgaataatgctgctatgaatatttgtgtacaagtttttgtgtgatgtttttatttctcttggctatatacctaggagtgaaattgctaagtcaaatggtaactctatatttaagtttttgttaaaactcccagactgtttaccaaagtggttgtgttattttacattcccaccagaagcatatgaggattctaatttctccacatcatcttcaacactgggtattatctcttttttattatagctgtcctggtgggtatgaaacaccctggtgggtatgaaatgccatcttattgtggttttgatttgcattttgcttatgcctaaggatgagcatcttttcatgtgctttttagctatttgtatatcttttaaaaaatttctattcagatcctttattttttgattgggttgctgtaagagttgtttatatcttctagatacagttcatttgtcagatacgcgacttacaaatattttctttccttctatgaattgtctttcactttcttaacggtgttttttgaatcacaaaagttcttaattttgattaagtccagtccaatttgtttttttttctattgttatttgtgcttttggtgtcatagctaagacatcatttcctaatccaaggccataaagatttacccctgctttcttcttagaattttatagtttcagcccttataatttatgtctttgatatattttaatttttctgaatggtgtgaggtcagggtccagtttcattgttttgcatgtgaagatcaatttcacaatttactaaaaagagtattctttcccaggaaatacttctcttaagggcagaatttccagaggcaatcctgttttggtgtctaatgagagacccacaggcacagaagggggaccatttaataagccttagtgtccaagtctgagtccttccaagcaaagctcacatgcatgctggtctcctacttgaccccatgacagtacttcctaggcagtcactgcacactgtctggctaagtggtgatgaccaccagggctaacatgaaggggtagtgttctaggaggcgtatgttttggagaattaaaacagtacagttcactatggctgtgtggagtttgttgtgcacatgggacaccttggcgaagttgtggaatagtcagttggatatagaaaaccagagctttgaccagaggagagatctggtctagagagagactcgagatgttggcaagtagatgggagcagagttgacctccacagagtgagtgacaggacaggataacctgggattgggcccaaggagttggatgagtcacaagtaggactgcaagggactagctcaagaggtggaaggaaaatcagagtattggcaaggaagccggggtaaagggaaatttgaggagagctcgccatggtgttgaaagttgtgagaggtcaggtgaggtgcagactgaaaagcgtccatctgattatcatgaggaggttgttggcaacctcggtgagggtggtttcagtggagcagtgaagatggaagccagacactgtgatctgagcatgagctggatgggagcaaaagcttgttaggtgaaatctgataagagacagagataggtctcagaaaaccaataagaatgatggtcatttcttggaatttaaagaaaatccaagatcaaataaaaagcttagctgtctgagaaaaaaatgtctgagggaagatgagcatgctcatgtctaccagatccagcttgcatgttcaacatcagaccgactgcatcattatctcagacattcctgcagaaatgggttctacatggtggggtaattaatctcaattcagaataggctttgctgaagaatatttactggaggataaagcaatgattccttaagctagtgtttctcagaagggcctatgtaatcacctgcatcagaaatccagagtgccagccaggcatggtggctcacatctgtaataccagcactttgggagaccgaggcaggagaatcacttgagctcaggagttcaagagcagcctgagcaacatagaacctatctctacaaaaaattttaaaattagctggtgtggtggcacttgcctgtagtcctagctactttggaggctgaggcaggaggattacttacgcccaggaagtcgaggctgcagtgagccatgattacatgctgcagtctagcttgggcaacagagcaagggacccagggacataccctgaaccaggatttcatagtgtaagccccagttttagtgaacttcagtttggaaagacctggaaggcatttgtccaatgtacaactgatgatgtgaatacttactagccatcccattcatgagattctccagccacttcatggcatgcgtagctggagccagattgagggccccgcctgctgggcagttgcttggagccagcatctatagatgaagttaaaaatcttcctggaataaacaaagtacaaagtgggtccacttctgtcagagtagatagtggggaagaaaatctttactaacctcaaactatcttccttaaatatttttcagaatatcgcaaggtggctgtcagctaagatttttaaacagcattatgtatgattcagtgtttcttacttagaactagtgattcattttgttatctaagttttaaatcttgtgataattctctcaagtgttctggtttggaaaactgccaaaaaaaaaaaactcaacaacagagaagcctccaaacaaaaaccccaaacccaaactcagaagtaagtataggccaggcgcagtgccttacacttgtattcccagcattttaagaggctgaggtgggcagatcttagaccccaggagttggagtccagcctggatggatgaaaccccatctctacaaaaaaaatgggatatggtggtgtgtgcctgtagtcccagctacttgggaggcttaggtgggaggatggcttgagcctgaagggccaaggctgcggtgagccgagatcgcaccactgcactccagcctgtcagcctgtgacagagcgagaccctgtctccaaaaaagtaagagctacatggaagtaagacctgttttgcttaaatttatcagaaaatggactctgtcctggccagcaaaagtagttaagaaagattctgcttcagcctaaaacaatgactagcagaaaattagtttcacttcattccactaaataaatgtggaacaaaaactgtgaactctaggtttcagggggttcaaaattatttgcttttctgggttcctattggccttggttgagcctgcaggtaatcatgactatttagaattattgaattaaataactgaatggagttgagtcctaagaagtacttattgagtactaattgaagacaaagtttctgccatcatcaagttaacagagcaagacagatattaagtaattaaaatattattttacacttctgttaggtgagggttgtgtgttgatggactcatgataaaatattctgaatgtgtagtatgtaacacataaagaacataaaatgcaagtacttgaaaaattgagaaatttaccactcatagatttcattttgagttttaaagaataaaaataggccaggagcagtggctcatgcctgtaatcccagcactttgggaggccaaggcaggcagatcacctgaggtcaggagctcaagaccagactggccaacatggttaaaccccgtctctactaaaaatataaaaaattagccgggtgtggtggtgggcacctgtaatcccagctacatgggaggctgaggcaggagaatcacttgaaactgggaggcggaggttgcagtgagctgagattgtgccattgcactccagccttggggacatcaagactccatctcaaaaaataaataaaataaaataaaaaagaatataaatattagaaatgtaacatgctttgacttttaggaataattccaagttttcataacttttttgtctgggaggctatctagactttcttacaaatgtccataaattaattacttatttatggacatttgtattttctagggataatattggaggaatgcttaaaacattatagacaaaagcgttgaaatgttttcaccaccatgaagctgtgagttgaaagcattagcccaagtcctttcacttgttcagttttgttttcttttttttttttttttttgagatgcagtcttgctctgtcggctaggctggagtgcagtggtgcaatctcggctcaatgcaacctccacctcccaggttcaaatgattctcctgagtcagcctcctgagtagctgggattacaggcacctgccaccacacctggctaatttttgcatttttagtagagatgaggtttcaccatgttggacaggctggtctcaaactcctgacctcaggtaatctgcctgcctcagcctcccaaagtgctgggattacaggtgtgagccactgcgcctggccttcagttgttttcatcctataaatcatacctcctttgctttggaaaattaaatcagtaatatttatcaattacattttccttattcctattattagcaagtctattgaaccagcaatgtctcacttttcatgaaaatgagttcctaaaatgcagtggtggctacctgaaacgtgcacattcttaacatttggatttaatctggaaggatgtctaaaccatgtaaggaatatatgaacagctctcagaatcttgttaacctggtatcccacagtacagaaatagcttctgtaattcagaaatgcaataatcacctgttaatttctctgatgggtggtttaggcattttcagtgtttaattaacctaattctttgagctggaagctgggggctagagatagcaagtgatgtacagaggaaccccatttcggaacttggccatcttccaacaggaatgggctcatgcagggatttctgcccttggacttttttttttttttttttttttttttttactcgcataaagctggaaggaaaaaaatctggcagagtctatagctgtagtgaataggatgggatttgaatcagaacagggttgcagtcccgattctgtagtcaaaggctgtgtgacttagacaagaaataaaacctctctgtgtccccattttctgtctataaactggaatctactttgcagacatgctaaatgagaaaacagaattttaattgatataccaacatgtcacgatcattgttattgttgctgaaaaacaatgactataaatgatacatatgcactttatttttgaaaaaaaaaaactcataaatttaaaagcactttattattttaaaattttcaaagaagacccaaacttctttatgaacaatgctgtgtgatgagatgcttgcccttgattccaggaactgaaacatgtggcaagtggaagcgatttgattttgtagaacaagcacactttattcagctaatgggagggcagaggtgtgaagaatgtgagaagtgcttagcctcaataacctcattcttctaaatgagtgatgctggctgtgggacaaagcaagaagggcctttgctgaacccaccagtccaccaaggatgttaacagctggcatgcaactagatggtttcacttgcagggtcctcaggataaatgaggtctattcccacagtggcttagagcactcatgaaaccttctcatgaaatctggaaaggagggagcccttctagagagtgggctgggctctcttgctttccctctgtcagatgcacacctggagaggaatggaaaacacaacctcagctcaggagaagccaagaaatgaacatgagaaggtccacagaaacagggccaagtgtaacacaccagacacagacatgacattgatgctcaccttcagtgtggattcccagagtgaccaaagtgtggaaatcaggaattggtctaaaagaagccttgacttgagaaatctgggggcattggcttttattggttaatcaaaaacctcattttgattggggaaaaataagttgttcctaggtaaatccattccctgaattgtgggggggaaaaaaggacttggtttgtgtttgggggaaatttgctatcggttgtttcttgcagactttggaagggacccttggatttcaaaagcaggcacagccatattgtgtctttcctcatgtcttctgagtcatttatgatatctcatgtggctggttatcaatgaactgtgtcattgctcagacatggcgcccctgctccgtcttttgtgtttgagatggaatctacataaatatttgctgatcaagtctcctgtgctaagtgttgggggtacaaaatatggaaagtctttgatgtcatgaacctcacactctagagatagttggatacacaaaaacttttccactctaacttcttgtcttttcattgactcatctacattgaaaaatgtagcaacctgttttgagatggattagatgtaagttaaacttcttttgatacaaagtcatttctttcctggagtaaaagtaatgacactttttatgatacccagtggctctcgaagagcaataaaaaatgttaatggttaatgtttgactgaagctgaagggagaggctgggaggcaaagcagggaagagggagtgttcccgggggagatactccagtcgtagcaagagtctcgaccactgaatggaagaaaaggacttttaaccaccattttgtgacttacagaaaggtaagggctgacatgtcttaactgtgtcagtaacgtatttattccagaaggacaaagtagatggagggggagggcacttaaaaagttgcttgacaaatttgttccttgaggtgggctatgcagatgcggagaagggaaatttgttgctggcatgacaagttttgcttatggagcacaatttttttttgtagtttcttttcattggtccatattttataaattcatttgatgaagtggctgcagtgaaatcaagcttggcagtggaattaaaggggaaattgagttctctgatgtttaaacaagtatcacatccattctttgtgatgagtatataaaagtccctggtcttaagatgctctagggctcttgtattctagaaattggggttggaatcacattctcaaaaagcatgtcattctatctacttctcagagaatgagattcaatttgggattcttagaattgtctaggacacagcaagggagggaacatgcagagaagaagaaaagtctttttgtaaaagtactagaataagaattgaagacagacagacctgccttcacaagtgagagaagaggctgatgtgcgtgttaatcagcttcctgggctgcttttggccttggtggtggagttaccacctgctaatgtgtggttatttttatgttaagccacacacagcttattggtatcttcaatggtccgatatttgcctctgtcttggtcttttatgacaggtgactttatagggacagatgccctctgtggtaggggatgccaagcagcagattggaaggacagtgccttctctaatattttcttgtctttatttttcttcaaaagcttaaatagcaaatgaggcattatttgaaagaagaagaaaaaacacatgtttagatgaaaggaagatgaatgctattcagctctcaccaggaaacaaagcgagtcctttactgagagagggtttctagtgagttacggggccatatgagtcttcagggttggccaaatgggttaggccagtttcatcattttccaacctgtgggcacagaacagagagctgccactagagacttgcctaactaggtagttgtgagaagtaaattagataagtaggtaaagagcttactatgttgcttggtgcatggtacacatccagtgaatgttagcgctctgttccatgagaaagttcaagtaggtgactcaggatgaattgagaaatttttgtttcattctttagaaaaataagaaaaaaatcagtgatgccataaaaatagcatctaccattatgcaagagaggaactaattctatgttcaggaagtaggattcaaaaatatgagaataataaaactattggttttgctatatatatagcattttaaagcccctctcatggttcccatataagtctttgggtgaggtgcaggtggggcatcctttgaaactcacccagatgacccctgaaaaaagtcatcactgttcaaggtgaaggttacatttccggtacctcctcctttctcatacaaaaggcaaaatatggctgggtgtggtgggtcattcctgtaattccagtactttgagaagctgaggagggagaaccgcttgtgctggagttcaagaccagcctggaaggtctgaacatagggagatccagactgtacaagaaaattaaaaattagccaggcatgatggcacttacctatagtcctagcgacttgggaggctgaggtgagaggattccttaagcccaggaggttgaggctgcagtgagtcatgattgtgccactgcattccagcctgggtgacagagtgagaacctgtctcaaaaaaaaaaaaaaaaaaaatctggatgatgtgcaaaatatatcctggcagaaactctacttctcgttccattgtcaaaaaaaatgtctagaaggatgtgtccctcatttttcttccacattaacagcaacagctctgaggaggaaagctgggcattgtcatgctccttgctctggaggccgacaaacagtgcttgaacagaagctggttcacatgggtagagatgtatagatttgacataaaattgcattgattcagaaatctctggtatcagatttagaatggggctagttgttctgtaactgctcgttgattatccaaagaaagacacacggaattttaagggaatacctatctacttatttgttacttgtaagaacagacaggaagaagaaggaatgtttacttaggtacaagaaatattaacttaataaaagcagatattcccctagtggctgaggtattaactacactaaagttgatttttttttttcacttaagcaatacgtaacaagctaagctatgcttgatttttgtgtatgtggtacaaagaaaatttctcttcaaatattctgtaagactgacatggaattctctcattcatgatatttctgagttattcatttttgaccatatacttattacttaaaaatattaggacttgttcttaagtgacggatgaggagaatggaaatggtagatttgttcccttaacatctaagctaaagatgagttctcttcctcaccaagaggccatctagcagagtggcttggtgcttggcccctgcattcacaccacttcctcaagcgctctaagcatcagtttcctgctctgtgggataacaacaggacccacattatatgattgtgttgttcaagtaagttgtccaaagtgtttaacttagcttgcatttgttgagcatttgctattttttaaaacaattccaatgattaaaaaaaaaaacaattcatgaatgagatttcatcgtggtctggcaccttttattaagcagaattaaatttattttcccttcctctcctacccatcccagttgtcagttacgatttaattacagaaattggaaagtgaacctgccatacttaagcatgactgcacattcttggcattaaaattcctgccttgggtcactttgcaaatgaactggtattagagtatttttctttctcttctcttctcttttctttctttctttcgatccttcagtgtctaaatcctatgggatggaacctaatttagatttacttcctactgaatttctaaggccaggatgtgttgctttattatcttgacaaaatgctcatccgtaaactttatattacataaagaaatgttgtgtaatacataaagaaacactttgtcaaaaaaaagtcaagccaccctttatgagaaatagtgattccagtcctcctctttagtccagggaagatgcttgtgatattgttctgctagatctgggggagaaagggtctccccctgccaccttctagggtttttgcgggtatatagctgcacacgtgagggaagtcaatgctgaaattcttcctggctacctgcttaaaacccatttatgcctagtgttccattattggaacactaagcatgtgggagttatttatatccttctgcacaaggtcatcgtcaaggtctgattgcaaaaattcaaaaaattgcaacctcaggtataaatgggttacaacatcaggcaagtgccctggtgggacagtcactgttgtccctaggtcagtggctccctttcctgtgactgctctggccccccttccattcaatgctgggatgttttgggagacttggaggagaggcctcttctccccagctgatccttcccttgctctgtcttggggagcactgggggaacaaacgccaaccaggaacaacatgacacctctctcaaatatttcttggaacttgttattcttttctttaataagaataattatgctagtaatcccattactgggtatatacccaaaggattataaatcattctactataaagacacatgtacacgtgtgtttattgcagcactatttacaatagcaaagacttggagccaaccaaaatgcccatcaatgatagactggattaagaaaatgtggcacatatacaccatggaatactatgcagccataaaaaagaatgatttcatgtccttttcagggacatggatgaagctgggaaccatcattctcagcaaactaacacaggaacagaaaaccaaactctgcatgttctcactcataagggggagttaacaatgagaacacatgacacaggggaacatcacacatcggggcctgtcctggggtgggaggcaagcggagggagagtattaggacaaatccctaatgcatgtggggctaaaacctaaatgacgggttgatgggtgcagcaaaccaccatggcacgtctatacctatataacaaacctgcatgttctgcacatgtatcccagaacttaaagtaaaatttttaaaaaaagaaaaagtgagacaaacattttttaaaaaaagaataattatgctagtaatgtgtattataattgattatatcaatctaaaccattttaagttctccaggggaccatttagcctcccgtgagcccatcttccctatcatgaacctattggtagaacaaatcatcacctctaattttgcatgtgtgtaaatccagattttcatatactgaaagattggcatatctatattacagagtttagtgacagaaagctgggcttatgtttatgtatgtatgttcatccctccctccctcctttccttccttcttccctgtcttcctctctgctctaaaaacaaatcatccagctgcccattccctccccatgtggagtaatctgtttgaagtgtgaggcagaagcccagatttatacctgtctgcttgtttctagcttattaatggccactttaattgggtccttaatttgtcaaaagtgcaaattggtcagatgcttctgcggttctctaaaccttgagtgatgcaattggtgccagagatctgtgagccagaccaaaaagatgggcgtggcagatctgaacattaatcgatgaaaaatggtttgggcgagattttcatctgatctttatatctatctggccttgccttataatttatgccgctcttagcaatatacagtgaggaggaaaaataaatggctcacaggatatttggcactgtttggtcctggtggtgttatgaattccagtcacatcccttcctgcccacactaccttaggatatttgaaaacaaattctgtagctctctccttctgcaacttctttgttctttgaagcttcatggctcagccttagtgctaggtgaattattttaattcaaagcccttcatgctttttaaaaaataaataaataagagatgactgactctaagatttgtctatcacttagcttttttcacgggggacaaaaatcaatgcttatgtgttgacttgtaaatctggagatctgggacgtagaaactccttgtccttactcaaataaatgggtaaatgacaagagcgtctaaacatcaccttcccatcttgcaagatggtgggtgaaaaagttgagaagccggatactaaggagaagaaacctgaagctaacaaggctttgccagtggcaaggtgaaaaggggaacctcagagctaaaaagcccaagaaggggaagcccaaaatcctgtcctcattggaggaattggcagatattcctgatctgctatgtattccagaaaggccatgtacgagaggaggtacttagctgctaaacccaagattgaaaagaatctcgcaaccgttacaaacccagttgaggtgacaagaatggtgatgcctggctatttaaacttcacaaaatgccttgatattatccaacagagatgtgcctcaaaagctgtccagccatcgcaagaaactctgcagtcagcatgtgagaaaacttggagccagcacggccctcgagaccattctgctcatcctcccttggtgccaccaaggcaggagggtggttttcctggagcagctgggcagtagcttgttacttgtggctggacctctggtcttccatggagttcctctgtgaaggacacaccagaaatttgtcatcaccacctccataaaaattgatatcaggactgggtgcagtggctcacacctataatcccagcactctgggaggtcaaggtgggtggatcacttgaggccaggagttcgagaccaacctggccaacatggcgaaacctccgtctccattaaaaatacaaaaattagccgggtatggtggcacacacctgtaatcccagctacttgagaggctgaggcatgagaatcacttgaacctgggagctggaggttgcagtgagctgagatggcgtcattgcactccagcctgggcatcagagcaagactgtctcaaaaaaaaaaaaaaaatcgataccagcagtgtgagaaacccaaaacatcttaccaatgcctactttaagaagcagttgtggaagcctagtcagtaggagggtgagatctttgacagaaaaagagaaatgtaagactacaaagcagtgcaaggctgatcagaaaaccatggactggcaaattttaccaaaactcaaagctattcctcagctccagggctacctgcaatctgtgtgtgccctggtgaatggaatttatcctcacaaattggtgttctaaatttcttaagaagaacctaattatgtaactaaaaaaaaataaatgaatgccgttaatccccttgggagcttggagcctggtgggagaatcaaggaagccttgggtgggctgctgggatgcggggggtccctaggtgtctaatgactgagcagagccccctgtgaggccacctctgtcctgggacagcagcacaggctaaacaaaagttccatggggtcttcatttgctagggctgccttaacaaaataccacagaacgggaggcttaaacagcagatatttaccatctcagttctggtgaccagaagtccaaaatcaagagggcagtagggttggttcctcctgagagctgtgaaggaaggatcttctgtgcacctctctccttggcttgtagatggctgtctgtacattcacacagtgttctttctttgtggatgagcctgtctccaaatctcttcttagaaggacatcagtcattgtggattagagcccactctaacaacctcattttaacttcgttacctctgtaaagactccaaataaagtcacattctgaggtgcttggaagttaggactccaacatatgctttttgagggggagggagacacaattctacccatagcatttggattgatttaaaaaagggaagattcctaaggtgaagcacagaaatgaggagaaatagtgagacacagagatacatttgcagtagaaacaaaacttcccagaccaaggcagccttttcctccaggcaggtcggggcaggtcatgtcagcatctgaaaaaaagagcagctgcaaagtagggggaaaaaaccttttcaacattttggaaagatctgtagtggattaaatgatacttggtgtctcatcatcaggatatttgtgtttcagagggagtgaaaattagcctggcattgtgaccttgggcaagtctcttaatttctgtggtcttcatcgtttgatttttcatttcatctttaagaggtatattataatagcatctgctccatagagttgttctgagaaatcagcaagatagtttttcaccaccaagtcttatcggtgcatgcagcaaattgttttcagtcaatgtttgctgcctttgtcgttatccgggctggatgcagatccaggccgcggcgggattcccatgtcttctgttgtgtggtagattaaaatgaggcactgttcctgcagagcaagcccagcagccctggttcccgtctgcaagcaggtgccctggtctactgttgagcaagtggtggtcatggtggtgcccattgggtgaggggcagccacagtttgggaaccgaggccttcttttcaaaactcctttttttgtaaaaaaaaaaaaaaaaaaaaaaaaaaaaaaacaaaagataataataataaccctctgatctatgttgcaaagggtgtgcttggtctctcaaataattgctgtagtaactgtctgaatttagtccttgtatctgagggaaatcctgacaaacggcaaaaattccacgcagacggttggccaattattacaggtagttcagataaaatgccacagaatcctctggaaatctatttcaattcttttccaagtagtgtttttgaggaaacctaggtgtctggcttggtggtttcgggcaatttcagtgatgaaggatggcttcccatcagcaccattgcgacccagggtaccccacacttgaatggtattgtgtccatggaaggaggaagtgtaggtgggacctgtttgagagaccaaagtcctcttttgacataatcctagcactagtgtagtttgccttgaatcattcgggtaaaggctttgccttgctgcctcatttggctgtgaggatgttcctgtgtaggctgtttttagaatattttcattagtgggccaccaaaagttgggaattgtgaagagaaatgtcctgttggacaatgtttacagttttgactaagcaaacgtgagtggcaaaatgaatttttggccaacagtattccaaatattaactcgctgaatctcttaactctcgaaggtaggtattattattattatccctgctttatagatgagtagatagggccacgagtcagccggtggaggagttaagacccaagccagccagtctaactcctgggtctatgctcctaacaaccgcatggtgtggtagatttgtcttcaaataaatcatggcaccctacgtgtggcaatggaaagcagtgacttctacttcccactggaaaccctcggtgaggggcaggcctaaatgtaaatgacaaaataaaggataagtacatttctccttctacttcctaggttccattgaaacatcccagacagtgatctctctgagcatctgaccaaaataaggcattccttttatttttatttgcttttctatcatttaacttgtgtttttctggaagactgaaggtgttaaaaaaaaaaaaattagttcaagaagagatgatctagttcgaccagttctgggttatttactgagcagaaatctgttagtgtattcaaaggagaaacaactcttttcatcaacaataaaaatgtattacacaataaagctttgaatgttgaatgagtttcctttaatatatcatgtttattgaaagctcttacaggtgagaacaaattaataagatatccatgttaggtaatcataaatgttttagaatttacccaacatctgatgatggcttgatatatgcaagggatagtatgaagagacctgataagttaaaaataaggcctctgcccttaaggattttatttaatagtggcagtaatgctaacagacaaatgataaaaaaaaaaaaatatatatatatatatatatatatatatatatatatatatatatatcaatcagaactggctctgagaggaagagactggctggaaatcaaggaagatttcatgaaggaagtagggtttaggtcctagctccatgaagatagaacctgtaccccttattttggtaccccagttcttggcacggtatctgggacatactagaagtggtgtagttcattgctatttaaataattaagttgaacttagatggtaagatgtgagaagcagaaatgaggaaacatctccatccaacctcattaagcaaatatccattgtccattttctctgggccaggccttgtgccaggcagggagagcagcaggggtgagagcttggctgccagagagctcagggtgcaaagtccatctgggtggaggtgtgactgggtgtgggaagggagtggcagataaggctggaagagttgggagcagcatttgaaagatcttgaatgctgaggagtttaaggagaaagatctcccaatgtgtcattattgcctatatttttacttgtattaagcaaatacaggttgatagctgaccgtgtacattttgctaatattacagaaaactagtttgttagacttaatttattcatttataattgataatatcatcttgcaatatgctagaatctgaggttgttacttgtttctatgtgtttccaaaccaaataagtactctaaagcagtaatgtcttgtttaactatgagttaattctaaaatgatgtttagatatgtcaaccaaattaattatgttgcaaaagctaatttttaaacatgcaaggaatttatgaatcttggagtcctgaagggttttaatcctagcttttccttaaaatagttgtggaatttcagggcaagttgcttaatttatatagcatgtataaatatatatacatacatacatgatatttgtatatctctacagctctatctctgtccatgctctatgtcatacatctacatctaggtagctatcaaactatataaagcacagtagcaagagttgaaattccagagtttaaactctggaattgataatctggttggaggcaaggtaatgtcacttcctagctgtatgtctttaggcaaattgcttgacttttaacctcaattttctcacctacaaaatgagaagaacaattcccagctcattatatctgagaaaatcataggagcacaaactttttctttttttctttttttttttttttttttagacagagtctcgttccatcacccaggctggagtacaatggcccagtctcaactcactgcaacctctgccttccaggttcaagcaattctcctgcctcagcctcccaagtagctgggactacaggcacctactgccacttctggctaatttttgtatttttagtagagacggggtttcactatgttgaccaggcttgtctcgaactgctgaccttgtgatctgcctgcctcagcctcccaaagtgctgggattacaggcctgagccaccgtgcctggccaagaggacaaacttattattgagcaatggctatgtgttttccatgtgaggagactaaggcaccgaaagatgaagtagtatatccatagccacatagctatagagagcagtgctgcgttgctaggccagctttctgactccaagcctacctgccataccactctgttactgtttttatttttaattttaatttattatttatttttattttttgagacagggtctcgctctgtcacccaggctgcagtgcagtggcgcaatcatggctggctgcaacctctgcctcctgggctcaagtgatcctcccacctcagcctcccaggtgaagtggcatcattgtctgggataaatacccgaggtcatcaactcagggtagagaaatagaaaacctgggcaaacaagaagtgagtttaagagcagaggtttaataggcaaaagaaagagaaagcggattagctctatctcctgcagatagaggggggtgcccgagtgggtcttccggttttgtggtgaaatggcacagggttttatatatgaacttgaggaggcggtatctgatttacacagggccggagagattggttggaccaggtgtgatgtttgcatagtgcttgaagaagctggcctaatcttttattatgcagatggattctctacctggctagcaccatatagtctgttgcttactgtacacgtggttacaaagaaaagggaagatggagccgccgtgttgaacatgcccggcccccagatagccttttcctattggccgagctgctggcattcacctgtggaaacttccagcttgcttatctatgtctgcagctggattctacaggctgctctttgttagaaatgattttggggctgctttttgttaaaaggaaaccttactgaggactctcttacccttactatctgcctaaataatttatttccagctcctgtatcacaagtagctgggattacaggcaatgagtcacccacctggctaatttttgtgtttttagtagagatgggggtctcgccatgttggccagggtggtctcaaactcctgagctcaagcaacccacctgcctcggtctcccaaagtgctgggcttctggatgtgaaccattgtttcccgcctgttactgtttttaaagacctctctgcaaatctacatcctgggtgatgcttaataaaggattgtttctttatctcccagaacattggtgaggctaaaatgaaatagcatttttaccctttaaagttcaaatataagttatgcaaatgtagggcatgtaaaattttcaggatctaaatttttagagtggttaaaatgttagtgaaattttttccatgctggtgatattagtgatatgtgttcaatgtagaaaaactttaaagaataagatgatgaagtaaaccaagattattcctaatctctagagataataaagtgattggaattttcgtgaaataaatacattgaaaaaattttcttgactcagccaggtgtggtggctcacgcctgtaatcccagcactttgggaggccgacgcaggcagatcacgaggtcgggagattgagaccatcgtggctaacacggcaaaaccccatctctactaaaaatacaaaaaattagccaggcgtggtggcaggcgcctgtagtcccagctacttgggaggctgaggcaggagaatggtgtaaacctgggaggcggagcttgcaataagctgagatcgtgccactgcactccagcctgggcgacagagcaggactctgtctccaaaaaaaaaaaaaaaaatttccttgactgtcttttggggaggggcagtccaaacttatgacaggtaacaacactgttttccaggccatgtggaaaatttctctcacatcttaaaatcaattagtcatgacatgtctcatagtgaaagtcacaatctctgtgaaatgggaagccttaaggaggaagggaaaaataatatcggacaggagacaataaggacagagttcagatttttgtttgatctcttttggaatagtaagaaattaattttttcttaggtttattgtgtaggtaatgacaatatctagaagatcaaagaggcagctggtgacatctttgaatgaagaattgtgagcattctttagttcttttcacttgcggaatctcatatgtttgtggctttgaatcaaaatgtttagttatcctggaatctgccaaaatacatcttctccatctgtataataggagtgaaaggaatactcattgctggctgggcatctgtaatcccagcactttgggaggccgacgcaggcagatcacctgaagtcaggaattcgaaactagcttggtcaccatggtgaaatcctgtctctactaaaaatacaaaaaattagccaggcgtggtgatgggcatttgtaatcccagctacttgggaagctaaggtgggagaactgcttgaacccaggaggtggaggttgcagtgagatgagattgcaccactgcactacagcctggatgacaaagtgagactgcgtttccaaaaaccccaaaacaaacactcattgcccatcatttaagacgctgaaatgaagaagatcataacaaagcaaagcagttagataaatggaattattgtgagcatgttttgagatgttggcttgcatattgctatggatgatgtgcatgaagcttctggaagactgggctgctccatatagaggagaggctggccttttgggataccattttactagatttataactggatatcatccattgattcttactgattggaaagacatgattttaacagactggtaactaaccatttttttatctggttccttcacaggaatttgaataaagaaaactatgatacttcaggcccatcttcactccctgtgtcttcttatgctttatttggtaagagaagagggtgttcttctctatttgtttactagaatattttctgctatctttctaccccacaccagggaaagaatggctattattacttaaaaaaagatgacctatcaaaattaagttgttgtatagaatggaaacatagcttgttccactgtgatattttcgatgaaatggctacaaatcacatgtctgccctcgactagggaatgtattttctttccagctcttaaaagccaacaccagttatgggtaatgttgaaaacaaatctatctatagctcagggaatctgaaatgacattgcactgatacatgaattagtctgtgtcccttaatcttgactttcttttttaaactttgcgcatgaaaacttaccaccaaaacatcaagaaaagcattttctctattttcagccttgctctgctctatacttttcttctcatcaagggtttggaattttctggttgtctttaaccatttgttgggttaaccctattgactgacaggcttctagagctcggagctggatagaaactggggagtcctcacccttgaccttggggtaaacagtaggtgcctttttttaaaatctacgtgactgctgaggttcataaaggttgcccccaaaattgctgcattatgaaacgagattataagatttagaggaagcatttgctctcttttttttttttttaaagaaggaagcttctagatcctcatacctcaaatcttacttcctttcttctgggatccataaataatacatcaaatttcaagtcccaaaaaataccctagagctcacatagtgacagtgtgaaattgaatgaaacttgaaaactatcagagccttcctcccgggggaaatctgcagttcaaactttatgagaagcctgagtcctcacagcctgcaggctcaaagcctgtctccaggattgtggaagggctggatcaaacatccccacttgacctctctcctcatgctaccccctcaaatgccctttgtcacctatgttatcccagggtagtgacaaattcagacatggattcaaactcggtgcctccactaccagtgataagaatttggtgagttacctaagctttgaacctcagttttctgccctgtgaagtggatctaataatagtacttgtcttatgggattttgtggcaattcaatgagatactgcatttacaaagctcttggatcagcgactggtggttaaacacacaataaacattagctactataattactacagcattttaagtgttcagtgtgtacgtccacatggactctgacctccatgaaaaatggactgtgcttttatcatctttgcagattcagcactgagcacactgctaaattatttaataataatatctaattattaggccttatttgcttcttgtctgagaagggaacatgcatttttattcctggatgaaaggtgaaaataaggtttccttctctctactctcaccccagtgggatttctatctagagtgaaaatactgcccaaccactgctggcagcagtgccttacccaggtgaaagccacaagcacagctgtctctgggtgaagtcagggagtgggatttcaggggtgttgggagggagccacttctctctcctacctcctcccaaggcctcttctatgaagactggaagtttgcttgaagaatcttgccttctgcatagggctttattcaacagaagcactaatttactccagactgcgagtagatcttctgttcttttccaagagatagatttatcagagggttagaaacacaaatacggcattgatgtacttcaggggcaccaaagagagagtaaataagtgatccagggtttgggaaatggtactgaacagggaatcggaggaaaccaaggcagagccatctgttttggagttatgcctgggccttccagaaggaagatgagtttggtacaaatactacataatcactgcactgagctcttgatggagctaccaagtaggtgaacctggcaattgcacatgtcctttgacctggaaggcagtaacaatgtggttaagagttggggcttggtggtccaatggcgctgggtctggtctggaggtagctctgtctctgaatgctttgcttctactgtgggacttctctggagatactttcttcatagcattggtcagaagaaatgatgtcttgtggtgatcaagtcccattactgccacataaaagatgctaaaaatgactttaagatggcagttccattctcttcctttcacctctttgtgcaagatggaaaacgctattccctccaactcctgcataaagccgccatcttgtcctttcacagatttccaccataccatctttcccacttctggggaaagcggcttgatgattcacagtgtccacatgcactttgaaatctttatagccccaatagtcatgtttattggcaggaagagagatttgttgccccaatacaagcacgcaactttgaaccctggaaccaagacttgattctcattttctgatgggtgagccagcttgtccttgttggaatagtgcagccttgtttgtgtgtggctaatgtagttttcactggtgtgactaactgaaagactgcttgctgacatgagtgcaaagctgataagcagcagctccacagaaagcactgacctcacttaagcaaccatggtggtacctggacatctgtcctgcacacccagttcttatgccctgccttctagaggagctgatggaacaggaaaagatgtggaaaaggagtgaaagggatgaagacctcccaaaggaagataaacttagaaaggaggagatgggctagaagtctggcaacattactttgtgagttaaggatgcattttcttggccgggcatggttgctcatgcctgtaatcccagcactttgggaggctgaggcgggtggatcacctgaggtcaggagttcgagaccagcctgtccaacatggtgaaaccccatttctactaaaaatataaaaaattagtcgggcatggtgggggggtgcctgtaatgccagctattcaggaggctgaggcaggcgaatcgcttgaacctgggaggcagatgttgcagggagccaagatcgtgccactgcactccagcctaggcaacaaaagtgaaactctgtctcaaaaaaaaaaaaaaaaaaagcattttcttgcaagtaacaggaaatttgacttatttgactttagagcattttaaataaataggggtttattttcctcagataacaagaagtctgaagtaggcaatccagggcaggtttagcaattccatgatgttgcagagacttgggctacttttctttgctacaccattttttgagctggtttgtcctctcagggttcatcacagctgccccaactgcagacacaaggtacattgtctcagcaagagtcacaggaaagggcaatggcagccacaactacccttttttttaaaatcaggaatatggaagcttgaccactgccagtggacttcccctctcatttcatgaaccagaactgggccacttggccaccttcctagctgcaagtgagcctgggaaagggaacttggtttaccggtctctgtggtgggaggaagaaaaggagagggcttggcagtggcccaggggcagcaaatctaaggccctaccacaaatctgagaacagaagaccaaacttcaaagcccctgtgttctcattcattattgcttttttgccagacatccagcatccaacttagtcaaggttccccagactgagggatctagcataagacctttctctgatcactggcatattgatggcttttgggtattcccagcagggagcagtttccatggcaagagtgtgcttgctctccctaaataactggaaaataaatggttttcccccaacctagtggcacctggacatctgtcctgcatacccagttcagggagtgagaagactttttactcttttatttttattgtctagctccaaaaaccattggcttgccacatcatgcttctgatttcaatctctttcacccctgatttccacaaatgggagacccaaagtcgtgcccaggaaggagagaaggccagcgtggggatgaggcactaaatccctggtcctagagggtgccccaacgtggctgcatgactggctgtcccttcccgtgggtgcccactccatctgccttcagaggtgctgttgtggtgagggctacagtgatgctccccatgttctgagactgggaatggtgggagtcacactctcatgcacatcttcagtgcagcctgccagttttccctccaggttgccttggctgtttcacccgctctggtgggtgctggtgcatagaggctgagagggctggttccagagttgcaggttcaaatcttgcttccagccactacctgggcaaataatttaacctctttgggtcttagtgtcatcacctgttaaacaagggtaacaatagtaactttctgccagagtttttgtcaggattaaatgtgcttaggacagagctccacatgtactaacttagcaagtgtgagccactcttcttaccatcccagccacattcactactactccagtcttgacttgggtgtctgcagagcctgcttagctttcaagtttagggtctttggattttggaaccattgtggggctactgcttaaagtaaacattttgtacttttatttttttctaaatgaatgtaaagagctaatcaaatgttaaaatagtaagctttgcttaaagttatagttcaaattcagattcaaatttggctaaaacttaccgtgtaactgtgccaagcaaactttgtactaaatacgtctatattttctttctcccccttataaattcaaaacactagagtgctggcaatctgctgtaaatgtctttataaaataaaaagagtggagggaggtgttttatgaagctggagtaaaaacatatataatttagaagacagtgtgggattgtggaagaccatgggctttagttcagttaggcctgagcatgtgtgctgtgttaacctttttaagcttcatttgtaatatggggatgttaacattcttctcatagagtgattcttctcatctcacattctgctcagatgtttaagaaaagcaatggaaaggtttgtaacaagctactttgacgtggtagagcttcaacagctattacactctttcctgttttgatcagatttcagccatgatagaatcctatgttttgtatattggtgctggaagccctaataaaatcaatgagtgacacagacacttcatacaagatgctaattttctctttcttttttaacaggcaactggatatggccaagaggggaagtttagtggacccctgaaacccatgacattttctatttatgaaggccaagaaccgagtcaaattatattccaggtaaaagctacccttgatcactgtcctcttgattttgtatgctctcttggtggacttttacttccttatctattgtatagcaggaaataaaataaaggcatggcattctcattatcaagaatgatttcagaagctaagttaaacagagagatgagtggcctcagtatcataagaattgtacctgacattctatttggacttcctcaatcatctctggggcgagtgctcccagccctctgcagggagcttggtggctgcaggctctgcctctcccctagagtagaaagggaacctgtctctggagaggggaatgaccatccaccctcgaggctgtctgatcaatgagcttgctgcttcaagtactggaagatacggcttctctggagtcagtgctagaatgagctttctggccagaggactgccttttccttaccaccttctctgagcccccatgtgggccattgtcaaggtgcactgggaggtggacgttttatttagttagataaccatgaacagtatcagatggaggggcagtctgcaggtgggaataagggaagggacctaagtcccatcttaagtgctattaaagacacagaaataatcctggaaatgtagtggagaaggggaaaacactactgtatttaccagacatcccctgagaaagtcacttggccctgaagtgattggaggatgctgatgagccttcttgggggtgcccgtgacccctccccgtcccctgaaccagggaagtggcagaggttgctgagctacctaccttctaaggcaagtgccttccattaactgccaaaaatttacagacggccctctgtatctgtgggttcatgcatcagcaaattcaaccaacaaagaatcaaatatatttgggaaaaacaataaaaatgatacaaatttaaaaatacagtataataatcatttacatagcatttacatggtattaggtattataaataatctagagatggtttaatgtatatgggagaatgcgagtaggttccatgaccataatacaccactttatataagggccttcagtatctgtggattttggtatctgcgtgggtccaggaatgagcccccaccaatgccaagggacaactgtattgtgctggacagttcccctccacagaggagaggctgaaagctatctctcttcccctttctttcattggtaccagcttaaggcaaagggccccagagtaagagctggcaggggcatgcttgcatgtctatgcagcccggtgaggtagggtgttattaggggcctccacctctccagtcagggaagtcagggcctgaagaagcagtgaatgtgttgagagctggaggttgatgggaattaacttggtgaggaagggagggaagaaagcttagaagaggcccggcagggatggctgccctctgccaggagagggcaggagacataccaaggactagcagaaggccatgcaggtagggaggatggagccaggaggagcaggtgggagaggaggccacagagacagggaggaccctgactcctaaggatcttgagtttttctcaaaagcaatggatctgaatcaagactccattgagaaaaggtcactctggctacaaactaaaggaggaaagagaggattcagggaactggctaggggactctggcaggggctcacacagagttgaattacttactttttctcacagactttcttttattaaccatgtacggagtgactactatatataccagctgctctgctgggtactggggatatgggatgaccccgactccatccctgctccggtgagcttaccagctagtaagagaaaactaacaaggaaacagacacatgcactgaagcttctcatgggaggctggtgggatgtggagggggcagagggtaaactaagaaagagtgactgatttttatttgtttatgtttatttttaattgacaaaattgcacatattgtgtacaatgtgttttgaagtatagagagaaatgactaaatgaagctaattaacatatgcattatctcacttatctcttttttgtggtgagaacacttaaaatctaagaatgatcaatttcaaataaagatggtagtgagcgaacagaagaggtttcattgactcctaaactgagtactcaaaaacgagcaggtgctcacagtcaggaagcaggtgctgagtacaggatgggaaaaagcatgggggtgtgcacttgtcaagaaaatgacagctggcatgtgggccagagtatagagtgggagacaggatgcagtcaaaggtctgcatgcctgcggaggtcagcacgggctggactagcccttcgtcctatagcaggctgcagggtgctgctggagggtttcaacaaggaaaaccgtaactagatttgtgctgtagaagcttactgtgtgatcactcagagcatgagctgcaagggagcgagcctagacgttaaaaggattttagaaaactgttttcaatagttcaacgggaagtgagggaggcctggtttgagtaactatagaggtctgaatgttggtgtccccacaaagttcatatgttgaagcctaatctccaatgtaataatatcaagagttagggtctttggtgggtgattagatcatgagggctctacctctatgaataggattagtgcccttataaaagacgcttgggggtgcctgtttgcctcttctgccatgtaaggacacatgaaaggtgcagtctgtgaggagtgggccctcaccagacactgaatctgctggttggatttctcagccttcagaactatgagcgataaacttctgttgtttatgtttctgaatgagcacaggggatgagggaacagaaagaaggacaactcttaggtctctggcttgcttgactgggtagttagtggtgtcactgagtgagagagagagagagagtacagcaaaagatttagagaaaagtgaatgagttttaggcttattgattttaaggttatctgtggggcagccaggtggagaggtctcagacagtgttaatatgggtcaggagatacagattggggagacttccttatataggtgccaatagagtgcttggatatgacatagatacctgtctgtggtgagttatctcaactgctcttaggggctagctgagtgataaatgaagccatatggaaaaaagaaaaacaacagccaaacaacaacaacaaaaaacagatatgagaaaaaaacccaactgcacaaatatgaaatcaaacgctttctcatacttgtctttagtatttgggacaagagggagtagtggggactgtggcaaactgaaagtaagtcaaaaggggataggcttaatttagctccagacgattttcacgagttagaatttgggtactactctactagattttataattttcctagaaaaggcataaaatgttatatttatataaaattcactgatgtaaaaaaattggcatagtttttttttaattacaagctaaataaaacatatttgtgaaacaaagtttgtggctacttctgagatttctgtatgaaaagacccaaggtcaaaatagagtaggtgttctgtgagtacaggtccacactccattgaagacaatcaggattgtacatagatgcaatcttcaacttacaagctttacaacggacaaacatccagacctagaaactgttcagtaggatcattccagagtctctggggatcctagccagtaaaagtcatgccttgggctgctccacttttctttttttgttttgttttagtttttctgttagtcatgctgcaaagttatcccttcttagcaggaaatgatagcctggttatcatggttgaatgtttcttctttacaggggtgtgtgtgtgtgtgtgtgtgtgtgtgtgtgtgtgtgtattggggtagggtgtggggttgggatgacagagtagtgagaggaagatgaaggggattttctttttagaatcacagaagcttcatgctagaaaacacactggggagttttggtacaaccgcttgttttaaaaatggggaaactgaggcttaagttagttaatggcagagccaacaatagaacacaggtctcctgacttctagtcaagcacattttgctctctccatctttgtacgtggaaagaatgcagcaaacccagccttggtaagatgtgctcggagctctttgcttcagtggtggggaggaggtaggtgtacagatcctctcatccagcacctggacctacagaggcatgaagaacactcattgccccatgaggttggttcttgggtttttaatatgtcctcaaaaataaaatgaactgaaccaccatacacttctttcattgtggattttcaactagtgccagctctgtactcaccaggggcttccatatcatcagacagtgtgatataaatctgagagaggtctttttttttctcattttaaataagatgtaaccctaaaaattcatgcctctaaaattcagtagtttttagtatctaaaaagacgtgcaaatatcactgctatctaattacagaacatttccatcagcctccagagaaatcctatgcctattaatagtcactctccagcctccactcccctcagccttgggcaaccactaatctactcttgatctctatagatttgcctgttctagacatttcatgtaaatggaatcatacaacatatggccttttatgtatgacttcttttatgtaccatagtattttaaacattcatccatgttggtaacatgtaccagaactccattcctttttatgactgagtgatattccatcatctggatatatcacattttggatatccatgtgtcaattgatggacattttttttcatttatggctataatgaataatgctgctatggctattcatgtacaactttttatgaggacatgtttttgattctcttggacacacacacacacaaacacacacacacactcagtagcaggactgctgggtcaaagttaattctgtttaaacttttgagaaaccacaaactgttctccaaagcagctgaaccattttacattttcaccagtaatgtatgagttccaatttctccatatccttagcacttgttattatctgtcttttttttttttttaattatagctatcctagtggttgtgaagtggtatttctttgtggttttggtttatatttccctaatgactgatgttgagtattttttcatggggcaattgactatttatatatcttcttgggagagatgtctattcaaatcctttgcctacttttaatcaggttatttgtctttttattgttgtaagaattatttacatattccgtatacaagttctctcccttatcagatatgatttgcagcaagtattttctcacattctataagttatcttttcactttcttggtggtgtcctttggagcacaaatgctttgaatttcgatgaagtccaatttatattgttattgttatttgtacttttgatgtcatatctaagaaaccatttcctcattcggggtcataaagatttatgtctatgctttcttctcagagttttatagttttagtttttctatttaggtctttgatccattttgagttagttttgtgtatggtatggggtaagggtccaacttcattcttttgcatgtggatatccagttgttctagcaccatttattgaaaacaccattctttcccccactgaatttagcatcctcatcagaaatcaattgaattgtttctggcctcccactatgattccattgatctatatatgtttatgccagtactgcattatctggaactacacctttgtagtaaattttgaaattagagaacgttaagtcttcctactttgttgttggctattctgagtcccctgtagttccatatgaattttaggatcagcctggaaattctacaaacaaggcagctgtaattttgatagggattgtattgaatcagtagataaacttgggaagtattgccatcttaatagcattagatttttaaatctgtaaacactaggtgtctttccatttatttagaacttgtttaatttctttcaacagtgttttgtagtttccattttataagcttcatatttctttgcttaagtttattctgagatatgttattctttttgttgtggttgtaaatggaattttaaaaatatcatttttgggttgctatttgctaatggttagaaagattgatttttgtttattgatcttttatcctgaaaccttataatacttgtttattagctgtaatagtttttttaggttccttagaattttccctatataaaatcatggcaactgtgaatagtgatagttttatttttttatttccaatctttatgccttttatttcttgttcttgcctaattccccttgctagaatctctagtacaatgttaaatagaagtggcaagattgagtatccttgtcttgtttctgatcttatggagaaagctttcagtctttcaccattaagtacaatgttagctgtggggcttacttcggtgtccttattaggctgagaagtcaccttctattcctggtgtgttgagtgtttttatcatgaaaggatgacggattttgtcaaatgatttgctgcctctattgaaatatgtggtttttatccttgattctatcaatatgggatactaccttaattgaccttcatagattgaaccagctttgtattctggtataatttccacttggtaatggtatataatacttttcatatgttgctggattcagtttgctagtatttcattggaaaattttgtgcctatattcaaaagagacattagtctgaagttttcttgcattgacttttttctggtttgggtatcaggatattggcctcatagaatgaattgaataagtgttccttactcttctagttttggaagaatttctgaaggtttgatgttaattcttctttacatgttaggtacaattcactagtgaagccatctggttctgggcttttttgtgtgtggaaattttttgattactaatacaatcccttgttatagttctattcagattttctatgtgttcttgaatcagttttagtagtttttgtctgtctagaaatttgtccatttgatctaggttgtctaatttgtgggaaaacaattgttcacaatattctctttaatactttttgtttctataaggttggtagtagtcctcttatattcctgattctagttatttgaatcttacctcatttttcttgatcagtccagccaaaagtttgtcacttttgtggatcttttcaaataatcaactctggttttgttgacttttctcctgtgctcttatattctccatttcattaatttccactctgatctttgttattttcttctgcttgctttgctattcttctttttcttgtttttcttttcttttttttttctaagtagaagattaggttctttgggatatttcatctttgtaaagtatgaacatttacagtgatagattttcctctaagtactgctttatctgcatcccataagatttggcatgctgtgtttcattttcatttacatcaaagtattttctaatttcccttgatttcttctttgacctttggtttttagagtatattgttattttacatattagtgattttcccaaatttccttatattgtttttaattgtattcaattgtcaaatactttgtataacttcaatccctttaaatttattgagactcgcttatggtctaacatataacctctcctggagaatgttccatgtgactggcttttgttggatggagtgttgggtgtttgttagcttctaattggtttatagtattgttcaagtcttctgtttccttattgattttctattctattatttaaagtaaagtcttgaaatcgtcaattattactgttgaattatttaatttcctttccattctgtcagcttttctttcatgtgttttgaggtccattgttaggtgcatatatgtttataattgctatggtttcttgatggattgacccttatatcattatagaatatcccattttgtctctgaaaattttgttttaaagtctgttttgtctgatagtagtataggttaattttatcctcattttgaaggatagttttgtaggatttacagttcttacttggccactctttttctttcagcactttgtttttttttttttttttggtttgtttgtttgtttgtttgcttgtttttgttcgagacggagtctcactctgggaatctcactctgtcctccaggctggaatgcagtggcacaatctcagctcactgcaagctccgccttctgggttcacgctattctcctgcctcagcctcccaagtagctgggactacagatgcccaccaccatgcccggctaattttttgtgtttttagtagagatggggtttcaccgtgttagccaggaaggtctcgatctcctaatctcgtgactgcccacctcagcctcccaaagtgctgggattacaggcatgagccactgcacccggcctcttttagcactttgaatgtgtcattccactgccttctgatctccatggaaaattagctgttaattttattgaggatcctttacatgtgatgagtctatgcacttttaagattctctatctttcaaatgtttatgatgtgactaaatttggatttctttgagtttattctatttggagttcatagtgattgttggatatatagattcatgtttttcttaaatttgtgaagttttgggtcattctgtcttcaaataatcttttttccccctttttcctttccttctggaacttttattatgtatgtgtttttctgcttgatggtgtttcactggtctctgggaatctattcatttttgttcattttttttctttcagtaatctctattaatctattttcaagttcacaaattctttcttttgctagctcaaatctgcttttgaacaccctcttatgaatttttcctttcagttatcatccttgtcaactgtagaatttctattttaaaaatttctatttttaatcaatattctatatctgatgaggcattgttttcaaactttaattctttagagatgatttcctttagtttttgaatctatctaaaatagatttttaaaaatctttagtaaatccaacatctgggcttcctcagggacagtttctattgactttttaatatttttgtacatttcataatttgttgaaaaccaaacattttaaataatgtgatgtggcaactctagaaatcatatatctttcttttcctggagttggttgttgatgctgtttgtttgcttagtgactttccataatgaattctgtaaagtctgtattctttgtcatgtctggccactgaagtctgctcagtcagcttagtgttcagctaatgactagatagagagttccttaaatgccttaagccagtaagtctcctggtgtttaccaaggggcactgtgtgcatgttgggacacaaccttcaactatgtggcaggcagtttacaactctgccttcgccttcactttctgcttatgcagagcctccaagtcagccagaggtgagggattagggccttctcaggtctttcccaggcatgcacacagccctgctcatgatagtggccttgtagattgccaggaatatattagagattttcaaagccccttatggacatctcatttcccagctttcccttttaagtgttttggtcagctgcttctttgcttcaactgttatcacagcctcaggcagctgcaatgttgaacaattgctaatggttgttttcaacaaatgccccaggggaaaaattgtgtgtggtgtatgaattctgagtccggtcaaatgaagataagtgttgtaagtagatgttcccagggaaatgccaacaggatagataatgatagttctctggtgatggagcttttgggaagctacaaacgcttctcaccctctccatggtactgtggtgtgaggctgttgctttcaaggctacttcagatcttaggaaaggaccatgggattagggtgcattaaaacaccacaaaccttagtttttttttttttttttaataaacattccttggattttgcaagcatctggttaatttcccatattcttaaaaagatgatatttacaatttttgccagtgttctcattgcttttatggaggagcagttttctgtaggcccttactccacctttctcactgatgtccaggtctttttctgaaaacacaaaatagcaacatgttcatttattatataaacaatataatatcaacaagcaaacatgcacaaaaactttttaacttacaatcttacccatttaacacatcaactcttcttatattttaaattccatttcttacctactgacatgaattcttttggtaccataacagtctagatttactctcaaatttacttctgttactttacatcattgtttcttatgtttcttcataatttgtagaatgaacattttaatgattaatattctgtcaagttcatgtgccataataatttcactgtcctttttttttgaccatttaggagttttcaatcttactggtattataaataaagttactttcactataagcatgtacttgtttgaagaaatatttccttagggtaaattatgtatagtaatgtttgctatcaaagggtacaaacattttatgcctcaagttatttccaaaaggattataggaatttatatttccatcaacaatgtttctttatatccatactaactttgatattgcttttaatttaataaaaatatataaaagtatactaaaacttaaggttgaacagcttttatgttttcttagttttatgtgaattttctgttgctgtggtcttaaaagtgatatagccatatctatgaatatggtggtcggtattttctccacttctgaaaaagtaatagattatcatatagcatttgcattaagttaaagccacttataaattcttttccttaacattaacgtgtctattaatctttgtcacaatttttagaagtgctaaatgacatattttatcctagagagaaagctacccttttaatgcttcttagaagctagtaatgtcatagatttcagatattaccaaaaagtctcttttaaccccagctataatttaaagcatcaatgacttttgtcaatgtattgaataatagtatacagtctcttgaggaaaatgtatgttaaatgttacacagttattgtgcaaacaaacttttagaaggtaccactttaaaagttgaggatttcttatttagtaattgaaccaatgaaaattttacctgaaattggtgactttctacaaattccacaacattgttttttcccttacaacttaatctgttttttgctttttccccagtttaaggccaatcctcctgctgtgacttttgaactaactggggagacagacaacatatttgtgatagaacgggagggacttctgtattacaacagagccttggacagggaaacaagatctactcacaatctccaggtaaattgataccagctgaagggatctaactccaacctctctgagcaccctttgttctggaagtatggctggcaccttccttccttgcacagaatccagttacagctttccttacattaatgggacgctttgcaatcctcacatgtccatttcttaccaactacagaggggtgtggcaaacatatccttttccttaggctttttaaccaacgtaaccccacttacattgccaggaccctctgatggcattacttatccaagtaagaccatgcttaggtacttggatcaaaagtcagcacatctctgatacttcaatggtatctgcctgtggctgttgcattggcttgggacccatgaagaaggctgtatcggtgctgggatggagctcctttgggcgttggaagaagcagagggaaccagtagccaggagctgactaaaaagacccgtctccctctctttctcctttagttttcaccgttggtatctgaatacctaggaaagtcagagagcctactatggaaaaaagagtgagataaaagctttctgtctggtacttctgctgcaggccttgcaggctgaccgccataatggctctggaagagaacacaacactttcatattctcaggggtcacagtgctcttgtttcatggacttcagccatccagaacagatgcatgttcagtgtccagaacaccctgctgatagaaagtcaccatcatgattagccaggcttaactgatacaatccctgttttagcatttcccaatttggccttttgtgagttctttctctcctacagtcaccaggccattggttctttgagttctaatttccttcaagtgatttttgggcatgtgacatgaagttcagtctcaccaacatggtttccttttcctcaacatcaggttgcagccctggacgctaatggaattatagtggagggtccagtccctatcaccataaaagtgaaggacatcaacgacaatcgacccacgtttctccagtcaaagtacgaaggctcagtaaggcagaactctcgcccaggtaacaggcaggggccagagatatttatggaaagatggaagggtgtcaggtggaaggggcagacttgtgtggctaatagctgcagctgtcactcaataagcactatcttacctacatttcacactgatttgggagttgtttcactatctctattgctccagagcatggtctctcaatgcagcactatgtattgacatcttgggtctgataattctttttttggtcagaggctattctgtgccttgtaggatgattggcagcatccccctgacctctatccactatgtgcccccctgccaagttgtggcaataaaaatgtctccaggcattgccaaatatcctctggtgggtggagggcacaaaatcccagtactttgggaggctgaggtgggaggatcacttcagccaggagtttgagaacagcctgggagtttgagaccagcctgggcaacaaagtgagatcctgtctctacaaaaaataatagtttgccaggtgtggtggtgcatgcctgtagtcctagctacttgggaggctgaggtggcacaatcacttggtcccaggagattgaggctgcagtaagttgtgatcacactattgcactcggtctgggcaacagagtgagattctgtctcaaaaattacccccagttgaaaaacgcttttctagggtgatctctaagatacctcagagctctagaacactctagaaaggtaagcttactcccctgtatcttcttaggaacctccattgatattgtcactggtggtttccagctcttttcttctcttacatcccatctgtggctcagcccttctctatgctgcattgaccttctacctttcacttccacaaaagcccttcattaagcccttcattaaggccttcattaaggcgtgagtgtgtccagcaggcacctaggaaggagcatcacctcctaacagttgcacacaacataaatgaatattagacttcagagttcttagaaatatggtttatctattaacatttactgtattagaaattttaaagatattcatttaaaataatactaatcaagacttggggccatttgcatcatcccaccatcaagcttcttccttctctttcttcaatgcctgcctccgagaattccaggaaaaaattcacttcagtttattatgtggagtgatgtccctgtccctgaagctgcataccaaagactcacacagactctgctaaatgtgtaggctccaggccgtaccttttctctcttcactaatagaatctgctagagaaatggctctcaaactttttggtttcaggacttgtatattctcttaaaatttactgaggactccagagaacttttagacaggtgggttatatccagtggtgtcctggtaaaggcttaacagctatttttctagggggacaaagctctgatttgtagaattttctagtttccatgttgcaaatactcctaccatggcctatttcaagtgaccattggtattaataattgacacacaaaatttctgaaaattcaacaactgagtctcatgagctgtctctagtacatcactggttatatctatcaacatttactatattagaaattttaaaaaattattaattcattaaaaataacactaatcaacatgttttaatgaaaaataattgattttaaagacaaaaatagtaagaaaaatggcattgtgttaatctttgcaaatctctttaatgtctggattaatagaaaacgcttggattctcatgtctgtttctacattcattctcttgccatgtgctagtttggttgaaatatatgaaggaaaattagcctcacacagatatgcagttggacaagagaggaatattttaatagtattttcagataactggacattctttagtactatacccaaactcaataaattgtggtttcttaaagattagttgcaaagtgaaatcaaaattaataccatattttccattcttttacactacaattcattaaattatcttgtactttaaatggatcttttacagaaacatgacctttagctttacagagcacttgaacagtttcagggacccttagaggttcttggaccagaccttgagaaaccttattttagggaaggggggagtgggataaatatttatttccccactggtgtgaattgtcatacctttccctattatatctccactttttagatggaaaaagtagctatggttggtttgggtttcaattaatatctttttttttttttttctgggtacgtcttgttaaacaggaaagcccttcttgtatgtcaatgccacagacctggatgatccggccactcccaatggccagctttattaccagattgtcatccagcttcccatgatcaacaatgtcatgtactttcagatcaacaacaaaacgggagccatctctcttacccgagagggtaagttcaggggtgccctggtaggactgtctcgatcagaaaaagggagtttggtctgtctcttccagagacacttcctattcccttctcccctacttctcacaggatctcaggaattgaatcctgctaagaatccttcctataatctggtgatctcagtgaaggacatgggaggccagagtgagaattccttcagtgataccacatctgtggatatcatagtgacagagaatatttggaaagcaccaaaacctgtggagatggtggaaaactcaactgatcctcaccccatcaaaatcactcaggtagtacccaagcccaagtaacactgagagccaactagataaatggcttcactttgtagagacccaccctcacagtcttcactgatacacttattagatacctttttcatagcatgattataaagcaaattatatagcctctggccccgagtcactggacttgaccatgcatcatgggcaggcaacttggatgcagatattatgttaggccgtttttgtattgctataaagaaatacctgaggtggggaatttgtaaagaaaagtttaattggtgcatcgttttgcaggctgttcaagcgtggctccagcatctgcttctgttgagggccttgggaaaattacgatcatggcagaaggcaaagggggagcaggagcatcatatgacgacaatgggagcaagagagttaggtgggaggtgccacacacatttaagcaccaggtctcatgtgaactcagagtgagaactcacttaccaccaagggcgtggtgctcagccattcacgagggatctgcccccatgatcccacctcccactgggcctcacctccaatactgaggattacgtttcaacatgagatttggaggggacaaacatccaaacgacatcagatatatacttttgctttcagagagaacttcactcaccctcaccttaaaagtagacagcagtgatgtttgttgttccctgttagcagtgtgggatatggcagccctgcagtgggtcatttatggtgcactatgtatggacatggtttgatttgggggttgcaaatagatttgaaaggctgctgcttcttattgtggaaaaaatcttgacccaatagacttgcccatcttaggctgagggacggagataggactggctaggggtaaaaggatcatagtagggaacctttccccttggaaactccctcacccctggcactctatctcctgtgtgtgcctctcccctccgttcagatgctcctacttccccacctctgtggcatgtgctcttaccctgggccccctcctaccttagctcctagaaattcactctggactccacccagatttgatattttctggaagcccaggaaattcctccacatgaaagctgtgggttagtgggagatccctggatttggaagcagatgaacaaaatcatattcctgttccatcacttgaatgactgatcataaacaagtcatttaactattctgagccccaatgtctcatcaataaaatagggataatacttcagtgttttgtgaagattaactgagacagtatctgtaaaagtagataaaaatattagatataaaaggtattattatgaagaagtactagtctgtagttcccctaatttttttttaatgctactattgttaaggggccctggaatggcctattccatcatatttattgggatgggcccagggacatttatttattgaatgttgaattaatgaacttcaacttcaggagggaaaaaaaaggaagaacagcaggaagaattctgatttcccagttagaaagaaagcatgtcagcactcattaccatgagaatttctgattgggggcctagactaaagtcttcatagctattattcaggttactcccaaagggattggtaaatgctgcaaagaactcatgcttagttgccttggggctgccaagggaaaattctagagtgcctacccaattttcaggtctggaaaaaatgctctgggtgttctgaaacccaaaaggagagagggagaaagagagagggggagagggggaaggaggagcgggagaaggggagggaggagggggaggagggggaggggggaggggggagggggagatgggaagaggaactcagactgaatttttagaacacaagaggagcccactttagaaccaagaaggtagtctgcagggacaatgggtgatgcttaaataattagcaagggacaaagttgctgctgtgatatcttcccaggctgctctgagaatagtttactgtggaaatttcaactagcagtaggaccttgggcaagtcgcttaaattttttgtgccctagtttcttcattataaaatagagataacagtagtctgtacgtcagaggactgtttggagattaaatgagatataacacataaatatgtttagaattgtgtctggcatgtggcaaactcagtaaacattattaatatatcagaccaggctctgtctatatagcaagtagactggtcttacttgtgtttattttttatttttgccaggttgtttacaaacaaccctaggagttggcagttattctcatccctgaagtctctgaggctaaatatttaggaaaggaatgtccttatttttgtatcatttgtcttacttaatggcatggagaagacttcagagtggcccctattgcccctgttcatcttcattggtgagtattagatgctcaccatacattgtggcttagtcctcagacactgccagccacaaagtacattttgtttcttaaatggatggttcgtggatagaaagctttcacagtcagacttccaaaagaaagcagcccagaaaccctgtagagggtttgtgaagaattgctttagagaagaaacatttcctggtgtgcttttttcgagcaatataacttggtggggggaaacaggcttattttaggttaaaagtgaaaaacgtaattcagttgttacaagaaaccacaaacatacaaggttgtcagagatttcaaattgagaactagaaaattatttcctttccagttctctcagtccaaatacagctttcctcacaactgactttgggccctgtaggtgcggtggaatgatcccggtgcacaatattccttagttgacaaagagaagctgccaagattcccattttcaattgaccaggaaggagatatttacgtgactcagcccttggaccgagaagaaaaggatgcagtgagtaaaagagaagagtttcacaggcgacaagacaaagtcctatgcccatctacagttgagagcaaaatggattttactttaaagaaaaaaaaaacacacatttcagactccagcatattattggttttcaaagacatgataattttcacataattctgacccatctcagtttttaaaattttccaattctaagtgaattaaaaataagggagtaaatgacatagaaatgaaacaacgattttctctgcttttgacagagggtggtgggtgagtcttgccttaactctgactttcctgttgtagtatgttttttatgcagttgcaaaggatgagtacggaaaaccactttcatatccgctggaaattcatgtaaaagttaaagatattaatgataatccacctacatgtccgtcaccagtaaccgtatttgaggtccaggagaatgaacgactgggtaagaaatgagagctgcctaatgctgtgtaactgccctccatttctctcctctgctgggtaaaaggtgagcaggagaccttactgggagtcagtaatccatgtcttccacagcatagaggttgactgtaccttgggagtcacgtaaggaccgtatttgggatcaaacagtatctggatagtattcttaaattggggcttttatagctaccattaccgctactaccattatcactatcattatcaaccttactactatcattagtatcacagccacctacactagtatcttatatacatgtatatagggatatctcatttgcaggatttccccatacgttatttgacttctaataatctcattaaagagataatctcatcacatttgccaaagaatttaaacatttacacccaaagtcagacagacaccctgcaataagtaagcaacaccaatggaagttgacttttgacccttgggcccccctttccaagaagctgataatataattcaagaggctgctagatgaagtcaaatcccatctatttttatcatttttgctttgtcttgctatgttttcttttactgtgtcctgtgatagctttttagtttttgtataggaacaactactataagaacattataatttctgggagttttatggcttctctgggtttgggacaatgcttgtctgtttcccccttggcagtgagccccttgactgagcagactggcatttcttgaactgttttgttctgttgtgctgtgtacctttcagaggcttccaagtgtagcagcctcacgactatcatttctagagcttcactgcccttgtggagagatcctcctgtgctttgtggatgggctcacattttcttttcgtccctccattcctcaccagacacacctctgacagagtgggtgccttcccggaggcttggtgggcgctgctggagcggcttgctcacactgctcattatttttcttcttgctatcaggtgtcgtgtgggctgccttttgtcagtgtgttctgtgtcactgtgttctgtgcaggtcctctctgtttcatttttctcaactcttgccacaacaggaagagttaatgccagcttgaaggacttcagttcgttataaggaagaatcttctcacagtcacagtagtgtaacagtagccaacaaacacgtgtgccatcaccttcttgggaaatctgggatggtctgtgacactgaataaaggtggaaaatctttgacaactttcttgacccggacatgacacttcaagcctcttttacattgggccaatcatatagtctatttgttacctatttctgcaaaacagattgctctaaatcttggcagcttgaaacaacaagcatgtatcatgtcacagtttctgtgagtctggaatctgggtgaagttcagctggatacctctaattcagagagttctgagagagagggaaagagtacggcagagcaggaaaggacaggcatcagtctttctatgacctaatcttggaagcgatcccatcacttttgccattagaaacaagttgctaggtccagcctgcactcaacaggatggggttctgaaaaagcacaaatatcaggagatgggggttgctggaagctcttttcgaggcgcctacctcatctgggaagaggatagtgctggttttctgagactgaagaagtcattgttggtagaataaattttgaaggggctcagcttgctatttgcctctctaaaggtgagaatttattttgtaaaaatatttcagagtctttagtggaccaagaattcttataaatcaactgagcatattctatatatgtaagcttaaaagggtacaagacaatgctcctgccttgtggggacttactgtctagcttagctgataggacatgagtaggtggaaatattcacaaataaaaccttgataaaatactgaattaggccaggtgcagtggctcatgcctgtaatcccacccagcactttgggaggccaagatgagcagatcacttgaggccaggagttcgagaccagcctggccaacatggcgaaaccctgtctctactaaaaaaaaaaaaaaaaactgcaaaaattacccaggtgtggtggtgcatgcctgtaatctcacctacttgagaggcttgtagagattgcagtgagctgagatcatgacactgtgctccagcccagacaacagagtgagactccatctcacacacacacacaaatatatatatatatatatatatatatatatatatatatatatatatatatatatatatattccccagtgtatttacattctcctgtttggtatcttgtggaactcgtgtccccaagtcttagcaacactaacatttattcttgaatcccacttgccaccaagtcttatgtattcatacagaaaatttagactctcataaaaaccccacctccctaaatatttctgcatatttctaagagatgctacgtatactcctgtatcagtttgagctccacttgttccaggcctcagtcactcagagacatggttttcctttcacttccgactgatccacaaggtcctctgctcccagcgaggggtgtcctctgatgccagcagtcctcatggtgcctctggcagcatggaggtttcctgtgagtgagaggaggacagtgtcctcagtttcttgctcacttgctgaggggatagggctatagcagggctgctgagacaccaaaggaccacagaatttagtaagacactctttcatcccagcacacagatacttttcttgcaagggcatatgcatgccatatgcactagaaacatattctcttctgtcctattcattccgatggtccctgcatgcagcccatgaggcacatctgcatgtgtccagctctactgtagacatacataggtactttctttttcctcccccaacccaaaaccaaaaaacctctaaatttccatatgcgtcagtggatgcaaactgtgtcagctgatgggggagggggtgtaactccacaaatgggatgaattcaagtttgagctcctacgtgggattcttgctacatataaagagacctacaattcccacctcccagagtaggatggtctggaacctgtcagaacttgcccagagctgggtgcagaaccgagtcatagccactggtttgtagaactccctggactgaaaccctcacaggaataaaatacttaggaccacaaactacagcaaggtggagaggatcctgcctggtccctgccctgtgttatctttggagtagagtcagtttctgcaattgttccatgaagttgcttagatgcaatctagggttggcttctctttgtttagtgataccatttgccatgtgtattagcgtcctagggctacagcaacaaatcaccaccaatttggtgacttaaaacaacagaaatcttttctctcctagacctggaggctggaagtctgaaatcaaggtgcttgcagggcagcgttccctccagagtctcaaggggagaatctttccttgcctcttccggcttctgttggcatctggtgttccctggctacttgtggcagcctatctccaacttctggcttcctcctccagatcatttcctcctctgtgtgcatctctgtgtttcccttcttataggggcacctgtcactgaatttagggctgcctctaaatccaggatgatttcatctccagagccttaactagtgacatctgtgaaggtcttatttgcaaatgagtcccatgctcaggttctggtagacatgaagttttgggagggagtactaggtgttatgggctgaatgtgtccccgtgccccccaaattatatgttgaggttgtaaccctctgttctaggctacatcttccccctcccccagattcatagggtgaagttctaacccctagtacctcggaatgtgactatatttggagataaggttttaaaagaggtaatgaaagtaaaatgtccttacagtgggccctaatccagtatgactggtatccttataagaggaaatgtggacatagggaggttcagaaggaaggtgctgtgaaggcaccggaaggaaaagacagccactcacaagcccaggagaagcctcggaagaaaccaaccccagcaacaccttgattgcagacttctggcctccagaactgtgaaaaaataagtctctgttgtttaatccatgatacttaatgacagccctggctgacaaatacactattcaacccattacatgataggatgagaagaaccaaaataactctaagagcatttgtctgctattcaaagttattcatggtgttttctaggaatgtgcttattttagtgaaactattttaatagattatgtggagcctgtaatggtgggttttccttctttccttcctcataggtaacagtatcgggacccttactgcacatgacagggatgaagaaaatactgccaacagttttctaaactacaggattgtggagcaaactcccaaacttcccatggatggactcttcctaatccaaacctatgctggaatgttacagttagctaaacagtccttgaagaagcaagatactcctcagtacaacttaacgatagaggtgtctgacaaaggttagtatcatatccaccgtcttgagtgcaaatcattgttttccttctagctatgagttattttcctgcgctaatgtctggtatgttatagaatgatgccatttaaacattctttgcttcctttgtgaaacacacataacacagagatagctggttgaacactgtaaaggccggagctgcagctcaggcaccattgttgtgttggtctgggtcctatgggaagcagatgccaaaaggagattaaatgtacgaggattttattggggggagcccgtgagaaaaaattgcggaagggcacaaagaaggctgggagagtcatcagacctaaatacaagcctgatgcctgacgctgggtgaaggggagatggagaaggaaggctggtgggaatgtcctagactaggacagtctgaggaaagcttggcacagctgtcggggagtctaaagggggctgtcagaggaattcattgtctttgaaaatgagctttacaattgctgcttttctcagtcactggctgtgtacagtccaggggagttgaggtctcagtgtgaatgtggtaatagattccagagcacagcagtggagctgttgtcaattaacaaccctgttgttggaggtctgccaggcacattctgcagaacataatcacaaacaggaaaatgaattgtatttcccaattcttgctttcagactgaaaggactctactgtaggaaagtggaggagaagagcatctttcggaaagttctatcttaccctaacagcttctagttggccgtttgacagtatcaggagacattcttccccatactccttatacaattgcagagcaagtggttcttaatctctattgggtcacaggaacctttgagaatctgataaaaactatgcattcttaatcaactgcacacattgttaaacaaatgtgcacagacacacaaaatacctggattcaaagacagactcatttcaagggcactcagactcctagaaggtcctttgagttaatgcgtactaatcttcgattaccatataattcagtaattgttctgctggcaggcacggatgacacaggtatggagaacaaacaagaaacgtttcacactgtgcttcatgtttctgtcctttacagggatattgagatactaggcagaagccaggtttagtagggccctaatgcggaatgtttgaaacccagtaatttgacaaatattaaggccctaatatttgtctagcattattgtaagagatagaacagatgtaagtataataaaccttccctattcatgacgagctaacaatttcacactatcaacagtccattctttcagcagttattctgcatttacctatttgaggcaccatgcaaggtactggggagacatagatgattctgtcctcaaggagcactcattctggtagaagagacggacatgtgagtcagtaaattgcaaggaactgcccaaggtagcccatgaaggaaataagtgactcagtggagggagagaacaggtactgctttctggaagaggtatttctgagctgggctttgaaggatgaatatgacaagttacaaaatcatgtaggacttatgggagagtgggaatccatgtggaaatacatgaggacctggagcaatttgaagatagagtttaaagtgggaatcagattacaaattgtttatttgcatgagtacgtctatagaaaatatggaccagattataaaatatattaaaatacatgtgtgtgttgatataactaaacattcaactgtgcactacagaaaactagagactaggctataattaacacagttttacataaaaccagggaaggccttttacccagaaaggcccactgctggtcaaacgaggtgtgtgcagagcagtgagccagtgggttctgggtctgggaccactccagtcttcagccattcttgttgtctacaaacgttctgaggaccagccttaacttcaatcaatatccacttggttgtaattggattgttaatagattctgtccctgggatcatgtccagtgcattgagcaccagctctagagttaaactacctgggaatattagtcaggatcccagcaggaagtggagactcccctcaaagagttgaaagaagggattgtttgcaaaggttgtgggcagggttaagggaaaccaacaggaggtgtgaagcacagtaagcagcattttctgccctaaaacctgaaggagccagggaggggagcatcccccaaaggagcaaggcctgtgcctgtcactagaagagggctgttggcaacgggggcgtgacacccccagctacactcttcctgtcctccctccagtctcttgccacgcctctcagtggcagaacccaactgttaccctcagggtgaggatgtacattgatgcagttcataaggtcagccccttgggctacagagcacagacagaggaatggatggtggctgcagagggcaaagggaacctctgggtttgaatcctggctccatcactagttagttgtgtgaccctggttaggttacctgaacttctctattccctggcttcctcatctgttaattaaatgggaatgacagtagcacctacaacatgaagttatcatgaagatgaatgagtaactcgggtaaacaatacagttgctgctatatagaggccgctaacaactgtattatgatgaaaacatctgttctgttattcacagtttacagataaattgagtgaggcacccaagctctcacatacatgctaagtggcagagccagagtccaaacagtgaattccaagcccagagtcttaaccattatacagtgcagtgcaccatggttagaacaacagcaacccaacaaagaacctgtcattttatctcttgttctctctcccccaggcatcctgtccccacctgcactccacacacatctggaatctagctgaagtggctgtgtgcctaggtcttggaattgtgaaacccatccctgaaagcctgggtgatttctccagggttccaggagctacctctgtccccaccttgcttcctgcaggctgggtagccagactcttgtgaacaggccaatggtggtagttcctcccttatttagatagaagagagcaggcccttggacctcaccatcatagtagtcagagcagatgtaggttggatgtgttcagagaaggagagacagccactgggatgctcacagaaggctttctggaaggacagttttgctctggactttgaagattacataagtttcactagtcagaaaaagactgcttcacaaaaggaagccatcctgctcaggaacaaaccttacctaactttacttaggaggacagcaggtggacggcaatgaaaaacctagaaaaatctctcttagatctgtctttagccaccctgccccacacttggtgaccacttgggtacaggtgggaaacagagagcccactctctgcacaaattgcatgtcaattgcaaaattgtggctatggctgtcacttcacttgccaagtattttcttgcagatttctgatattaatgcatggttttcagtgaaaatttctatgacatatgactttggttttcagatttcaagaccctttgttttgtgcaaatcaacgttattgatatcaatgatcagatccccatctttgaaaaatcagatgtgagtagttgtcattatttgttttttctttactttattcattttacttcaccctttcttctgggatagagacacagacagtagctaggaaaagtgccagacttaacaggtaaccttggtcagtgcacaaataacccagatgccatcttcagtggaactttttggggaacaataacatttactattacaggtgtctgggaacattcatttataaactcctgccaatagctcatttattccaagggctgcttaaaaacaacaaccacaatctttgtcaaattgaaaaaaggtgaatggcggcttacagtttgtcattatatatttttttgtgttaggacaataaatagatttactgctaggtctcaagcatttttagccaaaaatttaatatttggaatattggcgatttaatttgtaataattgggtaagagaaagggagaagaaaaaaattaatctctgacttaagccaaagaaaaatgtgcccaagacatttgagagaattagaactggacagaaagaaaaaagtcaatttagaacctcaagaaaaatgcaaattactgttttcttgtcatcgatagggcgttcagacttggtgatgactttatcattgtttccctaaggagggaagtctctattttgaaggagcaagaagcctatttgactagactgttatgttatttttgaagtcagttatgaggcagcccagagccctgtgatgatgttcataaatcaaaatagggacaagcctgcaacaaagaagggaattgatttatgagggggctaggggtgggaagaggtgtgagtggatatgtcttgtataacaggcactgaggttcagcaggcatcaaataacccatttcttctcagcctccattctcttgggcttttgatcctttcctaactttgtgacctcctcgccttttatcgagacagtgttttttagattgagggtaagaatcctgcacttgaggtctcagagcttaaatactaatctggctacagagagtgaacctgcttgtttcaatgctgtggtcctctcttctgagacctacttataaccttctttaggatcatgatgccaagagagataatctgggggattttcagtggagtgggagatggtctaggccagtgttcaagagcataggctttggagttgcacaaacatggctttgaatcccaatccctttgacccactagctgtgtgacccttggtgggttttacttctccaagcctttgctcctcgtaagtggagatggtaacataactactccgtaaggtgttttgttgattttctttattgagcacttactatgtgccaagaatttaggagctttacatgcattgtctcccttaacacccacagcaaacatgaagtaggttctattactattgtctccattggacagatgatgaaactgacacttaaagaagtgaagtaacttgcttcaagccactcaactaataagaagcaagcctacaattcatattcaggctgtttaactccaaagttcaagcttttaatcaacctctattcattggttgatttaagaattaattaaataatgtatataaagtgcctaccacctgatagatactcaatacatggtggctatttatatcattactactacaataattaagttattaaacaaattggatatgggagggggaatttgttttagaatcctaccagtagctctctgaggtattgcgttctttggtacaatggatatcagctcatgagtatgactgatgttaaaatcaactgcaatatattcatcaataggaaaaaacatgccccatgaagattgatgcaaactatgacttgtgtctattctgaaaccagagagataagtttgtcctttggctttgatgacagcagaccttctcattgtttccttctccattttctccttagtatggaaacctgactcttgctgaagacacaaacattgggtccaccatcttaaccatccaggccactgatgctgatgagccatttactgggagttctaaaattctgtatcatatcataaagggagacagtgagggacgcctgggggttgacacagatccccataccaacaccggatatgtcataattaaaaaggtaaatagcccatttatttaatagaatttgtctttgtttgtgggttaatttactaatgacagtgtgaagacctataagcagaggtgatgtattagcagccatctctcaggcatggtgatgggttcctggattcctggattcctcttagtcgttcctgtcttcctgacagacgggaagtcaggattctagacctggctctgttgctagctagccaagtaacttttgcagggaggtaacgtcatataaaatatataaaatgcaggatgaacaattttttagtataagtgtgttctatgcaatatttgggatgcacttatactaaaaacttgtttgtcatttatctgaacttcaaatcgaacttggtgttctatgtttttatttgctatttgctaaatctcgcaacactcttacggtctgggagtggcactcagggtctcgctttcacttccccctttgcaaatgtgaggagttgggttggatgaccccatgggccttttaggctgtaaaccctttattctaatgtgccaggcagagataccttttgaataatgcaactgctgggtctccttccaaggtttaatagacaagtgtctttttaatccccctctccgctgctttactttcaccttttactgtattgctaagcccacgggctctcattctgtctctccctctgtaaggactggataatctggagtcaaagtcttaattaccttggttcctgtctctttgtacaggattctcccaaccctccctcaatctactcctgtcccctgccatgtatacctgaatcttgactcttttctctgtggctgcctcatctgtgtttagagcatgtcatgggtttaccagatgactcaattggaagcagcactcaatgccgtccaatgtacttacagttaagatactttcctaggaaagagagtgaaacctcgctgttaaaaagggccagagagaatctgcaagggtggctaattgtttaaggtttgcagtgcagtgtgctggaagctgcaaaggaaagctctggagtacagttttgagccagaataaaagaaaactgaaagaggctaaaaatgaagacaaaatagaataatttcacagaaaatggacagaagcacagagaaaaaagcactagtgctgaagcaagccctaggacagagccttggaattgtgatcctactgttaccaaacattccagcttgaaccaagggccctgctgcatttcagcagagaggttgctgtggaccagctcaaagccttagccttgtgtgtgagtctgacatttggaaaaggtaccatgacaacctccccttgtgctcacagcagtctgcatggagagagaataccacagaaagaaaggataaaggaaagggcagttttcagagcttgcagtgggttggtgtgttcctttgcaggtgacgggggcagcttccttttatccttttgcaggaccagagctctctaggaatctaagggaagatagaggcccatccatcccagtatgaacaaggcccgtatgtcatatttttttgaacagcagtttaacttggccatttgtggttaatgggcccttttagggagatgttggcacctatctcaatgattagctgtgggtgagagctgtaagtatcctccctcacaacttgacacgagaggtatgctacagtagagtaggcctctgaccaaactctttgtcacatccttactttatatgtggttctatttcaagtgtctattatgtctcctggcatatattagaggttcaataaatattgcttgacttaatgaataaatgaattctgtcccatatacaattatgaacaagcagacacataagtgatcatcgaacctgtgctttaggcctgtgacatcccagctctctgtcccttgggcactgtgataactgtccttgagcaagtggatttgttcaaccatccagaggcaggtgataactggcagaacagaactgagccctggaactctgcagggtacaatctgctggccaggccagatatctatactcctgttcacaatgactaagggatacactatactcgtaaccaaacagcacatctttttttgagacagatgcagtgccgcagtcatagctcattgcagcctcaacctcttgggctagagcaatcctcccacctcagcctcctaagtagctgggaccacaggtgtgtgccaccacacccagctaattttttatttttgtagagatgggggtctccttatgttgcccaggctggtcttgaactcctgggctcaagtgatccacctgcctcagcctcccaaattgctgggatcacaggtgtttgagccactgtgcatggcccaaagtgcatatcttggacaccactcatatcaccaagaaaatttatttgtaagatcactttgctaattaacaaactttctagttctaattgagatagtgttggctgaaggactatcatagctacctctgggatatagatctcggattaggttctttcagatgctaagcaacaaccaaccctgggctgtggattcttgattaggacacaccaaatgttagccaattccccactaggatatagaataaaaatataacaaatgtatgtagccatactatttgttattgaagtgttttatagactatataatttggttttttatgtatggctttgtcttctaagtccttgcctattaagccatcaagggactaccactgttctgaaccactgtgttaataatttttaaaagtttaagtttgttaatcacaattatatcattaacagttcatctgaattacaaatgtgctaatcacaggtaaaattcactgagggactcatacgtggcaactatagtttgtttgcataaactctcttgcttctcccactgattctgagggaggcagaaattcaggcccacagcaaggtacagtcaggccttctggtgatggcagagccgggaacttgactccaggcctccacctcctctcaggaaataatttctgtgagtcctggtgttgccacttactagcttgtggccttgaccaaatgatgtaacctctcaggccccagttttccaatctgtaaaaatgggtaaaatggtagcacctttctagtaaggatgttgaagaattaaatgcaaaagtatgtgtatagttcctaacacagcatccagcagcttgcagacttaaacacgtggcatcacttgattctaattaattagagctaggattctacctgcggacaggtatgctttcccctgttgcctaagggggccaaacttgcctaattcaagagtcagatggtgcatactgaggactgcggcctcagcctctcaaggggaaagcctggaaatgagtaattttggcaagtgcccaaagcaatccttcagattaaacaactgtcagaaatgctccctgctctgtatttacttctgcccaagctccagcctctcgtgtgcttggttatcatgctcttggggccaaacgtgtgtcatgagcaggaaagctatttctttgagccctgcctggctcaacaataactctcctgagatcctgtttcttgaaattcagggttctgccttattttaacttgcaaattttgtcacttctctactatggctgatccttttgaattctcagttcactagctatttttaaccagaccaaatgtcatctggaaaactaatgtgcacactttgatatcatcagtgatcgctagtgaaaattgtaaatatcccagtctcaacccctctccttcagcattttctttgcctccaggttgaatctaaatctctaggtttgacctttcaggcggttttgtgcacaaaaggaatcgtggtatgagcaggttttttcagttaacttgaatatgtcttgccagatgggactgaggccattccaagaggcagtgacgggtctcttgacttggcctcacagtcatatccccaggtcatgaaacacaatgcacgtggccggacaaggcttgttcttggctcagctctgcttattaccatgtgctaatttagcatcttccgtttataatgatttctccagaagatttggtttgatgtttttccaggtgtggaagttatgcggatagaatcctcaatggcaggctgctgcttttcatttgttcttccatccagtgtttagggaacactgacactgccttctagctagtcttcccgccccagtgtggatcacctcgaatccatcccccatgtagctgctcctggagttatctttctaagacacacatctgaccttgttagtcaaggatgaagttccaactcctcagctcgccgtacagtcttgtctttccactgtcagccttgcacgttctcttctggtaatacaggctgcttctcatttgcacacacagtgtctcatttctttaaaccattgcctctggggccacagtgatgggatgaggaaaagccagggagggtgcttaggacctgcttggtggtgaggatggatgcatgtgctctgtctgagcatatggacaactgtgctgcctgcctgggcccggactttgctggactggataggaacagagagctgtgtcctttgtccccatcacaggctcattctgggggctgctgccttcctgcttggtctactaggcttttatctcaactggacagttctgtcatcccctgagactgggagtgggtcctgtgagtgagaaactccagcttgttctccccacctctacttcagggggagaagccctaattgaaccgtggaccacgtgacgtgtattggaccacgtcacgaggtcgacgagggccaggccctgcagacagtgggtgcttatcactatgaacaacctcttttttcacacttagctggcttacatgattttatctcttatatatttgaacaaatttcaattgattcttctttctcaaccccgagtcttcacacacagttcccacccttctacgtgaaaaattgtcccacagcacttatgaactagagagtgagtcatgatggtgtgtgttggtgcatgcatgcgggaaaggggattctggaaggtggggatgttctccagaatctcctctccatggaggccctcaaggaccaggccttcctggtctttgtagttcctgaccagcccactgtgggcactatgtgtcagggaagagatgagaagcaaagatgaatatgatgcagttcttcttctcatggagcttagggtcagtgaagatctaaaatacatcaacacttagatctattaggtgctatgagactgcacaggatgtgcagcttgtcagtttgaggatggaatgtagggatcaggaagccgacacggagaagacagcagtaagcccactcctgaagagggggagtactcttgggtagccctgttaaattctgcctcatattaaaccaaaattggtttcttgatgttcattcctggttccatctggcatgtcctcagcagatcatctgtcatctctgtttccctttcccatcctccatgagtttaaaatctttgatttgggggcttgagttttgaggcccttggaaaatcatttcccataaaaaatggaaatctctatgtaagcatttctcaagctgtcacctgagaatgtcttgggagaatcaatacatttctgttgaataaatgaagtgtcccacagttaaataaatttgaggacttccgtgttccagttcctcttctaagacatattagcgtagtgcaagctctggtaagacctgcagaaaagactctttcatggctctgtaatcattctgagaaggtttttgctgacactcgattgagaaccactgctatgaaagtttgtcttgtttataattgacaaaaattgtataggaggacaacatgttttgaaatatacatacattgtagaatgactaattagagctaactagcatctgaattacctcacttatcattttttgtgatgaaaacacttaagatctactcttctgtgattttaaagtatacactatattgttgttaactatagtaccacgttgtaaaatagatattttaaactcattccttctaactgaaattttgcatgcttttaccagcacctccccaatctcctcatgccccagctcctggtaaccaacattctactctccaagttcaacacctttagattccacatacaagtgagaacatgtggtatttgtcttttcatgcctggcttatttcacttaccgtaatatcttctaggttcatccgtgttatcacaaatgatggaacttccttcctttttaaagctgaacagtatttcattgtgtgtgtgtatatatatatgtgtgtgcgtgtgtatgtatgtgtatgtatgcatatatatactgcattttgtttatccagttgtttgttgttcgacacttaggctgattccatgtcttggctattgtgaatgatgctgcagggaacataggagtgcagatatctctttgacatactgactttatatacccagtagtgggatttctggatcgtatggtagttctatttttaattgtttgagtttcctccatactgttttccacaatggctattgtaatttacattcttaccaacagtgtacagggttcccttttctccacatcctcaccaatgtttgttttttgtctttttgataagtcattctaacaggtgtgaggtaatatctcattggggttttaatttgcatttctctgatgattagtaatgagcatttttttccatatacttgttggctatttgtatgtcttcttttgagaaatgactattcaggtcctttgcctaggttttaaacaggttgttttcttgctactgagttgtttgagttccttataaattttttatattaatcctttttctaatgtgtatttgcaaatattttctcctgatctgtaagttgctgcttcactgtttcctttgctatgtagaagcttcttagtttgatgcaatcccatttgtctatttttgcttttgtagtctgtgtttttggggtcacacctaaaagatcattgctaggctgggcatagtggctcacgcctataatcccagcattttgggaggctgaggtgggtgggtcacttgaggtcaggaatttgagaccagcctggccaacatggcaaaacccccttctctactaaaaataaaagggtgagtttcctctatctcgtgagatggtttgcccttctgtcataggataacacagcacaaagtcctcaacagatgctggtgccatgttcttaggctttccagcctctagaactgagagtcagataaacttctattccagccaggcatggtggctcatacctgtaatcccagccctttgggaggccaaggtgggcagatcacttgaggtaaggaatttgtgaccagcctggccaacatggtgaaaccctgtctctattaaaaatacaaaaattagctgggtgtggtggtgggtgcctataatcccagccacttgggagactgaggcaggagaatcacttgaacaaacctgggaggcggagcttgcagtgagccaagattgcgccactgcactcaaggctcaaggctgggtgacagagcatgaggctccatctcaaaaataaaaaataataaaaaaagatcattgccaagaccaatgtcagagttttcttctatgttttattctagtggtgttatagtttcaggtcttatattttgtctgtaatctatttttaacggattttcatatatggtatgaaatagtctaatttcattctcccacatgtggatatccagtttttccaatattatatatcgaatatatgagagtttaagaaggatagggaatgaatcttttaagggagctaatcaccccaaaattaattttctctctttctcctacacagcctcttgattttgaaacagcagctgtttccaacattgtgttcaaagcagaaaatcctgagcctctagtgtttggtgtgaagtacaatgcaagttcttttgccaagttcacgcttattgtgacagatgtgaatgaagcacctcaattttcccaacacgtattccaagcgaaagtcagtgaggatgtagctataggcactaaagtgggcaatgtgactgccaaggatccagaaggtctggacataaggtaaagggcaacagtgctgggcaggcctggctgcgtggtcaccaaagccaatggggaggaggaggagctggcctgcactgactccagggctgaccctcacagcatacccagcaatgatgaaattggctttggtttaggaagctgtcaacaccctgggggcattccaagggatggtggttcatcaataaccatctaggctcagacaagtgggaagcagcatgaggttccattccagcccatgagcttcaggtcccagctgagagctggatggttcaggaagtgaggttcacctctgagagactagaataaccaggccctgtgtctaagcctgttatctaggctagggtttaggaaagggttccagccctaaaggtgtattggagttctagacagagaccaaagcccaattggacagaccatgccaacttacagggctgagggaatcttctggatgtaggatacataggttccttggctccaaagagctgatctagggcacccctggagaagctggtgctctggctgaggtggctaaacaaaatgtgtaaatatttccatcttagcaattcctttttttcagttcagtaagacccacacagatttgccttaaaaagtacaatgatgattaacttaagaaatatatgtttgtatatatctgtataatatctataaaatctttaagatcatgtagttaagacttgaactcagatctttcgctgctgttgtacattacacctcctgtctatggcataggaaatatttcagcatgacttaaatcacgcgtgtggctatgaatggcagacaattccttaagtttctctaaacatctggagggagtcttgcctcccattgagctgtccttcaggcacttggattcacttctaagacctttatctgatcattgagaagcaaagttaccacctgcagttttactctaactacttctgtagttttacagagaagaaagaacagtaggggatatactgtatggtttagtgtagatactactgggtcaaaaattatgagaagacacaaaatgtttttaatctttataccatttatttaacaaaagttcctatcttcttcatgaaaatgctataaaaaccattggtcaaagacgtgaataaaaagtttatcagtgggaaaaataaaggcatgtaagaaaattactgtgatgaaacaaggaaaggatacatataccattaagttgaggtcaggaagaggaggttagcaagggagactgagaagaggtgttctgtaaggtacaattccagaagacaaatgaagaaagtgtttcaggagtaaggaataatcaatagttcagacatgagtaataagtctgttaagaattaaggatgactccagtgttggtctgagtaatttaattctccagctccacaaacttaaaatctgttagcacccaatggatttgaatccaatccttcagcaaatattatagattcttttattgaaatatattcagaatccacctgcttctccctgcttccagcctgctccaaggcaccaccatgtctgttctggattcgtccttgcccctgccgtcccccaccccactctgaatctactcactgaattgcagtcagtgaccttttaaaaaagtcaatcagatcatctgactcctctttcaaaaccctccaaagcattccatctctttcaggatgaaatcccaagtataaagggtttcatactcattacccatgtatataacctaacacagtgtttggcatatggaatatactaaaaaaatacattgtgggaaattaacacatcatacttttttaatgattctcttgtcctttgatatgtaggttgcttccagtattttttattatagaaaatgttttaaatagatgtatgcatgtaattctttttaaactttgattaaattgggtttttttaggtagcatttccaggagtgaaattatttggtctaaagatatggacatcctcatgactatgatgtgttgctttttaaaggactaccattggttttcctgtggttctagtcttgtctgtctcaacttcatcttccaaacacctaccaatgagctccgttgaaagcacaaatatggccaggtcaccttcttgcttaaatcattggctggctgcccattgcttcttgtgatctggctcttcaaatctctgtggcttcaccttttgccaccttctgcttcccaagtataccccagcactgctgaaatgcctgaccccacactcaccatgctgttccttggcccttggtgctttatctcacactcttccttctacttgaagcgtcttcttcttgccttaaacatctactacttcagaaagactttgctgattcctgtaaacttctcttggattccatagggccccctctgttgtgtttaccacattttattggaatcaactgtttatctgtctatctcacttgcctaagaacacctttttgtgatctcttcccttggcccactgcctgatcttcctcagcactcaatagatgtttgttggatgaggaattcactgtgttaccagggtctatgagtatccacccatctcgcccaacgtttccaccactgggtgttcaaattttctaggtgggtggtttgctaagaggttttaaaagatacttccaggttactttaatttgagtttttgattgccagaaaagtttaactactttccccagaagttgtgaactatacccttcctaatacaagcacaaacaccacattgtaaggatgaacaaatccttttgaagacagatgaaatgcaaataaagcattaataatatgagataatagatcctttaaatatgttttaaataatatacaagtaatgctgataatgataatctcagcattatcatttgtatattatttacaacatatttcaaggatgcacaaacatatttagttgacgcacaaactagcttcacattttcatgcaaagtaatgcaggctttcttttgctcttttcatttgatgaagctattcactgaggggagacacaagaggttggcttaaaattgaccacgtgactggtgagatctttagtgtggctccattggacagagaagccggaagtccatatcgggtacaagtggtggccacagaagtaggtaagcaaaaaaaaaaaaaaaacaaaaaaaaaggaacacagattatcagaagatacatgggttgaaatgggagggaggataagaaaactgacagggccaaaacaccagaatatcacaaccttaaagtggaaggatgagaagggtacaaaatataagggagtgctcatatcttccttttttttttttttttttttttttttttgagatggagtcttgctctgttgcccaggctggagtgcagtggtgcgatctccactcactgcaacctccacctcctgggttcaagcaattctcctacctcagccttccgagtagctgggattacaggcacccaccaccatgcctggctaatttttgtatttttagtagagacagggtttcaccatgttggccagcctggtctcaaacttccgacctcaggtgatctgcctgcctccacctcccaaagtgctgggattacaggtgtgagccaccacgcccagcccctttgtggttttgttaaaggtgaaaaacacctgtgcccccagcagggctgctgctcactctgtggtttcctgtaggggctatggcctcttctagagagttctgtgtccctggctgaactacctcccttcttccaatgtggttgtgggtttcccccaggagctctgagtggaatcaaaccactgacctgttcacgtagaccaccacttgctccttcagccttaaattgtaactctcatcctttttgaagcagaaaatgttttatgaaatgttctctactttgatgtgtgtgagaatccccggggagcttgttgaataacactaggagtccacccctggagtttctgattccataggtttgggtgaacaaggggtatctgtgttttgacgaaatcaggtgaacttttgaaaggaaagacagaaaagcccaggatgtttgagccattcctgtgtaatctttgtatcttatttattttagttgtgctgatatatattgcctgctggctccaactgtggagttccagagaacttttttaaaataaaaataaacacataggaatagtatgtttacccaataataagcctggcaactaaaaaagagtttctttgcattttcatggaattttcagacatacaagtaggaaatctgttgatccaatgttgaccagtctctaattagctagtaaatgtatctggcaggtttaccaaaaaagagaattaaacaaattactcaataaatatgtttttagactcccccaccacagccccggaaaaaaactttcaaaatgtgagggccagggttgagagctgaattggagaagagagacaggaatcataaaaacggcccctgcatgtggaaagattaagaaaaacaaaattacttcagtcaagtcaaaccaaaaagggtagaatgcagaacggtgtgccagcttgggaggggtgtgtgtgaatggacaggccctctgcttctgtctcttgcttgagtgcagcacattccactatcacattgtatacatttaactcttgatttaaaacctcccagtgaagcagcaggcaggttctggctgagcctttatgctgtgcacacccctttctcataccatggggatcagaacttcactctggatgtgtcccaagagtttctcacattctagaagtttcagaaatcaaaaccagggtccaaaaccctgttctgtttttagtttctggcactgacatgatataaatagatacaataacttcgagaacacagtggccttttcttctttggttaagtatagccatggacatagacgatgttgagaagaaaatcaagaaaacagggtttactagaaatgagcaagaaaacattactggaatcaaacaaggtcagagtcagaagttgtagaaacaatgtctgtgattggtgttgaggaggacatgataacagtcagtgtttatgttgcactgacagccccatactgagcacttagtgtaataacttactcctcatacaacactataacgtaggtgctattattgaccacatactgtgaacaaggaaaccaaagcactgagaaattaagtaacttgcccaagattacatagctaccaaccagttatgctgcagatccaagttttttactcctatcatatagtaaataatgtctgtggagccttttactattttccagaacattcactcatatgtgggattcttgcaaagccacacagctgaagaaaataagcttagaaaactctactaacatgcctaaggcctgctaaagagcaagtgaaggtgtgagtgctagagttagacctcttggattgaaaacctctctgccttgggcaagttacacaacttctgagctcagttttcacaattattttgaagtaatatatgtaaaatattagcacatatctcttagttattattatgatggtcagtaagactttttcaccagtaatgaaactaggtctttgattctaaaagcttgtcgtctttctagcatctcagtgtacctaactccttgaattttaaagaaagggaaatctttcttattaagaggaaaatgagtgaactgatcccatgtttcaatcattcaattccttaggggggtcttccttgagctctgtgtcagagttccacctgatccttatggatgtgaatgacaaccctcccaggctagccaaggactacacgggcttgttcttctgccatcccctcagtgcacctggaagtctcattttcgaggctactgatgatgatcagcacttatttcggggtccccattttacattttccctcggcagtggaagcttacaaaacgactgggaagtttccaaaatcaatggtgagttgtcagaaatacatggaaaaaaacatagatggatgatgaaagtaggttttatttaacttggtgggtttgctgtactcagcaaagagctttctttcatgcttcaggaaggaagttcatgctttggaagcttgtacagggaaggactccagaggggaaaaagccccaggatttcaagggaggaaagattatgaccacacagcattctcttggtgtagatgaacagttggatgacctaagcatcatttgcaaaattttcaatgacagatggaaagcagattttatagaaattttttaaaactttgagatagatatatatattcaaagtatacaattttatgagaattgattacatgtaaataccactgaagccatcagcacaatcaagacaatgaacatttccaccacctccagaagatatttcatgccctattataatctctgcttcccacccatcccctctccccaggcaaccattgaagtgctttccattactatagttttcattttcaataatttcatctaaatagaatagtatagtatgtatattttttttggtctggcttctttcatctcagtattttgagatgtatcggtgttgttacatgcatcagtacttcattcctgattattgaggggtagtattccattgaatgactatacctgttcacctgttgattgtaactccaacttttgctattacaaagctgctgtgaggatttgtgaacaaatattttgtagggacaaagatttgcagttttcttggttaaatactgaggagtggaatggctgggtcatatgggagttatatgattcagttgttaaggaaaggttgaactactttccaaattgttcttaacattttacattcccaccagtgtgtgagaggtccagttgctcagcattctcccagcacttgctgtgctcagcctctttaattttagccattccagtgggagtggagtagtatctcataatggttttatttgtatttctctaatgactagcggtgttgagcatcttttcatatgcaatttgccatccatcttcactggtgaagtgtcttgttagatattcattttttaaaaattaggctgtttggattctattgctgagttgcaagcatttttaatatacatagatgatgtgctttgttagatatatatcttttgtaaatattttctcccaggccatggcttgtcttttcattttgcaagtcttttaaagagcaaatttaaaaattttggtatctatttttttcatgttttattcatgatttgtatgttgtgatgcttaaatttttgccaaacttagggtccctaaagttttctgtttttttcatttcccaaattttatagttttagcttttgcatttagctctatgcctttttaaggtaatttttgtataggcatacctcatcttattgcactttgctttatcgtgcccaatggatcttccatttttttataaaatgaaggtttgtggcaacaaagtctcttggtgccatttttccaacagcatgtgctcactttgtatgtctgtcacatttaggtaattcttaaactttttcattattatatctgttatgctgatcagtgatctttgatgttattattataattattttgggacacccggagccatactcacataagacgacaaacttaatctgtcagtgcgacgtcgacgtacgttctgacgctccacagactggctgtttccccatgtctctctctctccttgggcctccctattgcctgagacacaatattgaaattaggccaattaataaccttaaaatggcatgtaagtgttcaggtgaaaggaagagtcacacatctctcactttaaatcaaaagttagacgtgatttagcttagtgaggatgttatgttgatagccaagattggccaaaaactaggcctcttgcatgaaatgcttagccaagttgtgaaggcaaaagttattgagggaaattaaaagtgaacctacagtgaacacaaataataaaaaagcaaaatagccttattgccattaagggagaaagtttgagtggtctggatagaagattaaaacagcaacaatagtcctttaaaccaaaatctaacctagaacaaggccttaactcttcaattctgtaaaggctgacagaggtgaggaaactgcagaataagtttgaagctagcagaggttgatttatgatgtttaaggaaagaagctatttccataacaaagtgcaaagtgatgcagcaaattgatgcagaagcaagtaatccagaagatctgagatccttaatgaaagtggctacactaaacaaacttttcaatgtagatgaaacagccttcttttgggagacaatgccatcttagacatccatagctagagaagtaaatgcctggcttcaaagcctcaaaggacaggctggctcttgttagggctaatgcagctggtgactttaagttaaagccaaccctaatttagcattcctaaaatactagggtccttaagaattatgctaaatctactttgtctgtgctctgtcaatggaacaacaaagcccagatgacagcacatctgtttacagcatagtttactgaatactttaaggccactgttgagacctactgtcccccaaaaaagattcctctcaacatattactgctcattgacaatgcacctggttactcaagagctctggtggagatgtacaaggaaatgaatgttgttttcatgcctgctaacacagcatccattctgcaggccccagatcaaggagtaattctgactttcaaattatttaagatatacatttcatcaggttatagctgctattagatagtaattcctctgatggatctgggcaaagtaaattgaaaaccttctggaaatgattcaccagtttagatatcatcaagaacatttgtgattcatgggaggaggttgaaatatacacattagtaggagtttggaagaaattgattccaaccctcatggatgactttgaggggttcaagacttcagtggaggaatcactgaaaacgtggtgaaaataacaatagagctcgaattagaagtggagccttgatgatgtaactgaattgctgcactctcatgatcaaactggaatgaatgagagttgcttcttacaactgaacaatgtgttttgtttgtttgtttgtttttgaacaatggaatctgcttctggtgaagatgccatgaacattgttgaaataacaagcaaggatttagaatattccataaacatagttgataaaacagtggcagtgtttgagaagacttactccaatttttgagagatgttgtcttgtgggtaaaatgccatcaaccagcatcacatgctatacagagggctctctcatgaaaggaagagtcaataagtgcaacaaacttcattgttgtcttattttcagaaattgccacagccatcccagccttcagcaaccaccaacattgagacaggaaatgatttgcagcaaaaagattatgactcattgaagggtcagataatcattagcattttttggcaacaaagtacttttaaattaaggtatggacatttaggggttttttatttttaggtataatgctattaacagtctagagtatagtataagctgttatttcagtagaaaaacaaaaaatctgtgtgacttgcttcactgagctatttgctttattgcagtggtctggaaccaaacccatatcgctgagatatgcttgcatagggggtgtggtaaagaccaaagtttattgtttttaacatagctatctaactgttctaacaccatttgtttaaaacatcctttttttacattgaattatcttaacaactttggcaaaaatcaagtgaccacctatacataaatctatttctgaatttttctgtttcatcaatctgtttctatttttataccaataacacattgtcttgattgctgtagctgtataaggcttgaaatcaggtagattaatttttccgactttgttctttttcaaaattccttcattctatgtctttttcatttctgtataaattttagaatgtagcctgttcctttctaccaaaaaaatcctgttgagattgtattgaatctactggggaatctggaggagaattgatatattaagtcttccaattcatgaacatggtatatgtctccatttatttagctctttaatttcgttcagcaatgtgttttagttttcagtgtatagttcttacaaaattttccctaagcatttcatatttttgatattttaaatatttcaatttctaaatatttctagatataggaatataatgatttctgtatactgatctgtattctagaggcttgctgaccttatttagatttcatagattttctacatagacaatcatgttgtctgtgaataatgacttcttccttttcagtctgtatgccttttgtttattactggctgaaaccttcagtgaaatgtcaaatagaggtagtaagagcagaaatacttgacttgttcatgatcttaggaagaaagcatttagcctttcaccattaaatatgatgttagctgtaggttttttattgtaggtcgtctttattagatttaggactttgccttttattcctatttgtgagggttttttttttcctaaattggaaatggatattaaatttttcaagtgctttttctccatgtattgactatgtggctgatttgattttttgggcctattaattgatgcattattatcaacttttgaatctaaaaatcaccttattcctgggataaagcctacttagtgatgaaatattaccatgtttatgtattgttggatttgctaaaacttaatttttgcatctatattcatgagggatgttggtctctctctatattttgccttgtataatgaggaagcattccacctctttatcttcaattatctggacaagtttgcataaaattggtattacttcttcttaaagtttgaaagaatttgccagtaaagctatctgggcctggtgtattttctttttaagaagttttaactacaaattcaattttatagatatagaaaaattcaatttatatatttctttttggttgagcttgtacctttcaaataattcatctatttcattaatctaatgtattgatatagttcatattttattaatatctgtagaatatgtagtgatatcacctcattctgatattggcaaattatcttttttcctgataatctggctagaagttttattgatattttcaaagaaccagcttttggtttcattgattttttttctgtttttgttttatatttcactggctagatctttattgtttcctttattcttcctacactgtgtttttgttcgtgttctgttttcattaaggtggaagctgatgccattaatttgagatctttttgttaaacaggcatttagagctataaatttatcttaggtgtcacattagctgcattttttttttaatagacagggcctcagtcacccaggctgcagtgcagtggtgtgatcatggcttactgcagccttgaattcctgggctcagacgatcctcctgcttcagcctcccaagtagctgggactacacgtatgagctaccacacttggctaattttttatttttaaattttttgtagagatgggggtcacactatgttgctctggcttgtctcaaactcctgggttcaagtgagcctcccacctcagcctcccaaaatgctgggattacaggtgtgaaccaccatgccaggcccacaaaatttgatacattgtgttttccctttagatttcttttgtgattatgtgttatttagaagtgtgttatttagtttccaaatattctgggaatatttcctataccttatacctttctaacttctaatttaattacatcataaccagaaaacatgactagaatacttttaaatttatttagacattttttctttcagtactttgaaggtatttcaccaccccccctttttttttatttattttttattttttggagacagtcttactctgttgcccaggctggagtgcagtggcacaatctcagcctcccaggttcaaatgattcttgtgcctcagtctccctagtagctgggattacaggtgcacaccatgatgcccagctactttttgtatttttagtagagacagggtttttccatgttggccagactggtctcaaactcctggcttcaagtaatctgcctgccccagcctcccaaagtgctgggattataggcatgagccaccgggggtgccctgcccactatggttcttccttgttccattgaatgtttgtattcttttttctctgggtgcttttaagatattctcttattacttttaagtaatttgatgttcatattgccttgatggcattttattcatttttcttattcctgaagtttgatgatcatcttggatctgaggatttggagttttcatctaacatggaaaaaatattagccattgtcttatcaaaaatgtttttctctccactatctttcttggctttcaggaattcgattacacatgtattaggccacttgaagttgtctcaaagcttattttttttctatttctttttggatagctttatttctatatcttcaagtttactgttttttcctgctatattcaatggctatattatagccattcatccaacctagtctatttttatatcaaactttgtagttttcttctataaattaacttgggtttttaaaatgttctgtatctatctacacttctcagtcttgtagcttcttgaacatatagaatataattataactgttttcatgtcttttcccactatttatgtaatatgtataatttctgggtaggcgtcaattgatcttttctctcataggtcatatttttctcttttactgaatgtctggcaattttttattaaatgccagacatttagatgctgaatattttgtattcccataaatattcttgaactttattgtgaaatacagttagatcatttggaaaaagtttgatgctttcatgtgttgcttttaaattttcttagatagggccagggcagcatttattctagggctaatgttttcaaacttgtgaggtgaagccttctatgtattctacctggtagcacatgaattatgagatttttagctctagggaccaggaatgattcctggctctttgtgagcgctgtgttctctaatctttttaggtggttctttccccagccttgagtagttccttcatataaatacactgatcagtactcagctaaagccttaagagacccctctataaatctctttagtgtgcattctctttgcagctctctctgggactctgctctgtaaactctagtttcttaactttgccttactcctgtgctccatcacctcaactcagggacatcactgggctctgtctgagctcctgctccctgcaactgatacctggatatttgctttgggtggtaagctgaggcaattataaaatttacctcatttgctttccttctttcagaaatcactgtccattgcctaatatataaatctttaaacccatggtttcacatattttttgttcttttagttgtttttggtggaatggtaactctggtccctgttactatatcttatctaggtgggccataataatttttaaatatgcatatttaaatcttcccaaatttgggaaaatttcttggcagatatgaatagggagggcataagtgtgaattgtagcaaaatcaaatttttgtttagaaatttgaagtttagtgtttttgtactctcaattttctattttaaaaaaggtggtaaatgccctgaaaaccaggtataatatcatgcatacccttatttctggactcagagggattttgaggcctataaatgttatgacttacccaattacatagctaacaagcagcagatttgaaacccagaatcaggtctacagaagctcagtcccaggtactctccaatcttctgacacatacagtcgatccccattatttgcagattgtgtttataaaataatctacatgataaaatttgtaacccaaaagtcagtacttacaggagctttcgcttttgctttcatggacactggcagggtggtgaaaaatactggacacacatattcccagctctcacattgttaagttagttaggtttttttttactttttgcagtttatgtagtgcgctgtttttcacgtttctgtgcttttcattggtgatttcattgtttaaaatggctctgaactgggtggggtgtcgcctcacctaggaagcacaagggtgaggtgatttccctttcctagtcaagggaagccatgacagactgtacctggaaaaacaggacactcccacccaaatactgcactttttccaagatcttagcaactggcagagaaggagattctctcccgtgcctggcttggcaggtcccgtgcccacagagccttgttcactgttagcacagcagtctgagatcaaattgcaaggtggcagcctggctaggagaggggcatccaccattgctgaggcttcagtaggtaaagcggctgggaagctcaaatggggtggaggctacagcagctcaacaaggcctactgcctctatagactccatttctatggacagggcatagctgaacaaaaggtagcagataacttctgcagacttaaacatccctgtctgacagctctggagagagcagcggttctcccagcatgacatttcacctctgagaacagacacactgcctcctcaagtgggtcccaaacccccatgtagcctaattgggagacacctcccagtaggggctgactgatacttcatataggtgggtagcactctgggacaaagctcccagaggaaggatcaggcagcaatatttgctgttctgcaatatttgctgttctgcagcctccactggtgatacccaggcaaacagggtctggagtggacctccagcaaactccaacagacctgcagctgagggacctgttagaaggaaaactaacaaacagaaaggaatagcatcaacatcagcaaaaaggacatctacaccaaaaccccaactgtaggtcaccaacatcaaagaccaaaggtggagagaaaccagagcagaaaagctgaaaattctaaaaaccagaatgcctcttctcctccaaaggattgcagctccttgccagcaacggaacaaagctggatggagaatgactttgacgagttgacagaagcaggcttcagaaggttggtaataacaaacttctctgagctaaaggagcacatttgaacccaacgcaaggaagctaaaaaccttgaaaaagggttagatgaatggctaactagaataaacagtgtagagaagaccttaaatgacctgatagagctgaaaaccatggcaggagaacttcgtgatgcatgcacaagcttcagtagctgattcaatcaagtggaagaaagtgtatcagtgattgaagatcaaattaatgaaataaagcaaggagaaaaaaagagtaaaaagaaacaaagcctccaagaaatatgggactatgtgaaaagaccaaatctatgtctaattggtgtacctgaaagtgacggggagaatgaaaccaagttggaaaacactcttcaggatattatccaggagaacttccccaatctagcaaggcaggccaacattcaaattcaggaaatacagagaccaccacaaagatactcctcgagaagagcaaccccaagacacataattgtcagattcaccaaggttgaaatgaagggaaaaatgttaagggcagccagagagaaaggtcgggttacccacaaagggaagcccatcagactaacagtggatctctctacagaaaccctacaagccagaagagagtgggggccaatattcaacgttcttaaagaaaagaatttacaacccagaatttcatatccagccaaactaagcttcataagtgaaggagaaataaaatcctttacagacaagcaaatgctgagagattttgtcaccaccaggcctgccttacaagagctcttgaaggaagcactaaacatggaaaggaacaaccagtaccagccactgcaaaaacatgccaaattgtaaagaccatcgatgctaggaagaaactatatcaattaacaggcaaaataaccagctaacatcataatgacaggatcaaattcacacataacaatattaaccttaaatgtaaatgggctaaatgccccaattaaaagacacagactggcaaattggataaagagtcaagacccatcagtgtgctgttgggagacccatctcacgtgcagagaaacacatagactcaaaataaaaggatggaggaagatctaccaagcaaatggaaagcaaaaaaagcagggatcgcaatcctagtctctgataaaacagactttaaaccaacaaagatgaaaagagacaaaggaggccattacataatggtaaagggatcaattcaacaagaagagctaactatcctaaatatatatgcacctaatacaggagcacccagattcataaagcaagtccttagagacctacaaagacttagactcccacacaataatcatgggagactttaacaccccactgtcaatattagacatatcaatgagacagaaggttaacaaggatatccaggacttgaactcagctctgcaccaatcagacctaatagacatctacagaactctccaccccaaatcaacagaatatacattcttctcagtgccacatagcacttatgccaaaattgaccatataattggaagttaagcactcctcagcaaatgtaaaagaacagaaatcacaacaaactgtctctcagaccacagtgcaatcaaattagaactcaggacaaaaactcactcaaaaccacacaactacatggaaactgaacaagctgctcctgaatgactactggataaataacgaaatgaaggcagaaaataaagatgttttttgaaaccaatgagaacaaacacacaacgtaccagaatctctgggacacatttaaagcagtgtgtagagggaaatttatagcattaaatgcccacatgagaaagcaggaaagatctaaaattgacaccctaacatcacaatgaaaagaactagagaagaaagagcaaacacattcaaaagctagcagaaggcaggaaataactaagatcagaacagaactgaaggagatgatagagacacaaaaaacccctcaaaaaaacaatgaatccaggagctggttttttgaaaagatcaacaaaattgatagactgctagcaagactaataaagaagaaaagagagaagaatcaaatagacgcaataaaaaaatgataaagggaatatcaccactggtcccacagaaatacaaactacaatcagagaatactataaacacctctacacaaataaactagaaaatctagaagaaatggataaattcctggacacatacacccttcccaagactgaaccaggaagaagttgaatctctgaatagaccaataacaggctctgaaattgaggcaataattaatagcctaccaacaaaaaaaagtccaggatcagatggattcacagctgaattctaccagaggtacaagaagagctggtatcattccttctgaaactatttcaatcaatagaaaaagagggaatcctccctaactcattttatgaggccagcttcatcctgatgccaaagtctggcagagacacaacaaaaacagagaattttagaccagtatccttgatgaacatcgatgtgaaaatcctcagtaaaatactggcaaactgaatccagcagcacatcaaaaagcttatccaacacaatcaagttggcttcatccctgggatgcaaggctggttcaacatacacaaatcaataaacataatccatcacataagaaaaaccaatgacaaaaatcacatgattatctcaatagatgcagaaaaggcctttgacaaaattcagcccttcatgctaaaaactctcaataaagtaggtattgatggaacatatctcaaaataataagagctatttatgataaacccacagccaatatcatattgaatgggtaaaaactggaagtcttctctttgaaaaccggcagaagacaaggatgccctctctcaccactcctattcaacacagtgttggaagttctggccagggcaatcaggcaagagaaagaaataaagggtattcaattaggaaaagaggaagtcaaattgtccctgtttgcacatgacatgattgtatatttagaaaaccctattgtctcagcccaaaatctccttaagctgataagcaacttcagcaaaatctcagggtacaaaatcaatgtgcaaaaattacaagcgttcctatacaccaaaacaaagagagccaaaacatgagtgaagtcccattcacaattgctgcaaagagaataaaatacctaggaatccaacttacaagggatgtgaaggacctcttcaaggagaactataaaccactgctcaacgaagtaacggaggacacaaacaaatggaagaacattccatgctcgtggacaggaagaatcaatgtcgtgaaaatggccatactgcccaaggtaattcatagattcaatgccatccccttcaagctaccaatgaccttcttcacagaattagaaaaaactgtaaagttcatatggaaccaaaaaagagcccgcattgccaagacaatcctaagcaaaaagaacaatgctggaggtgtcacactacctgacttcaaactatactacaaggctacagtaaccaaaacagcatggtactggtaccaaaacagatatatagaccaatggaacagaacagagacctcagaaataacaccacacatgtacaatcatgtgatctttgacaaaccggagaaaaacaagcaatggggaaaggattccctatttaataaatggtgctgggaaaactggctaggcatatgtagaaagctgaaactggatccattccttacaccttacacaaaaattaattcaagatggattaaagacttaaatgttagacctaaaaccataaaatccctagaagaaaaccgaggcaataccattcagaagacaggcgtgggcaaggacttcatgactaaaacaccaaaagcaatggcaacaaaagacaaacttgacaaatgggatctaattaaactaaagagcttctgcacagcaaaagaaactaccatcagagtgaacaggcaacatacagaatggaagaacatttctgcaatctacccatctgacaaagggctaatatccagaatctacaaagaactcaaacaaatttacaagaaaaaaacgaccccatcaaaaagtgggcaacagatatgaacagacacttctcaaaagacatttatgcagctaacagacacatcaacatgatcatcactggtcatcagagaaatgcaaatcaaaaccacaatgagataccatctcacaccagttagaagggtgatcattaaaaagtcaggaaacaacagttgcaggagaggatgtggagaaataggaacacttttacactgttggtgggagtgtaaattagttcaaccattgtggaagacagtgtggtgattcctcaaggatacagaacctgaaagaccatttgacccagcaattccattactgggtatatacccaaaggattataaaccatgctactataaagacacgtgcacacgtatgtttattgtggcactattcacaagagcaaagacttggaaccaaccaaaatgtccatcaatgatagactggattaagaaaatgtggcacatatacaccatggaatattatgcagccataaaaaaggatgagtccatgtcctttgcagggacatggatgaagctggaaaccatcattctcagcaaactatcacaaggacataacaccaaacactgcatgttctcactcataggtgggaattgaacaatgagaacacttggtcacagggcggggaacatcacacaccagagcctgtcagggggtgggggtctgggggaggatagcattaggagaaatacctaatgtaaatgacgagttgatgagtacagcaaatcaacatgacacatgtatacctacgtatcaaacctgcacattaagttctagggtacatgtgcacaaagtattaaaaaaaaccacacagggtcaaacctaaaagatgacccatgataaaaaaaaaaatggctttgaactatagtgctgaagtgctatctagaattcctaagcacaggaaggctgtgatgtgtgccttacagggaaaaattgtggtttgggacacaaattaaaagtaatgtccaaaactgcaattattttccaccaacctaaatatgtgtgtttgataagctttgttcaggaagttctagtgctgttagatgtgagttaaatgttagaatgaacaatatatgttaaataagatatctttgaacagcaacacacaaaaagcaaggttatgtattgatcagttggggaaaatatgactagaagctcacagaaacctaaccctgtctttcctctaggagcaatggttcagcattcattaattcagtgtttggggcaactttatagagcataagtgctacaaatgataattgactatatttagtataaatttctacagagaaatcatgaattaagaacttaaaggatgctttagccctttcttaccttatgggaagatacatgtggaatgatgtggatgatactttgggcagtttaactcatatctagccatgttccagtcaaccttagtatgtgatacaaaatgagctttattcctgctaatccagggtctgaagttgtattttcatttttttttcctgtcctggcaggtactcatgcccgactgtctaccaggcacacagagtttgaggagagggagtatgtcgtcttgatccgcatcaatgatgggggtcggccacccttggaaggcattgtttctttaccaggtagatattctgctataggcaactcaggctagtatctgtcaccatgggccgtttgaggagattcttgtctttgatatgggattctgcaactattcacttgagaatttatcctaccaaatactgtcctgcttttcagttacattctgcagttgtgtggaaggaagttgtttccggccagcaggtcaccagactgggatacccactgtgggcatggcagttggtatactgctgaccacccttctggtgattggtgagtgtaatttcttaattcaaagagtcttatcctgggcctcagaaatgtgagctcatctcagggcctgtcttcctggactggtctggtggctgctcaaatggcaactcaggcaatagcccagaaggtagatcaccagcaaattacatcagactttcttgattggagttacagctttagtactaccctctgtctctattgccttattagtttagaaatataaggggctttatggtcatcaattgtcatatattatgcctagttacaaagcttttgtgataaagagggaagaaatgcagtagctgtgccatgtgtcaggcactgtgcttgatggggaaagagtgacatacacagatcctacaccagagtttatggtctcacctgccattgttgttacaggcagaagttagccttccagtggcgatgctgagatatctgaaatgtgtagtgcagaacttccctatgcatagaaccctgattctttactacccagaataacccattgcatcatgaccacagcctctgccatagccccttgcttggctagacagtacagtcccctgatctagctgtctttttcttttttgcaaacaactcagtgcctattccaagtgtttccttacccaaaatgcttgagagcagaagtgtttcagattttgggttttttccagatttttgaacatttgcaaatacacgatgagatatcttggggatgagacccaagtctcaacacaaaattcacgtgattcataaacattttatacacgtagtctgaaggtatttcatacaatattttaaataatattgtgtatgaaacaaagttttgcctgcaacctgtcacatgaggtcaggtgtagaattttatgcttgtgacatcaagttggtaccccaaaagtttcagatttgagattttcagattaaggatactcaacctatatagtaattgccctctttcaactgttgtccccaccacaagttaaacattaggaatagatacttcattatttcatgtgtacctgagtgaaggggtttatggtttcatatcctttttcttttaaaagaaggactaggattattctaagtattattgattgttctctcagcatctgatcttttctcccatgatccagtgtgtcacactggactctgattcatgcatctaaagggggtctcacttctttatacccttcagtctggactccctatggcatgggagggccttcatgtcatggccacttcccatcctaatgtgtgcatggtgatcatctttcctccctgagaaccactatctactgcacacttttcatggtaattgagctgtctttttgaggtcccactcacttacataggtcccttctgcctctgtgccttttcttattctatttgccctcccaccttgaaaggatttttgaatttacaaatcagatagcaattttcttaacgtatcaatttaattccataatcttaccacaagttaaagactgcttgagtttggggacatccagaaatagaagtaataggattttacagtttcatgaccttattttcaagatagggttggaattataagtttctgagcatccagacttttctgccatgattcctcctataaacttactagcaggttaatttccttaaaacaactccttcttcatagtggactctgacagtacacaatcagtgctgagctgcacagtgtaattttgatgtatcaggtgggagaaaccaagaaggttaagtagtctacccagggtcccacaacaacataggcaggatccaggaggaaggcgcccaaggaaatgcgatagttggtatggacacgatgaaaatcagcttcagggaggtgaacaggtcagagaacagctttctagttgtgctaattggattgttttctctaggaaaggggaagaatagaatcaatattaagtatatataaagttcaggaactttgtcaggtgcttatacactctatagtgtgggacatatacactccatagtgtggaacattaggtcctatattcttacagcgagatccagtgagagccaccaagtcagctatgatttgggacttgatacatacatacaacaggataaatgataagctcatttctccaagaaggccaacgactagagtcccttattcactaggacagtgaaattttgttgaatcacatacaaaaatgaagttgagtcatttttttcctaccacaatactactttataactgaatgtgacagtacattttaaaaggtcccatttatttgaccctgggttttttcttttaggtataattttagcagttgtgtttatccgcataaagaaggataaaggcaaagataatgttgaaagtgctcaagcatctgaagtcaaacctctgagaagctgaatttgaaaaggaatgtttgaatttatatagcaagtgctatttcagcaacaaccatctcatcctattacttttcatctaacgtgcattataattttttaaacagatattccctcttgtcctttaatatttgctaaatatttcttttttgaggtggagtcttgctctgtcgcccaggctggagtacagtggtgtgatcccagctcactgcaacctccgcctcctgggttcacatgattctcctgcctcagcttcctaagtagctgggtttacaggcacccaccaccatgcccagctaatttttgtatttttaatagagacggggtttcgccatttggccaggctggtcttgaactcctgacgtcaagtgatctgcctgccttggtctcccaatacaggcatgaaccactgcacccacctacttagatatttcatgtgctatagacattagagagatttttcatttttccatgacatttttcctctctgcaaatggcttagctacttgtgtttttcccttttggggcaagacagactcattaaatattctgtacattttttctttatcaaggagatatatcagtgttgtctcatagaactgcctggattccatttatgttttttctgattccatcctgtgtccccttcatccttgactcctttggtatttcactgaatttcaaacatttgtcagagaagaaaaacgtgaggactcaggaaaaataaataaataaaagaacagccttttcccttagtattaacagaaatgtttctgtgtcattaaccatctttaatcaatgtgacatgttgctctttggctgaaattcttcaacttggaaatgacacagacccacagaaggtgttcaaacacaacctactctgcaaaccttggtaaaggaaccagtcagctggccagatttcctcactacctgccatgcatacatgctgcgcatgttttcttcattcgtatgttagtaaagttttggttattatatatttaacatgtggaagaaaacaagacatgaaaagagtggtgacaaatcaagaataaacactggttgtagtcagtttt

SEQ ID NO: 369 - DNA, 10557 bp, Homo sapiens
aggtgctccgctccagagttgagcgcaggtgagctcctgcgcgttccgggggcgttcctccagtcaccctcccgccgttacccgcggcgcgcccgagggagtctcctccagaccctccctcccgttgctccaaactaatacggactgaacggatcgctgcgagggtgagtccaggggcgtgggtggcttccctcccgggaacccacactgctcctctgggtccctaaagcaacgtcccctccttgccactgcacatctaagaagcccaggcctcggtgggcgggatgactgggaattgggaacataacctacgccgcgaccattctgggtggctaggatggaatcctggtggagaagatggacacccccgcccttgacgtctacccgagctacacaaacctactccttctgcactttccctcttccgtttaatcggtgccccgtccttcctgctctccaagtctgtttgtggaggaagggttggaggggagaaagaactggaaagtactcaatgaaatgtggagccagatccagggattccactgttttgtgcagcattttgtgcacgaaaaaaaaaaaaattctgattgttttcattccccaccccccacctctgtttattgctctgtgtcatggatgtgatgttgagtcttcttgccaaacattcctaagctttagacaacacttaatctttgcttacttttgttggtcccaagaaagcagttttctcctgcttacacatgtgccgaattaatttgctaagatagatgaaaatgaggtgttccatgtagtttatttcctctgcttttagccttaaattacatttggttgatactagccttccttgttttaaaaaggtgggagagaaaattagggggagaaaggacagagagagcaactaccatccatagccagataggtgagtaaatatatttgcagtaacctatttgctattccttgctgcaactgtgtttaatgttccttccagaatcagagagagtattgccatccaagaaatcgtttttaaatatgacatttgagctatcatcttgagaccaatacctaaaacaatttcagtttaagaaatgtctaggtatggtgaaaacacagtttaaaaccagcaaaacagaatttattgccctcagcgaatacccacaatgtacatataccttgtatttctgaaagcaaagcaagcatgccaagtagtttttatttacctgtacctataatacagcaaggtgaaacaggatatatttttgaagtttaaaaatgtcttcaggccggctgcggtggctcatgcctgtaatcccagcactttggggagccgagaagggtgaatcacctgaggtcagcagttttgagaccaggctggccaacatggcgaaaccctgtctctactgaaaatacaaaaattagctgggtgtggtggcgggcgcctgtagtcccagctacttgggagactgaggcaggagaattgcttgaacacggaaggcggaagttgcagtaagctgagatcgtgccaccgcacaccagcttgggcaacagagtgagactccctctcaaaaaaaaaaaaaaaagaagtcttcagcttaggaagatatcaaaaggcagtttcaagagatttatttgtacaagtgtggtttgatctaagttttggtgggtttataaataccttcatgcaggaatgggtagaaaaatgagagaacaaaagatccctgctggatgtgcacgcctgatgaaaactgacaaaatttacatatctattgtttatccatacagcgtcttattagctttcttcaatagaatgaaagtattttagaaatatacacagattaggggaaaagaccagcaaccttgattcacagagctttaaaccagggaagtgcttttactacacctatcaatgataagattaaattttgacaaattttaacattaggaaagtcaacaacaaatttcagaattatatttctgttaatatttagtttagaatctaattatttagttcaacgaatgctgtgatttgattattaataaatgaatgcagattacttttcaataaatatatctggatgtcacaaatgttatttcacttcaagaaaccaaattcatctattttcctctctctttagtaatacatcttttgtctgtgattaaccaaacataggggttgaaaatagaagtgtgcatatacatatatatataatatatatgtatatgcaccattattcgatttgctaatgatacttcattgttgctaggttgccatagttgctctagccataatgttaaggatgttcacaggtatttgactataaaaaagtttctgaccagaagtcaaaagtctggatcaacctgaaaatgtttctaaaagttttatgtaaatgatgtcatattttaaaatgctgttgaagagctcacttaaataattcctttgagggatatttagataaattctcagaagtgaaaaagttgtttaaatgcagctaaacttattagctttattattcatttagccccaggtctcttatctaatacggagttctgtgacataattcttccaggctgtgatttatgaatataactaggattgctaagcactgttactctgagtttggggtaaagtatacaaaacaaaattattgcctttaatttctatatgtttattctacagattatcttacactgaactgatcaagtactttgaaaatgacttcgaaatttctcttggtgtccttcatacttgctgcactgagtctttcaaccaccttttctctccaaccagaccagcaaaaggttctactagtttcttttgatggattccgttgggattacttatataaagttccaacgccccattttcattatattatgaaatatggtgttcacgtgaagcaagttactaatgtttttattacaaaaacctaccctaaccattatactttggtaactggcctctttgcagagaatcatgggattgttgcaaatgatatgtttgatcctattcggaacaaatctttctccttggatcacatgaatatttatgattccaagttttgggaagaagcgacaccaatatggatcacaaaccagagggcaggacatactagtggtgcagccatgtggcccggaacagatgtaaaaatacataagcgctttcctactcattacatgccttacaatgagtcagtttcatttgaagatagagttgccaaaattattgaatggtttacgtcaaaagagcccataaatcttggtcttctctattgggaagaccctgatgacatgggccaccatttgggacctgacagtccgctcatggggcctgtcatttcagatattgacaagaagttaggatatctcatacaaatgctgaaaaaggcaaagttgtggaacactctgaacctaatcatcacaagtgatcatggaatgacgcagtgctctgaggaaaggttaatagaacttgaccagtacctggataaagaccactataccctgattgatcaatctccagtagcagccatcttgccaaaagaaggtaaggctgactgaatgaatggtgagctgagactagatgtgcatttgcccagtgtgatcaaatgaacagggatttctgttgctgcgcctttaaagtagactttgcctgtgtcatggtaatattctgggatttaatcctcagactctgaaaagacaaaatctcttttttcaaagcctaatttttttttcctttttcctagaatactgaaattgatgtgctctatgtatgtatggcagtaggttttaaccattttggatccatagaatattatgaaagctatagcctcccttctcagaaaaattgagatggaaagatacatacaaaacttgaatgcatgtacagttatttcatagaagccccaaagccttttataggttcctaatttggacctgcttaacaaggaagctgtggaagataagaaggagaaagagctttggtcaatctgaggtttattttccttataaatgtggaaagtaataacaataccttaaactttttacaaacctctcctggaatccttataccaaacctgtcacctcagtattgtctccattttaaagagaagtaaatgacaggtaagtgacctcaaaaggtttaacatcctgaggtcacaaaataagtgacaacatgactcagacatgctctttgacatattttatcactttgcagggttggtcttaggtatcaaatgagagaacagattttgaaaagctataatatttcacaaatgagaattccatccctcagaggggaattagaatcatatgaaacagcgaatgttaaaatatgtgtgtgttttacacacacagttttcagcaaacagcactttttttctggtttaagaaaattagctaggagtggttgctcacgcctataatctcagcactttgggaggctgaggcagcagggtcacttgaggccaggagtttgaggccagcctgggcaacatagcaagactctgttgctaaaaaaaaaaaaaaaaaaaatagcctggtgtggtgacacatgcctgtgtcccaggctgaggtggaagggttgcttgagcccaggagttctaggttacagtgagctatgatcatatcactgcactcctccttgggcgacagggagacacagtcgaaagaaaaaaaagaaagaaaaagagagactgagggggaaagagagagagagagggagggaagagaagggggtgaaagagagagagaggagggagggaaggaggaagggaagagggaagggaagaggaaatggaaggggagaaaattacattaacccttcgatttcctttataaaattggaatgatgtcctcttgttgcggtgcagaagataaggatgcaacctcagcaatggatttgaaaaacaggaggatgaaagacagtgcctgggtaaccgcatttgtagttatagggagtactttggcaacacctccagtgttttcagatgtttccattttacaaactgctttccacctccagcctcttttcccagccctcacccacccctcaccatgttttcttgtctggagattcttcgtgtctgcactcacaactaccagaacctagccatttttatttgggtattgcagtaccctagacattttacatagtgtcactaattaatatgtgtgtgtattgaagtctttagaggtttctggttctataaaatgcccttccttaattctataaggtgaacttacaacagaagattatttcctagtttcccctcccaaaattgttttccccaaggggaaaaagaattttttcttatgttcagctctctggtttttcacctccgtagcaagtctgttgcccatggctgatggtagctatgagtattttgttctgagtgcctctcctcccttctctttaggtaaatttgatgaagtctatgaagcactaactcacgctcatcctaatcttactgtttacaaaaaagaagacgttccagaaaggtggcattacaaatacaacagtcgaattcaaccaatcatagcagtggctgatgaagggtggcacattttacagaataagtcagatgactttctgtgtgagtatgttacagtatttctttccattctgcattactttttgctaaaatacaacagtttaaatacataatacagcagtttattgattgatatttttactgtctgttacttgaatattaaggaactacaatgttttcgtacttatctaaaaatgctttttttagatattggtccttgatatgtaaaagatatatacaaaatgtccctttaggtagaattgggtttctatcatgtttattgattaaaagaaaagcagatgcctgaacaatggcatttgtagtgtgctcgtgactcatagtggcagatgtatacagatacatggtttctggttcttaaaacggtttttggccaggtgcggtggctctcgcctgtaatcccagcactttgggaggctgaggcgggtggatcacgaggtcaggagatcgagaccatcctggctaacagggtgaaaccccgtctctactaaaaaaatacaaaaaattagcctggcatggtggtgggcgcctgtagtcccagctactcgggaggctgaggcaggagaatggcgtgaacctgggaggcggagcttgcagtgagccgagatcgtgccactgcactccagcctgggcgacagagcaagactctgtctcaaaaaaaaaaaaagcaaaaaaaaaaaaataaacagtttttacatacagataatgatccataaaccaatgttcatatttttatgtcttgtgcaggtagctcttatgttagagggcttgctcaacaaaggactgctatctttggcaagatttgtattttaaagttaatataaattcaaagggccctctagaaatggtttgctgaactacagttacacaatagattggtcacctctatttttgatagaaaaccttaataatactcaatttatattatgtttaatgattcaataattaattaaagattgaccactgtatacctaagccagaatagttaagccctaatgccccaaagcagtggctctcaaagtgtgttccctggcccaccagcatccacatcagctgagagcttgttagaaatgcaaattattggctgcataaatgtcttcttttgagaagtgtctgttcatgtccttcgcccactttttgatggggttgtttgtttttttcttgtaaatttgtttgcgttcattgtagattctggatattagccctttgtcagatgagtaggttgcgaaaattttctcccattttataggttgcctgttcactctgatggtagtttcttttgctgtgcagaagctctttagtttaattagatcccatttgtcaattttggcttttgttgccattgcttttggtgttttagacatgaagtccttgtccatgcctatgtcctgaatggtaatgcctaggttttcttctagggtttttatggttttaggtctagcgtttaagtctttaatccatcttgaattgatttttgtataaggtgtaaggaagggatccagtttcagctttctacatatggctagccagttttcccatcaccatttattaaatagggaatcctttccccatttcttgtttttctcaggtttgtcaaaaaaacacatgaaaaaatgctcatcatcactggccatcagagaagtgcaaatcaaaaccacaatgagataccatctcacaccagttagaattgcaatcattaaaaagtcaggaaacaacaggtgctggagaggatgtggagaaataggaacacttttacactgttggtgggactgtaaactagttcaaccattgtggaagtcagtgtggcgattcctcagggatctagaactggaaataccatttgactcagccatcccattactgggtatacatgccctacaaaggacatggatgaaattggaaatcatcattctcagtaaactatcgcaagaacaaaaaaccaaacactgcatattctcactcataggtgggaattgaacaatgagatcacatggacacaggaaggggaatatcacactctggggactgttgtggggtggggggaggggggagggatagcattgggagatatacctaatgctagatgacgagttagtgggtgcagcgcaccagcatggcacatgtatatatatgtaactaacctgcataatgtgcacatgtaccctaaaacttaaagtataataaaaaaaaaaaagaaatgcaaattattgggcccaaaacagacctactgaatttgaaactgtgaggccctggtgaaacacacaaaagtttgagaaccattgcccttaggcatactttataaataccatctacttgatcaagcatttatgatcggggctaccactacaaaacaaagtccctattcataggaaagcttttacataagtcacaatgacttaattttaagtctgaatttctagtaagaagtgtgatataagataattatctttgccttcatgagtgagagtctaggtcccaacttctcatagaaatgaacacagcaatcatccagtcaattacaaagtatataatgatatattcccagtgcgactatcaattaatgaaatagcatagtaccctgtcagataattactagtgattcataatttcagtgctatttttacttaaataaacctaaaagaatcatggcatctagaatgacttctttagatacgcttttcctggtagatttcaaattactttgaaatgactaggggtcagtttatgacttttcgaaaaactgatttaggattttttcgaggtggatggggcagggagcgttcctattgcatagttccctgaagcaagtataagtattagagatggatttactagtcattctccttgccacctttaagataaagcctgtcagttttgcttgggtgccatcttatcagcagtagctcctttgccttgtaccttgataccatgctaagcacacatgactttgaaatccagctattatcaatttcgtatccattttatgtcacttgacacatgtgtcagaagacccccaagtttttaccttatttgtagccacactaaaagcacataatgctaagttggatcctgattagagctaccaaaatcaggagtttcctactctcctccactctgacctttgttttttagtagtagattatagctgtaagtacaggtttgatttttatggtttcttttgcttttctttatgtatcgtattttcccttttattggtaactatgagtttattggcttcagattaagactaagagcacctttatctctttatctttagaataataattggaacatagtaggtaccccataagtatttgctgaatattactttgccaccagtaaaaaacaaaaacaaaacaaacaaacaaacaaaaactctaatttttccctaacttggctctgctttgttctttacccttcttcccctgctgcttaagccactgttggcctgtaagaaagattcacaaccatttgactcttcaattcctgaagagaattgtgatgtggacaacagcagagattgtttgtcaaagattgttttatgtttacagtcaaactagataagatgtgcatttaagttcagaatttgaccatacaacaattatgtccattttaatgcatagttggctaactttttcacatattttctctttacagtaggcaaccacggttacgataatgcgttagcagatatgcatccaatatttttagcccatggtcctgccttcagaaagaatttctcaaaagaagccatgaactccacagatttgtacccactactatgccacctcctcaatatcaccgccatgccacacaatggatcattctggaatgtccaggatctgctcaattcagcaatgccaagggtggtcccttatacacagagtactatactcctccctggtagtgttaaaccagcagaatatgaccaagaggggtcatacccttatttcataggggtctctcttggcagcattatagtgattgtattttttgtaattttcattaagcatttaattcacagtcaaatacctgccttacaagatatgcatgctgaaatagctcaaccattattacaagcctaatgttactttgaagtggatttgcatattgaagtggagattccataattatgtcagtgtttaaaggtttcaaattctgggaaaccagttccaaacatttgcagaaaccattaagcagttacatatttaggtatacacacacacacacacacacatacacacacacggaccaaaatacttacacctgcaaaggaataaagatgtgagagtatgtctccattgttcactgtagcatagggatagataagatcctgctttatttggacttggcgcagataatgtatatatttagcaactttgcactatgtaaagtaccttatgtattgcactttaaatttctctcctgatgggtactttaatttgaaatgcactttatgcacagttatgtcttataacttgattgaaaatgacaactttttgcacccatgtcacagaatacttgttacgcattgttcaaactgaaggaaatttctaataatcccgaataatgaacgtagaaatctatctccataaattgagagaagaagaaggtgataagtgttgaaaattaaatgtgataacctttgaaccttgaattttggagatgtattcccaacagcagaatgcaactgtgggcatttcttgtcttatttctttccagagaacgtggttttcatttatttttccctcaaaagagagtcaaatactgacagattcgttctaaatatattgtttctgtcataaaattattgtgatttcctgatgagtcatattactgtgattttcataataatgaagacaccatgaatatactttttttctatatagttcagcaatggcctgaatagaagcaaccaggcaccatctcagcaatgttttctcttgtttgtaattatttgctcctttgaaaattaaatcactattaattacattaa

SEQ ID NO: 370 - DNA, 1821 bp, Homo sapiens
ctcagcgtagggctgtgagggcgcagtccaccgccaggagccttccggtttctgcgcggtgcgcgacctcgtcccgaagcctggggatacaccctctcgagagcccgctgtcgccctccgttaaggtcgaacccctcacagttgctgtgggcaactccagcccaacattccctcgctctggttctcgccccattgggaaactcggccccacgcttcccacttttctggatgaggtgtcccctttctccccactaaaatgtcaaataacctacggagggtcttcctgaaacccgcagaggaaaattcaggcaacgcctcgcgttgatccataatgagatggcatcaacatcagataaaggtgcccaaggaagaaatgacaagaaagattctcaaggaagaagtaataaggcattacatctgaagagtgatgctgaatttaaaaagatatttggccttactaaggatttgagagtgtgccttactcgaattcctgaccatttgacctctggagaaggtttcgattcctttagcagtttggtaaagagtggtacttacaaagagacagagtttatggtgaaggaaggagagagaaaacagcagaattttgataagaaaagaaaagcaaaaactaataagaagatggatcacataaagaagagaaaaacagagaatgcttataacgcaatcataaatggggaagctaatgtcaccggttcccaactcctaagcagtattttaccaacttcagatgtgtcacaacataacattctcacgagtcacagcaaaaccagacaagaaaagagaactgagatggaatactatacccatgagaagcaagagaaaggcactttgaattcaaatgcagcttatgaacaaagtcatttcttcaataaaaattataccgaagatattttcccagtgacaccaccggagttagaagaaaccattcgagatgaaaaaataagaagacttaagcaggtgctgagagagaaagaagcagctcttgaagaaatgcgtaagaagatgcaccaaaaataaaatctcctgtaaagacttcagtgaaatagctgttttttaaaatatacttcagcattaataagttaattgtaggtgtgttctgaaagtgtctttgaatatgaagcttgttttttcatcagtcgattgtacaactttaaggaatacagaaaaggttgattcacatatgacttgtgaataatttacatggggtatctatacctttgtcttagatacctttttttggaaggataaattttatatttttctattattttaactagaattctccaagtttgaatatttgggcagggtttttgttattgtttgtatctttacctaaattgctcaggcattattccagcagtagatagtgactgtgtattactgaaattttacaattcaagagaggaaatcagctccaaacttagcttttccagtggatttgtatatgtacttgctttatctctttacccttaaaatgatgataccttgtattcaccattgttttttttaatgtcgtgaaataatatgtattatggcaacattatttaaacattcaaacatttctcaagaatgagcaacatttgtaactttacaatgtaattttatataatccaaaggtattttagaattcaggccatttgatgttttgtttgcttatagtgatgtgttcccaggcaaatgctgctttttttttttttgggactatgtacatacgttactgagattgtgtaaaaagtagatcctgaacagttatcacatttaatatttcttaaactgtaaaagtgtaaaaaaaaaaaaaaa

SEQ ID NO: 371 - DNA, 46385 bp, Homo sapiens
attcttttgctccgctccgtcctgcctgcttcggagctctgccttccagccgggctcggctgtgctttgtccggagatggcgagcgaagggaagccccggccaggccaggcctggcggctcccgctggagattgggcgcgctccgttcccggcgccgcggcagcagctttgcaactcgcaacctggctaatttcctgcgtcctctggcaccaggaaagaggacaattcttctctcgggctgcccaagcgacagctgtcagaggggcaggagcttctgggagccaccgtctgaaggtgagacatgtggggaggagataggagcaaaggtggtgaggcgacagccggcggcggtagcggtgggagagggcacccagggaggctttaagaggggcatactcccccttacccatactcacccattcacacttgcccccatcacacactacagcccacacacgtcacacacacaggcacacacgcgcgcacgcacacacacacacacaccactccctttctctcccctccctggctcgccttggcagtaagtgcccgccttccttcggccctccgtggcacagcgccaaggcacagggcagcatcccttgggtcgtctctctccccttccctagcgaccccgtgaagcccaaaaggaagtggcccggcacactgtgttccccgccagccctttgggtttggatttttgtgttttcattcatggccctatttggttttgttggattccccaacaagaggagaccatccttgacctgggaaggtgggaagaggtgagggcaaagtgcattaatccacaggcattttattagcatcagcacagcactttctactccgtgggaattggtttcagagagaaaggtagaagggggaaacagaaaaacttactaattcagccagagttctccgctcgttgccggcttcccttcgcccggtttttcgatgagagaggtgtctgaagcgctgggagggggaataggtgcgtgggtggaattctgtgttggaggagaggatgggattaattgggtgttacttggtgggaagtttcggtgcagaggacataatgctgttagcgcgcgtggcagggtcccgcagctaaggttgaaggaaggacgcaaaccgagtctgggcgatagggggaccccccaatccaccttggcgcaacggactggcgaccgcactccccaccttccgcgagcggggagaggatggtggagctgcccgggaggaagcgcagagcgtgctgctggcggtggctttgcgtagcgcggtggctcgaactgtagctcggcctaagtgcacatcagaccagatttgccccgagaactcctcggacagcgacaagaaaagagtccgaggttctttttgtttgttttttgtttgggttgttgtttccccaacttgagacaatatcttggtatggattcgataaataggaaggggctgtggatgtttaggacgttagcccgtgctctgcgtgcgctcggggcggataaagcggcgcatttgcatcctaggtccgccgccttcctgactgcggctgccgcgggccgattatttattgcgaccgtgctggcgctcgctgctgccacgccgtggccgtcgccgggaccggcgccagctgcagcccgcctcttgcagcctggcgcgactgctgtactggcccctcagagatttcccagcaagcagggtagagggggacgcaaggggacctggggggcgatcacccagagcctatatggccgggaaatctccccgcctcggctacccctgaccggagctggacgccgttatagactcgggtcctcccccacccccactccagcaccatggagactggttgcacaggccgcctggcacgtcatggctgcttctgtccaaactgcgcgtcccaaggcgttctgggggcgcacgctggttcagggaacactctggctttgggattctgcaatcggagagactacctgtagtcctgaggcctgtaggcctggctgctctgaggaggattggctatggcaaagaaggacggctttggctccaggagagggctgtgaagggcagaggccgcacctgtgtgctttgggctctggtctgggctagcgagctggctggaccgaggtggccttcaaggtcccacacctacatactcccagaccaccctccaggctggcagaggtggagctgttcaatgggcagcccagggcaagggcagacagtggggcccagctcgccgtcctgccccccttggagagaaactgaaaggtaagtcgctttctgcgtggctttggcagggaggagagagagccctggggtggccattctcaccatcgcaggagaggccctttggagggtctggggtgcctattcttgccggaatagccctctctctctagagagagagagagagagagaatatctggttggagaaatgatatgcactagccttggctaacatgtaaagattccaatgtaatatatgtttttccatcttagtgcctatagaagctagaaatataatgttttctggttcttagctgagaaatcaaattctcttgttagctggaacaataattagatcgagaatcctggtcaaggcatgacaaataataataatagtaaattgacactgacccaccactatgtgggacatggcggaatgaaaaggaaatcataaatgtaaacattgattgtcatctccaaacggttgttttcattttaaataataacttgcttaaaatcactgttgtctgataattttgtttaagaaaaaaataacacaaacatgtttttcttcaaacagctatttttaaaagtcccttttaattttttgactcgagttttcattttcacctattgaattctttccctgaagtaatgtgtgggaaatgcccaattctatcctctcattcgaggccctgctttatatgcaaagtaaaccctttccaggacggatcgactggggaacaggcatccggcttccaggggtagcccccgttgccgggctagcagccgccttccaggagtgcctcttgggctcttcggaggtcgaccttaggccagtcctttcccaattttttccctttgtgggaggagagttcaggaaaaaaattgaaaagcaaggaagagactaagtcattactagattcctactggaacactgccaattgccacctccccactaagtcctgaaccgggtgagcctgcattggccagggttttacagatcttgtaaacagtctccagaaatccatccaaatcacgtaaatagtctttcttcaacctccacagaattgaggattttaaagctaattcaaggggttttacaagcccaacaaacacagttgtaaaaatgccattgggctgctatcacattttacaaaacgagattgatccatgtgttgtaaaagtcaactatctcgaaggcacacctctcaggcaagagtgagcagctcaggacaggcttttaatgtcctgtctggggaccgccaggcctgggacagcagtgaaagcaattcaggatttctggagccggtgagactattcccggttccggagcgactgaggggcggcagccctccctgcggtcccaggaagggcagtaaagagggcggccccaggacagtgccggttgtcgggcgccccggaaaccgagcccatcaattatcccgcggccttgggccctgcagagctgccctctgtgcccagcttggccagggcctctgcgtcttctgtgcctctggaatgtggacagagagattccacatctggatttttatctgcctcagctctgagcggttctcgcagtggatgctgagtccccaggcgctaggcaggggagcaggtccctcggctgtcttaggagcccagtctcacggccactgctctgtcggtcctttcttgttgaaaccagtggtttctggcctttcaattccctgggttcaaaggtgggatggggacgcccagctggaaggagtgctttgacaccaggcaggcgcgggccattgagccccttgggactcaaacaggatgtgtatgtgggaggagggaatgggtgggaagaacctacgtttggctgagtcctggtcagctcgaggtgatccttcagctctgggctgcaaggcccaggcccctggtgctagcggagaaggagagaatgagggagttcaccgattcctaaggcgcacgagtgaagagcatagagtgaaggcctggtttctcatggcccttgctccagctcaagaactcgcacccacgaataggggagcgctaggggaggggcaactctgggccgtgcctggagtgcaggccggcagggagcaaagccacctttgtcactgcccctcctggagcaggaccttcaggtttcctgtttggaggaggaggggcggggaacccgcaaaattcaataaagcaaaaaggggaggaggaaggaggggacctggcggggcctttgaggcggcccaagcattagtgtccctactctggcctgatctgctcgccactgaaagggccgtgcccgccgctggcgttcgggaagagagccgggccggctagctgtgcgcgcccattaatctgccgggcgggcggcgggcgggcgggctgggggctgtttgtaactttgctgcctcggtcgccgcggtccccggggagcgggctccggcgttcgctcccattggccgccgccgcgtcagctggtgcgatttgctgctgtcgcttttggcgttcggccatccagaaacaaaccagttcgatgactactaatagttatagccagatgtactaatacacaacaaatcacagtcctgcagaggggcgcgcaaatgagttcctattttgtgaatcccactttccccgggagccttcccagcggccaggactccttcttgggccagctgcccctctaccaggctggctatgacgcgctgaggcccttcccggcctcgtacggggcgtcgagtctcccggacaagacgtacacctcaccttgtttctaccaacagtccaactcggtcctggcctgcaaccgggcgtcctacgagtacggggcctcgtgtttctattctgataaggacctcagtggcgcctcgccctcgggcagtggcaagcagaggggccccggggactacctgcacttttctcccgagcagcagtacaaacccgacagcagcagcgggcagggcaaagcactccatgacgaaggcgccgaccggaagtacacgagcccggtttacccttggatgcagcggatgaactcctgcgcgggtaagacatatcccaagacagtggagggagaggggaaaggaggcaggaaaagaaagaaagaaggaggaaacagagtagaaagaggaatagagagaaagaaaggatgaaagaaccagcaaagtttctttggcttcttaaaagagaagaaaaaatcagttcccaatggggctatcaggccatggcagaggaagggcaaggccccagtgtccatgtaagctgacaccttaggggaggatgggggcactggcacgtatatgagacctgtgacagggacagcctgaagagagagagaggctggtggggagggacagcctgtccatgcaccctgagtaccctgctcagcttcccaagccagagggccttttgcactgcgtcactgataaataccctttgcttcccaaccccctctcctttctgcccttcagaaacccgtacagagaggtggccatttggcctcttccagtgtctccccaaagccttggagggccacagccccagactcaggatttttttctctctcctccctcatctcccccggcttctactcaactgcccactcttagccaacttctgccctcttctgagcccatgcctgagcttcatacacctgtcttggagggaccccccaccacccttggggaactttggcaccagatcagacagcccaacacaatcctacattgccagaaatcctagactacctatagctccatctcttagcctctggtttccaaggactccacagggaatcccaaagactcctaggaattccctaggacagagcctaatgcggattgttaaaattataatgttttccattaacatccactttatccttgggggagttctgcatttctcagaagggtcatataatttgggagaatgtgtaaagattcaagagggctgaccatttttaactcttcaaaaaatgtgttgagttccgacatggctggtcacagtagcatcctcagagagaccactatgaattcagagtgtgtacactacttacatggttccacaccacccaccccagacacacacacacacacacacacaaacacacacacacaccctgcatccccacaaaaacacgacctgggcatcccaaattaagaatgctcattctgttattttgcttgtaatggttttcctatgaggcagatttttcaaaaacgataatgtccaccccaagtcgttataggtggaaaacatctcgcttggtatgaaataatctcccattcagtatgctttgggccccagacatagtgggagaggctggagtggaggcggggtggtttctagtctgggtgcctcttgtgggaggcactgggctgactgggtcaaccctccaggccctggcttaccggcgcccggccgtttctgctcgtaggtgctgtgtatgggagccatgggcgccgaggccgccagacctacacgcgctaccagacactggagctggagaaggagttccacttcaaccgctacctgacacggcgccgccgcatcgagatcgccaacgcgctctgcctcaccgagcgccagatcaagatctggttccagaaccgccgcatgaagtggaaaaaggaaaacaagctcatcaattccacgcagcccagcggggaggactcagaggcaaaggcgggcgagtagatgcctgggcagggaccaggccagcgctgcaacctccttcggctttgcccccttgccctcgcctgttccccaacttttctccccgcctgctcccatctgggggcttccgcagcttcaggggagcccggagctttgcaagcgtctgtgcatttatttcttacaaaacaaaacaaaacaaaacaaaacaaaacaaaacaaaacaaaacaaaacctcacacacagccaataccagcggtggagcggggcgcactgcacacacccagtcccgctccacaaggatgcccaaaccggctccggagttctggggtgcgccctgaatgcgtctggggctcctgtgctagtgtctctgagctccccgacctcgggacgcggggctgctggggaggaaagagccctgggccgagccccgtttcgtgtctgggcgtctctgcctaagtccctcgccagtaagtcccgaagggcatcatcaaatcatctctggccagtggaaagagggggtctaagagctggagcccggccttgtcgcggcctcccaagccgcctcccagaacaggaaggaagctcgaggaacaaagggggccccaacagagcccagtctctcggtcccgcgtgtgcaaccgtcagtggaagagaagcagcctcagccgaggcgagttaacctgggcgcgggtggaacattacagcccggggtaggctcccggctccggattcccgctcccagcctccgatagcgcccgcgtcgccgccacagcagcgttcaggacccaacgaggggcccagggccatgggagccgccagagtcctggcttccagacgtgccaggggcgcctgcaacgccgggcctccagcggggagactccacttgcctctcagctatatttgtgatttacttgagtctttcggagccgtggaaaataactacagagatactaggcactgccaaggaatgcttccattatcgccctcattttactcctggaggtctaagcaagaccccagtaacccgccccacggatccccagaccccaggcagcctctgtggctgcagggagcctgggcccactcgctgggttcaaggagaaccctccgacttggggcccggctggctcgaggaaccggaccctgtgatgaagattttccaggctggatacgtaagcaaatcaaatcgcaaactaatgacacgaaaaccatattcacacgaaagaaaaatcgactacggttataaaagtgtatggaatttgacctcgccttggagaaacactacacaaaagctatctttaatagacgcctgtcatttaagagcggcagggacactgtccctcatgcgctcgcaaaaacagagccgtaattgtagctgctgctgctgcgggcaggatttatttctccaattggctaaatggctttcccccttccccgaaggtgatatctgtattttcaaaattcagagctgctggcaggacggtcagtaccgaccccaacctcgacacaaaaataagaggggctgcaaaacgggggaaataaagttgttgtaaataaaatgcaagtcaccacctccccccaatcctctgcatcctcgccgggcgcgcgatcggcagctgacggcctaacaattggtacatcctaatggaactgcgagggaaatgcaataattttgccataatgggctgtaacctcaattcgaccccggcccttgcagcccccggtcggaagctgggcgatgagccctgcctccagcgggtggcgctcgagtccggctgaacggcggcaactggcggcgggcacgcgcccggggcgcgcgcgccacccccctcgcctccacccaactcccctattagtgcacgagtttacctctagaggtcatcaggcaggatttacgactggacaacaaaagcacgtgattcgaagtcgtaccccatatttgggtgcctacgtaggagggaaccaagtacatgtcccagtcatttccataattcatcataaattgtgcaagggtgctatagacgcacaaacgaccgcgagccacaaatcaagcacacatatcaaaaaacaaatgagctcttattttgtaaactcattttgcggtcgctatccaaatggcccggactaccagttgcataattatggagatcatagttccgtgagcgagcaattcagggactcggcgagcatgcactccggcaggtacggctacggctacaatggcatggatctcagcgtcggccgctcgggctccggccactttggctccggagagcgcgcccgcagctacgctgccagcgccagcgcggcgcccgccgagcccaggtacagccagccggccacgtccacgcactctcctcagcccgatccgctgccctgctccgccgtggccccctcgcccggcagcgacagccaccacggcgggaaaaactccctaagcaactccagcggcgcctcggccgacgccggcagcacccacatcagcagcagagagggggttggcacggcgtccggagccgaggaggacgcccctgccagcagcgagcaggcgagtgcgcagagcgagccgagcccggcgccgcccgcccaaccccagatctacccctggatgcgcaagctgcacataagtcatggtaaagccagcctttttctaaatccacgcgaccgcggggacgcggctctcggtcccccctctcttctctgccgccctctcccagtctctcttggtctcatttctcccagccctgcggagctctccttgccgttctccctcccctgccttcctccttcctcctcttctttgcgagcaccctgcgctcacaaatagtgggggaaatgggcgttctctgggacagtttagacgttggaagggggaggaagcaaaaaacccctctggaaccccacgccttgggacgcgctcccgggtcaggccagccgagcaaggcgcagagaggtagaggatggctgtagcagccgtgaatcgggcttgtcacggcggataatttatgaggagggctacgctggggaaacagcgttactaattacagcccccgaaaaggggcttgggggaaagaatcgaggcgagagcctgcaggattctgaattttgggggcaggagggagagagaaggaaagggaagaaaaagaaaacaggctccccaaccctgcaggctggaaacgggaggcggctctcggggctggaactttgagggagggtgacccgaaggccacttgggcgctcaggaaagggccttgcttcctgggtttctgtgcggtgggcagcctgggagggctgtgcctcccgatcggggcgcccggggcagggcggagggggcaggagaggggccagggaaagccggagtccgccgggacacggccccagcctcagatgggcagattgttcccagggtccaaatcgtattgttttctttctagaaaggaagagagaaggaaattcgggaggggtgtgcgggctggtaggcagaacttgttgagcttttcgcctgggttccctgctcatgacccaagcttgtccccctggcggactttggaagacaggagttggtggctaaaccgctgacttttctattgcagacaacataggcggcccggaaggcaaaagggcccggacggcctacacgcgctaccagaccctggagctggagaaggagttccacttcaaccgttacctgacccgcagaaggaggattgaaatagcacatgctctttgcctctccgagagacaaattaaaatctggttccaaaaccggagaatgaagtggaaaaaagataataagctgaaaagcatgagcatggccgcggcaggaggggccttccgtccctgagtatctgagcgtttaaagtactgagcagtattagcggatcccgcgtagtgtcagtactaaggtgactttctgaaactcccttgtgttccttctgtgaagaagccctgttctcgttgccctaattcatcttttaatcatgagcctgtttattgccattatagcgcctgtataagtagatctgctttctgttcatctctttgtcctgaatggctttgtcttgaaaaaaaatagatgttttaacttatttatatgaagcaagctgtgttacttgaagtaactataacaaaaaaagaaaagagaaaaaaaaacacacaaaaagtcccccttcaatctcgtttagtgccaatgttgtgtgttgcactcaagttgtttaactgtgcatgtgcgtggaagtgttcctgtctcaatagctccaagctgttaaagatatttttattcaaactacctatattccttgtgtaattaatgctgttgtagaggtgacttgatgagacacaacttgttcgacgtgtagtgactagtgactctgtgatgaaaactgtgactccaagcggtgtgtccctgcgtgcctttataggaccctttgcacgaactctggaagtggctcttataagcgcagcttcagtgatgtatgtttttgtgaacaaagttacaaatattgtccaagtctggctgttttaagcaaactgtgatcagcttttttttttttttttttttttttgtatttgtttttaaggaaaaaatactgactggaacaaaaaataaactttctattgtaagttctcttggtctggtttgtgccaaatagtgagcggctctgtctgcttttctgtctgtctgtgcagtcttggaagctgttgggtctgaggctacctgagcagatgacctgtgcagggagacctcataccaacactgtcccatcgcttccctacctctgacccattgcaaagttcagggcagaaggtggaaaaagctgtaggctgttccaaagccccagaacaccctgtccatctctgaggaaaccaagttaacttgctgggtacaaaaaagagagaaagagcaagaaaaaaggagaaaaaacccagggctttgttagccgccctcaggccacacagatcctgcctctttcctaaggctgtcctaggcctccacttgctgaagacgctgctatgtctgtctgtggaccccaaaccctctgcccttaacccatcccagcaccccttccccactcttcacccgggacccagttggcttcttttgctacaattaatttgctacaaattgaaggtacttaccccatcctagctcgattgggaaactcctcagagcagctaaagcgcaactagagatttgcacatttaccgactgcttacactgatgccgtctttccttttaaaagttataaaacagtaaactttataagccccagttccggctatatgacatttgggtgccaaatgaatagggttttgtctatgaattagatcgtaaaatcatccatagcacagacagatcggctcactggctataaaacgtcacgtggggccattaaagtaagttttatggttttggggagttgacatccaacattatataccacataacatataatctcactaacgctggactccatttgactcttttgcaggctacgtgtgccgcctggccattcaaactgtcaattttaggtccagaagtgtccaaaccacaagttctcaaaactctctgaaaaatggctccctccgagttaaggtaagctcgcctcctgagcgctttcaagtttatttgtactttggaaactttctctctctctctctctctctctctctctctggttcaataactcaggctgcctctgaattcgaaaaggcagagcaaactttccctctgcccaaaagagcagcgccaggagccaactctgcggaggcagcagagtgagcagcgcctgtggccgcgccgcatccccaggcctaactttaattgcagcacaaccgcggatgttaatgacttccgctgctcccgccggcgtgcaaaaagatgatttttgtgtgcgaatgggcctgtgtgtggggacctggcagggccgcacccccagtcccccgcgcaattgctgggccggccggggccagctcctgggggtcgcggagccctggggtcggggctgggagacagtggggcgccggccgcgggcgccgagggccgcgctgcgctcaggagtttgaaagaaaggccggggcagggccgaggcggactctggcgggattccttacggggctgtggcaatatgtcttcgcgggccggggtcatttggcagggctgaattgaggcggcggccttcggggccgggtttcaggctagctcgcgagagcgggagggtggcagaggccggcgaggctggggctgcacctccaggctgggcccccgggttgcaaggtggatcctgggctgctagcgcccactggaccctgaggaccaaggatccccaccctggtgtgggggggtgttcaggaccccctcccccgcacccgggaccaggccctgaaccctgtttgcctgcatgttctttttatttcggcgggactgttctcagccgcttgtgagtctgaagcaataaactttatggccggatttaactttagtctttgaatccccaggctaattgaaaggggttaaagcgctttcttttcttccgctttgcctttcttctccctctcttctttcctgttcctctccttctttgtagaattaaaaacatctacgcacaggaccctcagaaggcaacttaggcggccccctggataacattaagattggagaaattcactccccctcaacatacaggcgaattctctgttccaaactgtgctctaaagttttgggggaaattgaggtgtcttcagtgcccaacttaaaagtccccagagccattaggttgtttttcctgacacatcataaacggtagtttagggaagaaattggtcctttgtcagtaggagatttccgcctttcttttgttagttgctctttctgtttgatcccaggaaatttacataatctatgatttccagaacagtctccaaaattgcaccaatgggtgaagtaaggtgaaataagtttatcctgggcacaattccatattggccccagtcaccccttctggccccaaccccccatattcttcaatggcaaaacccaagcccagtgactggggactgtggcctgtcctgggatctttttctggatgggtacccacaagggacccagtagatttcctccaatcctattttaggaattaagccaaattctcctactgcattcagaaatgaaacaaaaaataggatctgcttttctccttaggagctgggcagttttcagcaagtattaattggtaaagatacctattaagtgcttaaagtgaaaaaattgaaagtatagatttggaatttcaataaacttattgtgcagaggccacctacactcaacataagtccaacagatgtccctaaagtcagaggtccagaaagcaaaacctagaaagtttttttgaaaaatcaaaaccctcccacaagtgctacttctcatgaatagtggcaaggtgaagaatcctgaagtcattgtgtgtaacctattaaagtaaacattggtatttcagcattcaagaagatgtgtccacatcttagtgggaacaaggatataaactctacatgggtatgggttctcttttataatgttatgtgtctgtgagaatactggattccttgttttgctgctctgaattttgggctccttattggaaaatattgcgttatggttccattttagttactgatttggtgatcttgcttgagtgatttcttggtgattgaaattagaaaaaaaaaagagtgacggggattctgccagtttaatttgagttacttacacagaaaatatccacactacttcatggccatattccaccctggggtgtgggaatgagcagaaagcctgttgaagtcatatccagtaccacagaacatagagaatctttccaaggaatgagaaaaattacaggctgtaaatattgtcagcttgcttatttctgtctgttttaatcttcacaaaacttaagtagaatttaagagagcaggcaaacccacatggccacatggaattaaaatgactttaaaaatacatcatgcagtcagacctatgtgttactggaagatttttttctttcttcctattttcataggaagcataataaagaggatggctggttttctgctcattctgtagataagttatttcttttgtggattcttttgggttgttcttgcagaggaacttactaagaaaaaatatgtctgtcactgagggctttatgaagacatccagcctcagccggtggcagaagtgcgtgtctgtgctcctcctcagcggcaatgtgcgggggctcgtttgttcccacaagctgaagagacaatatttctgaactataaatacaacaggaagcttctggtcacacttacttagtggtttgttagggtttccatggtctaatttcacaacattatgccaagattccctttctcctgctctttcccctgcttcattgttggcggctctgagagagcaagacagaatttcccaccaaaaaacagagtcctgttcatttgttgagattctgagagtattatatcgaaataattagtgagtggaaagcaaatcacatcttaaaagataggcaattaaagaggaaaacaatccttttagcttaaaagatgcccttctcagcctcccccctgccttggctgggggtctgtccatggcttgcccaccatggagagtgcagagcattgtgggctccctccctttggtttctgaggaggagtttccttctagtcaatggcaaaactataaacggggctcccaggcagggctgagggggtcagcctaagctcccacccaagtaggggaggggatccacagccccagccattctaagccccagaacttgaaggtctgcccaggtttgttttgtttgttgttgttcacaaataaatttgttctcccaccaggtcccctccccacaaaccagtcttttcaataataatatttgttatgaaggttattagataattattgcgattttgtgaagcagcccttgctggaggtgaagtctgtcatcgcctaacaaatgacgcccgcgcagttcactgccgggttaagtaaatgcagagaagataaatctgcacaccctaggaatcgccagcagagcacgctttagtacaagttcacagtcaattcacccgcttgggccagctctcccaacaattagggctgcgtctttagttttaaataaagggaaaaagtgtctccacctcccattgcctgctttcccccatcttctcttttctttcactttttgcaaggttctcccattctgctccaaattttccttgtaaaatagaatcacgagtgatttcaagttaatctagttcctaggtgctaacgaagaggtcataggctgatttaacaaaaagtacagtcacaaacacacaaaaatatccatttcaccctctaatttcaaatggcagtggcagaagcagggcatcctgagatgctggggggccccttccccctgaaagaagaggctcggctttgtgtatctttgcggttagtgcgttacaactgcaggtcaaaaagttgagggtcaaaagtttacattgtgcagtgctcttagtcatctgcccagacagagtttgatgtcaatgttagagctgtgatcttgactatcagcacaaaagataaaatggctcagagtgacgcgtgtatcacggtatggactccaggtgaaccctagtggttgaatgacctcaattacggaggaaaggatagaaaattcctcttttcaagagtaatacatgctgtatctcatcttgaattatcgctcccattctgagggaatagcagcaggtaaataggcatagattactgaaacatcaacaccttaggtgttggagaaccaggagtctgtgggtttgtcacaaaataaaaatgctaaaaactcatctgtggagctttaaaaactaatgtcacaagtttccaatatttcattatgccttcaaaggcaacagaatggtgcaggaaacctcctttatttgaaaagagggattctgattggccggttttttgtctttttagtacacatgatgacccctaaagtgtgtaagaataaatgcaaacacagacacttcttgcaaaatataatctttgcagttttcaaacacagaatatgctttttctgaaactacagtccgctgaatgcaaagcgttctgagatctgagaaggggaaggaaggaagtggaaaccctcctgaaagacacagaattctcccttcaccccttccaccaccactgccagtgacaaaatgcttactggtgccatgaaaatgttcctgtttggaaatttttttaatgtttattattaaaccacaattgaatgtaagagaaatgctacaagctataagtgaataactagactgtagggaatgcagaaaggtgaaatccacaaataacaggctactctgtaagaccaccaggacagaatagaatattttctattcttcagaatgtactttttaatgatacacgtggaattaaaaaaaaaagccaaggagaagataaagcaacctaagaagaagggtgggagagcagaaaagaaagagaatagtgtattaaggaagccgactagaaccatgcctcatgtgtgagttgcaactgaagagctaaacaatattttatttttcatgcatctagaatggctttaagtgttggtgctgtaagaatctattttccagaggacatatttcccttttctatgaattgaccttcaagggatcagtataggaaaacagagaagagaaaagtgaaatattttccctaggtttttcttttttaactttggaaataattcatctactcagaatgtggactcttgcaggaatgtttaagatcatcccaatattttggttgattggatttaatggtgccaggtatgttcagtggtaaagtaaatattttccaaacactgccttcatggaagtaatcagggtgcttctgtgcaatgtgtaaagttttcactctggccaagagcttgaagccaaatgggggtttgccagatgaaacagaagaaaggaaacaactgtggtgattgctgttgcagcagtgaacatttcaccacatttgggctagtgaaatgaggaaaactgaaacccctcgatgagtcaacaagacaattacgtgtctctttgggaaaaacctttttattgtgctttttggttaaaaacatgtgacacaccttatagacatgtcagcttcaaaaaccatagatacctcttagctagtcttcaaagtaaaagaaaagagtacttgcagaatttattgcttttagtgtgcttgctttatctggaggattttgaacctcaggcctctcaaacaatcccagttaaaattcatgtgtaatcccaatatgaatatcagtcctcatccctgcgttgtgtgcattattttaaactactacaagaaaattatccccaaagaattaattggtcaaatggctggtaaagtgttgttcctctcaaatcttgtgtctagtgtaggtggtggggaagccttcaaatgccaccatcaggcgttttgaaattctgccattccactgttcagctctagagacatgcatcagatagagaacagtctgggggactctcgctctaaagaacaaaggacaaatacagtcaatacattccataacgtttacatttcctttggcttttccccttggtttttcctgagaaggagtgacctgggcaaagcaccctgctctctaaaagacactgtatagaccttttagaagcgcaaagtccaaggccgaggtgaacttcaggtcagtgcgtctaacaaatatgaaaatgtcggctagtgaagggcgcgccttgtgatttaacaaagactgtcaatgtgtaagattaataagaaacaaaatgcacacggtgtcactgttcggtcactttgaaacttgggacagggttgcattcaagagggaatgctgttacaaatatattcaaaatgattcaaatcagattcaaaccaagctgcaaaacattgcctcccttgcaccctccctctccctccgactcccttcactcttctccatctgggattcgaggacatgatgaaaagttatttcacctaatgggattttaagaaagcttttgttgggaatatatgttatccctgcacgtggaaatgagcaaacgtgctcaccagtttcctaaggaaaggataacgctttcaccccgcttgggactggagccagttggtgtgtgaggattagcatgctccctctctgctacatttcagggcatcccatcttttctcaggcgagatgctgctggtaaacttcagtttgtttattaattgagttagtttcttcctggctttactttggtgtcttggatattgtgtaaaggcaagaggtattttttttaaatgtttttcaaaagattatttgattcaatggaatgatgctatggtttgcaaagggagattgaggaaggttcagaaaaggtactgagattgtttattacagccataaatcttgcagtaaaatgtcaaaatgtcggtgttgagataacacttggtggtcctggctccgtttgtgtttatgatacgaaccacaaagacaagttacaggccttgggggattctgtgtaaggccatcttcctaaagtaatagaatcacacaaaacacaggcacagctaactcgtttgggttaaccgtatacaaaacagtgtttatgtctcgttaatacttaaaaatagaaacttggtacaaggttctgaggctaaacaacagaattttgtgttttagtgtctgtaaatattaaacagatatggttaagaccctagtactcaaggctgatgacatgagaaggagggaagatttccttgtcatgctttttgtccccctgaaacttatagggttcagatttgtaatacgtatgtctatatattatttatattacattttatataacctatgtgtatattattttttcttgctagggagagatattggttcaggtagatgtatcacattctaaatttttcctccagtctagagaggatggctaaagattacactcagtgttgatttctgtctgtggctcaaatttctttaaaaacaaattttcagggtgcctcatgtgaatggacagcactcttcacactcatatacacctaacgtggaaaatctctttgtacctcttcagggtgattccagttagaaagctaatatgatcccctttttaacctcttttcctaaattagtttaaagattagtcccatataataggctttatgtggctaagcattaagtgactatccatcaaatggatatattccagcatttagtaactcatatgagtaaccagtatgaatgaagatagaattgacattccttttcaagtgtctccaggcttaggaaataattttccttgtctgcgttccagactcagttgtgagaaggctgtttatactgctctttgaaaaatcaactaaggtgcaccagctgaaaaatccttgcttttgcatgccaatatgaaaatatttttagaatggtgactatgctagtttacactgctttaatttaggctgaaaagtagaggatctagatatgtctactactcagaaaagaaagggagaaagcacacagcacaaataaggcatcagtatttacttcaaagatcaacattaggtggaattaataagtaatttatttgttaataatggcgtaattagtgtacccatcaaatttcaattaccaaatagcaggcaacagtctcctctccctcctttccggagcttctgatatcgttaatacgctaattttcagcaattcagaaattatagactgtcctgcaaatataactctagcctcagatactgcctgagaaagcaggatctaaaagagaaaacatgaaattcttagctggaaaagacccatcagcgatcagacccggcaaggtgtttattctacccttagcttgtttttgtttggggatagttctgaaataggaagttattgttttcaaagctcggttctgtggaggtgttgcttctatccattcccatccttgggccaccttctctctcacaatcgcacctagtaaatgcgggcatatttagctctcacatcgacaacccccgtcaaattagatgctattacgaaggttccaatttttcttaggaaaacacgaaacagattgtctctgaaagaaggaaaaaatgaaaagtgtccatccagttataatggaatggcctcgatttacatccttgggtcgatttctcttagctgcccgcccaccctttgcagcttctgccaagcttctcaaagcaagggctctcaggctgacacgcaaggagcagggtgtggggaagggggatctgcggttgagaaaatgtgtctggtggcctctcagtggcgtacataaaaaccaggatgcccctcggtcccaacgcccttcctttcgcctgttagcctagaacccctgaaggacacgaagcctgactgggttgcgcccgaggtcagcgctgagtcgcggccgccagacagcccgaggcctaggccagcagtagggcaggcagagggctcccgagaggacctacagcctgacagggcctgaattcccagcgggaaccaaagctggggggctggggtccaaagctcctgctccctcccccagcccaggggccggacagcagcatccatcacgcacccgcgcgtttcctgatccgggtccgcgcgcgcggtgcgcccattggtgggggcgctgcacgtggggcacggggcggggcgcgcgctgggctggggaggagcggctcgaactttggtggcggcgtctgcgggagggggaggagtgggcacttgacagcggggggaggggaagggcgcagaggaaagggggatgggaagcgaggcaggagggggaggggcctcggcaagcccagaaaaaacgacaacgcgagaaaaattagtatttttgcacttcacaaattaatgaccatgagctcgtttttgataaactccaactacatcgagcccaagttccctcccttcgaggagtacgcgcagcacagcggctcgggcggcgcagacggcggcccgggcgggggccccggctaccagcagcccccagcgcccccgacccagcacctgccgctgcagcagccccagctccctcacgcgggcggcggccgagagcccactgcctcctactacgcgccgcggaccgcccgcgagcccgcctaccctgctgccgcgctgtaccccgcgcatggggccgcggacaccgcctacccctatggctaccgcggcggcgccagccccgggcggccgccccagcccgagcagcccccggcgcaagccaagggcccagcgcacggcctgcatgcgagccacgtcctgcagccccagctgccgccgcccctgcagcctcgcgccgtgcccccagcggccccgcggcgctgcgaggcggcccccgccaccccaggcgtcccggcagggggcagcgcccccgcgtgcccgctgctcttggccgacaagagcccgctgggcctgaagggcaaggagcccgtggtgtacccctggatgaagaagatccatgtcagcgccggtacgtggcgccgcttgggaggcgcgggaggtgggccggggctgggcctgggttcgagggtcggggtcaggagggagaggctcaggggaagggggcctcgggaggggagcccccatctgacccgggctgcggtgagatgtgggtatgtgcgcgccagccagccgcctgatcccaacatgagaacccttttgtacccagggtccctttatcaggagatttacgagacgccaaactgttagggcagtaattatagcccccataaatttaattgccctggcagaggcttcaggccatgtgtctttgaagcttttcttcagccccaatgcccagcaccattctttatggctctcgggtgtttcccgttgtcaatagcctgtgaaacattttctttgccgttttatgtatcttgcgtgaacttggtgtcaggttattatataatgatgatgtccaattgctcttccccaccccaccttctctctcctcctcctttccctctcttccgctccctcctccttggccttctatttcggggttctgggttttcagttaaccccagttataacggaggggagcctaagcgctctcgaaccgcctacacccggcagcaggtcttggagctggagaaggagttccacttcaatcgatacctgacccggcggcgccgcatcgagatcgcccacacgctctgtttgtctgagcgccaggtcaagatctggtttcagaaccggaggatgaagtggaagaaagaccacaaactgcccaacaccaagatgcgatcctccaattcggcctcggcctctgccggcccaccagggaaagcacaaactcagagcccacacctccatccccacccccacccgagcacctccacacccgttccctcctccatataatcttctagagatcttaaccagtttctatcccttacctgcttttctcttctcttctcctgctccgttcctcatccacccctccccatctggaccataatagacaccaaaacaaacccaaattggtgaaaagaataatcaaaaagaagacattatccggttaagagtctgtgctggttgccacccaagagagaacagttgtccaggatgctggctggtggaacaacctgctggcccgaaacaaggctgccaggtgtggatacctgagaaggactacttggtatcaaatacttttgagatggctacagtcagctagctggacagcccatgctgagtggggacatacacttgcatctttgttgaaagcagaagaagacagaccctttccccaccttccttacctcctcttcccccattaaggcagctcatccaagcttgtatttaactgaataaatgagtagacattgtggacctcacaagattatttaattcttaagatgtgtagaccttgatggtaggtgtgacatgttagtttttcttacttgcatttatttaagacactgttacagagatactgttgtccccttctggggcacggtctttggggagaggggagtgcatttagacttatgtggaactgtacaaattgtgatgtggctacatagaaagccatgtgctaagaataaactccatttaaaaaacattaaaaatctaagattcatgtgttttctaagcttttcattaagaaaacaaaagtcctctggattgagatacttgaccttgcatgtaaaaaccttgtagatagcttgagctggattcacttggattctgacggctcacataatttgtgtgtgagagtgtgtgtatgtatgttcaacttgagctgaactcttgtcaagcttggcctactgtggaaaagttccaaagagtaggaaggctcttgagctctgagagggctcctcttcttcccaaacttggccaggctttcaggcttcaagtctctgtaaggcatagaaacgtgtccttccctgcaatgaaagttgaaaccatgcagtgctgtgggcccaggagtttctgcagctgttctacacactgaactctgagcacacttggaaagaagtggtctctttggtatttggtatttgttgcaccttcacacttaatctgcctgtttcccaggagataaaaaatagtttgtgcaaagggttgagattagtttttgtttcctggctgttcttaaggtcctcttcactaactacagactgggaatttttgtttgtttgcttgtttgtttctcttttttgaagaaagagctttcaaataaactgaattttacaagtacactctccaatgtctcttctgaggaaaaagcataatatacccctaaagttcaccccatgcaaagtagacctgggagagtttactgctggaaaatagccaaactgggtcactttcctcaaatgctttgtgaattttctgctcgattccagagatctagatccaaaaggctgaaaatcaaaacccacttctcgatctctataaccctagtatttgtttactgatttagatttgatgcttactgcagggagttccctacaataagaccacaaaaacctgtgcacactagccccagaatattagaactgtcacctggccttgaaaaagtgcaacttttaagtaatgtagtaattttagcatagatgggagtaagtgctcacctgcctctgcaatatcagagaatttttaaacacatttctctcattagtggcaaaaccctttagccagtgtcagagctggtacccctttcacccctgctgccctgtgtgtgatacaaacaagggtgatccgttctatacctacaaatcagatttgagaggaaagtgatagataccagtctctgaagagccaagaaaattcgggagcaatcaaatacacacttaccttcccaaatcaggataaacctggcataaagtgcattttataaggtgtgaacgggtgccagggatttctggaggcaatgcaactgctgctgaaacttattaaccctccccctactacacacacttgtaaaacaaaattaaatcacgctgaaaatagcaattttcccaggaatcattaatcacctcaaacaataaatacttctttgtaattcaacagcaattctgaaaggcattctctgggaaaagtctgtggaggagagagggatcttcttgcaaataatgtggtctcaggcaaggacacagcatcttggctgtctgctaaaaaaaaaaaatgcctagactctcagtggaaattgagtgtcaagctgcaaaatctcaaatggcagactatcatcatttaaggtaaattcttatatttctcctttgtgggaaaagaggggtatgggaatattcattagcttcatgctgcaggcagttgtatgaggatgaaaggggtgactttctttcacttgcacttataagtccatccagaaagggaagagagaggattgagatcatttttctgatattccaggacaagatggcatttttgtcccaactgtattgattattaaggtattggtgagttttacaaaacccagattatagaaaatgatccaaatgattgccatttcttaagtgttgttttgcctgcttcaaattggcctttaagggagcttgttataagagattagaaaatcccactttgtgcttcaaaatcatgcattgtctgccctttgctagggcaaccataagagttcaccgagaggacaaattttctatctcattaattgttttttttttttaagcaaaccctactggcccctcaaatccttgacctttaaagacagtattttgtgtaagctctataattttaccaaaatgagccttacacatactctccttttctctctttctccctccctccaatacacactcatctgctttagtcacagagccaagttgtgcatgactccggagacaaaagttttgtcaacatctgaaatcgacctaaatcggataggagacactttaatggtcacagtttgaattaagtacttaacactctcccccttgaagaaaaatggcactttgcaggcttccttccctagttttgctgaaatctatgatatacccggtgttttattacagcaggaattcaactgtgacaggcatagtagagtacttaatacccaggatggagccatgggaagattacctagatagatgggggaggagggaagtcccttcgcatagcatctctgacttcatacccagttgtcccagcgggccccattcccctatatctcagcctcctccctatggggtggggtggggtggatatcaccatctttcctctgtccccctgttcccctaagcttccaaactctgctctcctcactgttgccttccctctagcagttcccacatagaaacagatcaatgactctttagaatgaaagagaagaaaaacccaaagaatcaatgtagcaaaaaagcctggggcttcccctctgaatgagtgggttctgtgcaggcagtaggctgcccttggcactcccctggtctctgcatccctaaacacagtcttgtatagcagaacacaggctcacctttctcaactgctgctgtgttgccccttccctatattatacactgtcccaagaataattctgcttcgtgttccaaagaaacacatgggctggaaacaataggaggaagagacgtgtgttctgttcccttgatggtatgagggaggctgctgtggctgtcttgaaaccctctaggctgcaacttacagaactctggcacctcttctgaagactccaaaatcacggggcaaccccttccctttcaagccagccctactttctctgggattgtttcctggggctgaaagagattcccagattgaaagactgtccaaagtgaaggagacctggaggccattttggttcaatcttcttaatttacagatgagaaaactgaggcagccgaatgatcctccctccaccgttccttaagttaatgagtacgagggtggaatgcaacctttagtctcactctagagagcaataagagcacagacatctttcctcttaggaagatattctgccaggaatggaggtatgcatctaagcttacacttgacctggacggtcacaggtgtgtacagccagagaagaaggatgggttcttgcctcatgggccatcaaagctgcttggggagattttgtaaccaagccaccctagtcatagagctcagacaggtggactggccactgggctcaggaggggacagatgtcagggcatctcggagagcagtggactccccactatccacaacggtcataatcccaggatgactaattctgtcatgcttgccctgctatttccatggtggtggcttgcctcagaccagggcaaggatgaatgtgccccggaggccggcagagccaaaaaaaggaccctggttgcagctgataaaggtgtagcgcctgtgcaagggagatattgaaattgtaatctttgaggtcacgtgactcattaaataattaatgcagatcgtcaggaatggatcggagtcgtcagggcctcactaggaatgaatctctcagaagtgagattccaacttaccatttgatttttaaaaacacacaccctcagatttatctccaaaggcttttaactccttcaggaaggcaggagagagccctcggcagggaggacggagctggcaggccctcaccagatcttggggccttttccgcagggtttctgcgagtccagggagcgcgccgcgtccggggaaacgtgagttcgggcttgggttttctgcggtcacatcctggctttggtgatgaagtgggacggatgcgcagacagttggtaatgttctgattcacgctggggaaggctgcagagataccacaggacgggcgcgcggctttgttcaattttcccggcgttcataaatcacccgcgccgggcgagcgagggagcaagcgagcgccaaaaacgcggagagagaggccacggcggcggcggcagccattgtaaagtgagagacctgggcagcatctctctgtgactcattagtctgaacgatttatggggtacagcagccatgaatattagacttggagataaggaaacagcaaaaataataaccataataattacatactcctaagtgtcacgcaggggagtggtgggtggcggcatagcggatctttctggaatgaaattgagaggcaaagtgcaggatggctgagtccaccttgctcatggtcatgccaggagccccaagaccagggggcactccctttggggacacagaaagcaagtttgaacaagagaaagggggcgcagcgcgcagcgtggatcctgggtccttttcctttggtttgtgggggctacgggtcgaactgtggcagagcgcagctaccggtgtgcggccacttgttccacgtgctagggggctccgaagccaggggtcaggggactcctcagctatttgatatcccctcttagcgctatctacagaattgcgtgaaggcagacagacagcggagggctggtttggggcaggctggggtaagaggttacctgggtctgagtgaaggggtagtcggggcagggataggtctgtagacgcaaagggcccgcagagtcccagcggagcgcagaacttctccaagccagggtccggcgagcggacgattctttcctctttccccatcatctcccactcccagaaagctgactgccggctcggtgaccatttgctggttagagggcaagagagggttgcaaatactgtgagggacgagatttgagcagaatcaaggcatcagatcggcttgtggccgttgcgcaaggccaggcaggagcagggcccctgagcaggtattgtaccagccggcgtccctctcagtttccagcagccttagctggcctgctctgagggactaggtgctgcggtagccccgccagcccactaggacctaaaaggaacgcacccagagttgaataaaccagaacacaaatcctcccaagactgcctctggccagtggaatgaacccgggtctgatttcgcgcctacagaaatgaacacatattagtgaggtttcaggagagtccgtgattgaatgctcccagacaaggcttccttttgttaggaaaggaaaataaagcaagcattcacattctccaagttgtggtgcctgaggagagagctctctgaaagcagcccacaccaccagcaaagccacttccaccttctcagcttcctctgtttgcttcatgtcctttccttccccactcccccgccaaaaaaaagaaagaaaaaggagaaagtatgggtgtggagatggagtatgtatttattttacaaaaataaatcaccatcttcggaccatttgtagactggaacatttcgagcaatgagtgcgccacacggacgagtgccctggtgactccctgatgttcgcgtcacccccagggccaccttggcgcccgcatgagcctcgcttcccactcccggcctccaactcccttccctcgcagccgccattcaccttctgctgtttatttgtctgcagagcgcctggacaccggaaaaggcgattccctgagcgcctggagttggagacaattcctggttcagaatttaaacatctttctaggtaagcgctgctccaaaactcttcgccgcgtgggactttgcaccagggcggttgggaggagttggccctccacggttcctggcaaccgcggcctgttgaaagaggttctggtcaatatttaacttcggaggagtttggagttggattcctttaagcttcttgccctgcgagtgcggggcctcaggcagacaaagagcctaccccaaaaccagcgatgggcaggagaagcggttgcagaaggcaaagatgggttgtggagagtcagagggagtgtgtttgtttcttcctgcaagccccaaacaaaccactacactgaacttcagggcaaaagcaagtaaaggccacgggcacgggcgcggcggccgctgcgtgggctgctctctttgtcgactaaggcgactgcggaggctgtgagttaagaaattgtcgccagtcccagctcgctgttgaggaaaacttgtatcacactcttgcagtttcttagaccattttgcctttccttcggcatgagaaaaattgctgtatttctaacctttaggccttcgcagacagcgggtcttcttccttctttcatcagggctcatcatcggttcttcctacgggaaaagcgtggttttctatgtcttggcgtttccttttcctatttgaaacaagggaaaactcttttaaattattttcaagttctgacttaatttgtcctcttagtttgggatgcagggaggtaattactgtggtttattaccttgtaaaagatccataaattacatgcctgtttgggggaggggctgctggaatagctttcagaagcatggtatgaaggaatgagtttgctttgttctttcaggaattacttctttttaaaaagttttgagattttgtattctatttcctaggcctccagtcttcccttaaatttgctcccaaatagatatcaggttgttaattaattgcaacatgatattcagtcgtgctataaggctgatatggtgttctggatacaattattttttccaatagaaggtaaacagagcaatagtcaagctgtgttactttctcagctactgtatgtctgtttatatcaaatatagatggaacatttcaggaatttgtaactctgtgtatatgatttccatctcagcaaacaacagaacaattgcatgtataaatagttgcaggaatttggggccttgtgtataacacaatatacacatccacacgtgtccagagaacttggcccatttctctactgcacttgcacccacaggaaatatctcatgttaaataagaatctatcatacacacacacacacacacacacacacacacacacacacacacgcacacagtgggctaagagagccttacctgatgctgagtagaaaatccactagatttaagtaatgggacaaaaatgttaagtgtacttttgacagagaaatcagattgcagtgtttgagtacagatatatctaatctgccaacagccttgcaaatattggctaacggtgtgtacccttggttgcctgctttttccaagccagctttccccctattttggctctggtgaccaggaccacagtatcagtcccagcgcaggccaagttggaggccggtgaagtgagtgaagagggactggcagctgggtttttaaaaggcccgtagctttgctccaggaaactggattgcagagtggcaaaggaggactgtcagctgctggttccccagataggctgcccaggccaagatctctcatagagaagctgttttttaacctcaaaagttaaatgtcttttgacttttcagatttttcccttctcatcccaccaaatcacccatcccaccccaagtcattaatgttaattgttaaacagcagttggagcattaactggatgttagcagccgtttggaggccccaggctggagctgagatgcctctgagctttgctggcgttaaggcatttctctgaagcagtaccaatgacttatttcattgatttatggcttttttttttttttttttttgacagagtcgcgctctgtcccaggctggagtgcagtggtacgatctcagctcactgcaacctctgccttctggtttcaagtgattttcccacctcagcctcccgactagctgggattacaggcatgcaccaccatgcctggctaatttttgtatttttagtacagacggggttgcaccatgttgttcaggctggtctcgaactgctgacctcatgatccacccacctcggcctcccaaagtgctgggattacaggcatgagccaccgcacccggacaatttatggctttaagagttttcatttgctcgactgttccaagagctttgaagggggccccttctcatctttgagttgatgcctcttcagaaacttgggggtagggaggaatttgccagcaatacctccaggtccctttctagggtatctggagagctcagtgtgaatgattggtgaggggtatgaggcaggcagcagtaagaatgagaggagtgagttcttgggggtcaggagaacgctttttggaaaccagcttctactcctgtcctctatcccccaaacctgagagaggcaggttttcacttggagttcttactttccagcttgtaacttagataggagctggaaaagttcacatggaggttctcttccagctacaccacagattgaaccttactgaaatattgtcaccagcttaggccaggacttgcttccaggggattaggtctcttcttttattgcctttctgatttggacaacccatgaacaagttctcttatgaaaggccttacattttcatcagaccccttctgttcctctgcaggggaggagtgaaggggaggaatcatgcacagcctcctgcagctgctataagtgagtcctcacactcaggcatagccagctgaagacccattctccaggaaaaaaagaatatggcctgaggatctcactagcctcagagcactctcagaagttcagaaactaagaccagaaaagagaagatttttagacagctcatgaaacggtacaatgttgaaattagtgggcaatgtcatcaggcagaaggcaggagtaggggtggaaccaagggtgggagcagcttatttgtttcagttaggttcttcctgagcacagttggttctctactggttttctgctcaagattattttgagagttctgaagggggctctttctcatctttgagttgatatctctataggaacttgtgtgggggtggggagagaatttgctggtggacacagaattgtcttggaaaagtgggtggacagacctgcctgtggagagggtcccagattgccttgttaacttaaggcactccagtgaaggttgattctttttcttttttttcttattttttttgggggggggggtctcttgcagagcaattagatcatttcctctgatattttttatgtttagaaacttataattccatgtatcactcagttgtgcactgaggaaatgcttaagtgcaagtttagtcagggcactaggtttctctagattttgcaaaacccggacccaccactctatagccaagcacatctttcctagtgggctcccactgaacaaaaccaactggacttggaggagatgctttaaccttttgtcaggtaattatgtgcctttttggtgtttcttgcgtctgtagtgtatggtgtgggtgttagcaaactccatacaatggcaggctgtgaggaagtccgctgtccaggccagttatttctgggcctgccccttgccttttgatatactggcctgtgggccagaggagactggggtgcatgggtgtgcaggatccagcttgtccgtgggtgggaggctgtaaggaaagttaaatggattctaaaaatgtgaatagcattgctgtaacccttgtgtttggagggtgtgtaaagaaatataagtggagataagcttgtatgtcttatatggcattcatgggaggatggctccaagcatcctattgcttagacagaactcttaaactcaaaactgctggtcaaggttccccacctaccctcccccaaagctaaatattctgtttggaaacctagttccttcagtggttccctatttcaaataaaaggatttaagttgacgtatgaccacgtgagcacataatacagcgcattattgtggcatttggagcggagacccagacaggcttcgcctgtgattacgttttctagattctctacagagccagagctttcccccaacccccacgcacccacctcctccttctccttccccttctccggagagcgctctctgagccgattgcagttttcagcactcatggagcggttctgggcgagctagccgatggaagtcgaggctataccaggaggatggaatttattttaaggtatttccgccgattgttcatatctagagtgagttatggctgtgagagacaaaggtcaggcgaggagaccctggctcatggacaggaccctcagcctctctcttcctttgtttctcttttagaaccgaaaccatttgaaagattcccagtagcgcctcagactctgaatttaattccctggaaagtgttgggggtgtaaaggagggggcactaggggggctcctaggtgggcccagtggcccccagtgcaagggtggctttgtccactgcagcagggcagggctggagtctcaggagctgatccccaggcggaaagagggtccagaagccaggtgcaggcagaggtggaccggcttgcagggctagattgcctgggaggggtgggggatgggtgggtgagaaggggaatctctcccaggatggcggtgttttcaggcaggggatggaggattaggggctgacctgagcagccggagcagctggaagagggaaatcgatgagggaaatgtgcagatgcgctgccattttattgatgatgcttccaggcactttgtttagtgccagattgcagagcatgcttccccacaagccggacccaagaagccagacccaaggatctgaaccggagggcccgccattgtttccctgagcaccctctgccccagagggttgaagaaagacagctcagacctaggagagccttggggtggggtgagcatgctggatgcccaggggctccttattctaacattcgggagacagaggaaggagggagccaggattaggtttggacttcatcagtgcgcctggtctgggcattccttgtgtacccccagctggcttggagagttccagaactggccagtgggccctgggttggagggaagtccagagacaagagtcctcaggaagcagaggcagacatctctccagcttcagagcctccaaaacagagctgtagccagggtggaggcagatgaaagttaaactgcatgtttccagattattgggaaagccccagctaattgggctttggggaccccacactcctgggaagggtgggaactccctggaaaggtgcaggaaactctattatgctccttgcagtagggaaagggatgcttataaggagtcagaggtcggatgtgcccctttcacttcttaaaatatagattatttctttctgtacgtgaaaaaaaaatcaaatcaggcatcccctacttgagtgggatttactaccccagaacgaaagggcccttctgccctccccagtgccggcctcggcagtaaccaagtgtttaactgaggccctttcaagtgctctaaaacaccccttggaaataaaatgtaagctttaattgctgttcaattacttgtcagcatttcatatgatttatgacctagttctggcgcatttttgacccagttaaagactcataaataatatagttttgctagaaagaatgagagagggaatagaggtttgttagaggcatctttttattgttgcttcagtgccagcaagctgaataaatatctaaggatggactctggttctacataaaagcatgcacagtgagaagccaagagccacatttatagagctcagattggtttttcctcccatgaaagtgctaaagtgagtccattacgtataatgctaaactattagatatcaaaaaaggctagtccccttctacctcgaaatgccagcttcaccctcacaggcaagtacatttcctcaataattttcctctctattctgtgattttggtgcctcttcttacccacgatattcctcaccttcctccccggctgcacagccttggaaccgccagaggccctctcagacgccttcaggaggacaccccttgaatggtagaaagacaccacgggcacctttgctgctccaagtattcttctagtgctgagaaaatcttttcttctagtccccctggatgagagatcgggagccacggggatttgggggaattggtggaaccaaggggtcctctcagtaaagaaaagctctgcggttttgggggagccgggtgaactgctgtgggatttgtctagaaagggcgcagcggcggcggctggtaatttctggaggtggaaatcaacaatcggcattttcgcttaaaaaacaaaacaccaatagcaaaccaacaaataaaaaccttccgccagcataaattattattttaaaataatctcgcctacgcttgctccaaagccagtcctttggatttaagcagagcggcttgaggctggggcaccgaccatctgcatgccaggacgctggaccttcatcttgaggtcggagccccacttctgcccgctgaggcccgcggcccaggagccacgtatcggggcggatagaggccctggccggaacgaagctcccgccccagatctccctgggctcccacggctcctcaggtctggtccccgcgttttgcccggcagggtcttggcgccagtggaaaggtatgctttcagggcgccccagcccttgctcgggagccctcggtccccttggcccagagaatcccttcccctggcaggttcttacggagagctggccttcccggcagctggcttagctgagaaggcggtgagagtcgcgtcagcagtttggaggagaaagtgcgggttgattattgacccacgccttctttcttcaaatgccacatccgaccgggcgggtttgaagagaaaatgccgccgaacggatttttgcggctggctctcacctcctacgcggccagctccccctttcaagttgctctgcaatatgccataaggagcaagtgtttgctgttttgtgctctgtttacagctttggggcgccgagtcataaatcttgcccagccataaatgacaaaaaccattggtatgcatgaggccaccctggcccggagtgctttttgatttctcccttttcccctggctttgtttttgctctaaggtgacactttggctccttgacagtttaaacatactacttatatttttaacaccttcctttgagaaggacccgccgttgacgccttgggattgcagcaaaagagagaaatctccatttctctttttgccacactcgtacccttgcagagtttgcttctgaagctgggagcaaaggaggctttaggaggaaaatcatccactttcaagttgtggcaatattaccaggcaaattcggacctttcttttgcccagctcagcgttactccatcccactaatgaggaaaatatgtatatacatatatataatatatattatatatataatatatattatatatataatatatattatatatatatgtatgttttaggaatccgtttgagaaaccacatattcctctgccctgcgtgtgtgtgtgtgtgtgtgtgtgtatgatgtcggtttctcttggggtcagagctttctctgtcttccctgtgggtgagctgcgtgtctgcactctgaaatgggcacatgagccctggagatccgcgtttctaaacacccttgtttgtacctgagcccagagcatcccatttcactgctggaacaagtacctgtctctcccaggacatttttctcctggctgctaggatgtcagcagtttctgcctgaaaatttaaccaaagagagcccagttggctcttgagggtctctagagaaaagccttatcccagctccccacacccccacccaaagatctgtttgggagttgcaggtgaagtaaactgggcaaagtctgggaaactcacttttcttggttctctttcccctcaccccacaattggaagtgtccagggcagaggaatacgaagtttctcaaacgaattcctaagaaatagagcccagcaagagagcccctttgtgagagccgtttgtcctcattagcataattttcctggactttcgtgacgcctgggagcaggagagggagggcgttggggggtggggggaggctgccctcctcccgccaccgccgagctccccttctccctccggtccctcccctcgcctcagccccatcccccacaccagcccgcgcttccccagccgccttggtctcccctcccgcccgccccaacaccccccaccgcacccccggaccagacgctgctccgcgtgtaatattcataagaaacatacccaagtcggtgccactagcccaggcagagcccggcgccgcactagcgcttatctccgggccgcggctgctgccctcgggaagggcagggggcgggggtgtgggggaggggtgggtgggtggggtgggtgggaggggggtccaagccgccccagtcggccctgggcgagccgtgctggagcagcgaggcggccacgctctgcgcggcggtgaccgggcctcggggtctccagcccgcctgccatctcggctgatgctgagggtccgtgcccatcccgcgccgaggggacccggccgggccgccaagccaggccgggggccagagcccgtgtcggagcctgagcccgagcctgcgctcgtcagaagttaaggtaagcagggccgcaaccggccgctcccggcgctgaatggcggagtttacgtctcggtgatttatggctgcagacttaaatctcggttcaagaagagttcacaagccggagcttccttcccggcagtgactgatacccttacacttcgagttcaggccgctttcccatccccgcccccacctcttgcctctcccctagcccagccttaacttttctgggttgcagagggaaggagaggtgggcaggggactcggggctcctatccgacgaacccgctcagatttggggtgagggaaggctaagaaagaggagggaatgggaagagggagcgatgtctgaaggacggaggttgaatttgggcacatcttccagagagacaatagggcttgcttcttgcactcaatttagcctcttcaactctctttcggctcttgcacctggggattattgtccagaaacagatctttgtggaggaatctcccctcatccccagcccttgcttggcggtacagagcaaagtttcctggctggcaaatctccaacttctttactaggttgcaaactttgggggctgggttggggtggggggatgtatgagctccaaggtggtggtctgctgacctcgaacaataggaaggattttggtgggatcccagaatcgaatttatattttaagtttacgagggctgttgtatgctctttgattttcaaagatatttttgttattttgtaagacaatgcacaacttgataaaaaggcttaactaagtagcaggctggtataacgtgataatggattagcaagtcactagaaatattgcatgtgcaaaatcagcttaattttgttttatctaatatcttgctgttcgagtgtctaattttcttaacctgacattttattttacacaagcctggtatctaaaaaatttgtaatggcagacattgacactgccaaatgtaataggaactgttttcagtaaaagaaaaggaaacggatacactaaattgctattcagttttaagttttactttatcctttatttactttcaaccatggtatgtgtagcttcctatttccaaaagagaaacaatgctccagggctcatgatcactgacaataactctggataagcgatgctgtaatttttaatcgaggttctggaaaattaattgtgcctgttttgcagatgttggtaagattgttggcttaataatgaaatctaaaggagtccattatcaacaatggaattataatcatctactggtagatgcaatacattatctttttttttctagttaacaaagcatctaatattcctggaaaacttgaataactctgggactcaatatacatagttggattgcatgttaaccattttcttttgaatttgttataattttcttgagtggtcagagggactaagattctgagtgtgtgtgtgggtgaatatttgaaactcacatggaacttttctgtgctgagaactagaggttgaccatgcagtggttgaaaacaaaaagaaaacagatttaacttttgcaaactgctttctaaatgaaagagggttgaggaggttttcaactgctttttagattttcagggttatcctttacttggtatttctgaagcaggtaaataggccaagtaacaaaatatcaacaacaacaacagcacacaaagatcaggaaactctggcaggattttatggcttgtgcttccatccctcgtcgggagccaaatgacccccatacatcaaattacatagcagtttctaagacagaacctattatcgttaagttggaaggagagttcaaactgtggtcatggagatgaacgctggtttttcaggttcctggaggggttttttttccccctctaatccatcatgttttaacaggtagaatttgatagttgccccgaataacagcaccttagaaagtccaagacaggaggttctgggaaccttctgtaactgggggaaagaagtaaagaagtgggggtggcttgctgggaagtgcctgagaaacagggagaggaaaggagtaaagaactctccaggattttagttgtgacttgctgggtggggtgttactgttggtccctcaccctaaacacacacacacacacacacacacacacgcaatgtgttccacacaaagttttccctccccccttggcttggccacaaggggttcatttggaggaggtgagtcatatccccaacaaggtggattaacttcctaacaagctcagcttctgaaatccagcatggttggatggggcaaattgcctgaaattttttgtgcaaacctctcttgggagcaggaaggtccaagaaggagctgggtgggaagttaccccatctcagggctcttttggcaaacatcagtcctaaagcggagaaaacattggcgacccaagctcccctttgcctcctcgttcccttcccaacattcccagagtggaggagtcttgggccctctggaggaggccaaggagcagaaactaagcgacaccccaagtttcttcttccctggaaaagaaagatcccagcctttttcctttctagcctatcaagcctttctccttttggatcccggctcctgagaatcagcttgcagccctcactcattctccttctccccggaaaatcccccaactccagacgcaagttaagcaaatatttgtagctgccagtaaattccagcggttttttatagcacggctccctgcgcccggggccaagtcgtgctgctaaatattgctgaccactttttcttttatggctttcatgtcacttagctattgagagtaagatggatttgcgcggagccctcaccgcgctgcgcttctcgccccaccaggtctgcgcggggcggccattggcggcggagtgtcacgtgaccgcgggggcgtgccaatgtgcgccctcacgggtgtcaaacccctgtcagagtgtgcgatcaagatcgtgaaacaacgcgatgcaaaaagcgacctactacgacagctcggcgatctacggtggctacccctaccaggcagccaacgggttcgcttataatgccaatcagcagccgtacccggcgtccgccgctttgggcgccgacggcgagtaccaccgacccgcctgctccctccagtctccctccagcgccgggggccaccccaaggcacacgaactgagtgaggcgtgcctgcgcaccctgagcgccccacctagccagcctccaagcctgggagagccgcccctgcacccgccgccgccccaggccgcgccccctgccccacagccgcctcagcccgcacctcagccccctgcacctacccctgccgcgcccccgcctccctcttctgcctcccctcctcagaatgccagcaacaaccctacccctgccaacgcggccaagagccccctgctcaactcacccacagtggccaaacaaatcttcccctggatgaaagagtctcgacaaaacacaaagcagaaaaccagcagctccagctcaggtaaaggagtgccttctggaagagggtcctctggcctggctcctggtccccaagctactgcccacgacatccagcacagcctaggagcgatggagcatgtctggaattcactgctcccacaccactgcccaccaaaaaggttttcatagtctttgcaacttagggaggtgataggcctctgtaggctggaaaacaccagagacctgctgggagtccctctggacttctccaagggcaagtagggtctagtgcagttggaatctcttcttgctccactcttggagttaggacctctgtgcagaaacaacctgagctccactgtctatctttttagcacagctcttctaatgaaacagtgacatcctccccttactgaaatgtggcagaataaaaacaggcctaatcaccctccaagacagaatcaatgctttgcctataatcagagccaatttttgctccagcagatggagtggctgccttacctctgggaagaccctactcagacttagtacaatgaaagcagccaaagatctcctgggggagggggatgcagacttatcatcctaatgggaaccacatgggcctcctgaaagcgggctccagtagaggaaaggccccaggctttaggcttcctagcattttggttacctttgcccctgccttctccagttgccagtgccctgctctgagcctgagcatctgggacttccagagctaggatctggggggccagggaagacagaagggtacaagattagtggacaaaagctggggctggctgcttgatgacatagggaaccctaaagaataggacctagcatgaagggcctaggcctccccaccagaaataccttcaatgggatctcttctttgggcagagaaggccttccagtttgaggtttccagtctgcccatctcctctgggtagagagaaaaaagtggccagttgaagctactgcctaattattgtcagacagtgtgggagggaaatgagtgtgtacattaggtttcccacatttcagttactgtgaagagaatggagatgctgagaccggcccacagggaggctgttgtccgataggccaaagggaccagtaaatgagtcagaaagttaatagctctaaacagaaaatccagaccaggaaggcaaaccgggggttctacttctctgtcctttcccccgagaaggctgtgatttgctccttggctaaatgagggagtatcactgttttacccaccaggagagaggatagcacctagttcctacttctctctgggacctgacggatgcaggaacctttggggcctggtggaaggaggggccgggctgggtcaggggctgggcggggccgcggcagcccctgacgccgctcttcctctctctgtcctcgcaggcgaaagctgcgctggcgacaagagcccgccggggcaggcttcgtccaagcgcgcgcgcacggcctacacgagcgcgcagctggtggagctggagaaagagttccacttcaaccgctacctgtgccggccgcgccgggtggagatggccaatctgctgaacctcactgagcgccagatcaagatctggttccagaatcgccgcatgaagtacaaaaaggatcagaagggcaagggcatgctaacgtcatcggggggccagtctccaagtcgcagccccgtgccccccggagccggtggctatctgaactctatgcattcgctggtcaacagcgtcccgtatgagccccagtcgcccccgcccttctccaagcccccccagggtacctacgggctgccccccgcctcctaccctgcgtccctgcccagctgcgcacccccgccacccccacagaagcgctacacggcggcaggggcgggcgcagggggcacccccgactatgacccgcacgctcatggcctgcagggcaacggcagctatgggaccccacacatacagggaagccccgtcttcgtggggggcagctatgtggagcccatgagcaactccgggccagccctctttggtctaactcacctcccccacgctgcctcgggcgccatggactatgggggtgccgggccgctgggcagcggccaccaccacgggccggggcctggggagccgcaccccacctacacggaccttaccggccaccatccttctcagggaagaattcaggaagcacccaagctcacccacctgtgatagtgggcttggggctacgcgccaggagagtctccccccacccaccttttttctttggttgcttttttttttttttttttttaggttcttcctgccctttccttccttccttttctctcttctccgccccgcactccgtttcccggtttcccccctcgttggtaaggcgtttttatagtttatgtgacgtagcaatcttggttgctggaatggctgtatcatagcgatatttatctcttcctgctcctcgataggccactggccctgcaccctttaccttctccactctttgatcagaaacagggtatatgaacaaattttctagtcgagttttcaatgtgaatttgttcttacattatggctcccgaggggaagcgattactttttttaattttaaattttttttttaattgcacttcttgtaaagagtgagaaaaaaaatcaaaggcgctttgaaacaggggctctctgtgcaaggatgactaagtgtacgtctttccgtgtgtgtatgctggtgaacagtcagatttatttatatttttttgcaagcattgaataatctaagttttaaatattatttatccccatccgttcgtatttatattaaagaattctgtaccctgatggttcagaagggttcttgggccttttgttcaattgtgtattggcgtacttagaattttttttatttgaaagagaaatataattcctttaaacggtaacgatacaataaaaccagagaagatccagcttttgaaaacagtgatttaggtttgtaacatccggcaaaactgaaaaaaaaaatctgtaaacgcgaaaaatactagatttgttttgagagttcttcattccttgctgctcacattctgagaaacaaaaagaaataaagtttttattctgaataatatccgtgttaagaaggggttctttggccgaagacgtgggtctgcgtggaattcaggccgaggcgagccggcagagcaggccggacgcagcagccctctggctccagcatggggcctggccaggctattcgcctggaagctcggcgaattctcaggatggcggctggggctccaggcggctgcggcagctctggtaacgccgtgcggcgggccagctgggctgcccggttcccagctgctgcggaggcaggctgagggcgcaggggctgccgagtgctgtgcacggaagaaacaaagacatcccggcccaaggcgcagcgggagcgcacaggtgccccgcggcccagccgggggataacgcagggcggtcttctgctccatgctcttcctcgggtcaaagcggaccaactaacgcctaaacctcggtattagccagccgcgcagaggatgccgagcactttccgggagcaatcggactcctggtctcctccggggatgcttcgcggtctgttatcgcgtcaggaggaaagaattgctccaaaaatctgcacgcggagcgaaacagtttgaaagggactgaggctcacccaggtctccagcaaacggaggactgaactggggagagtcaccctgagccagcccttccctggactgccggaatcccagcattagcttcctgctgaatgtagtatttggcattctctgaatttatttcctctccttcccccacccagctttctttttatggccccagggggagggggagagagcaaggagatcggtatctttgtaataaaactgcaattttataaa

SEQ ID NO: 372 - DNA, 26660 bp, Homo sapiens
gtgacccgcgctgtcccgcgctgaaggcggcggcctcggatggactgaaccactgtgaaagcccgaatggggggaaacaggcagtgacggccgctagggaaggactgggggtaagcgattaaagaaacttccatacatttttgtatcgcgccaggcagtcgtccttctagtcgtgtgggccctctctggctcgccccgaattccttttctattttgaagtagtctgtccttttgctcagtcagtaggcgagtccaagtgacagacacggacaggggggactttagtaacgtaaactaaacggtttccctagcgaaaggctcagacgccctgagcaatcgcctgttgagtctccactcttccagggtattaactgttgagttagaggacattttcctagcattccgggtactaaaatcatttcttgtccccgccttcagctccacaaatagttcagtcccgccccgcagcgtccgacgggaaaggaaagggggaggacgccatgttggacggaaccatctgctgccacacatggggtggtcaatgctcccatgagtttactgatgcacagaaacaaccttgctgaatggaattaagcactttcttgtcacaaatatatcagtttgatgattttcgggcgcggtcttgtggatgcgagtcctctcagggtcgttcgtgaggccccagggcgtgggtgcgccccccgccccgcggccttggtgcggcctccccgtcgcacgcacatggctgggctgtagccgtcgcggcgcgcggtgcggcctgggagagtcggaagcgcggcggccgcggagccctgcgagtaggcagcgttgggcccatgcaggacgcggagaacgtggcggtgcccgaggcggccgaggagcgcgccgagcccggccagcagcagccggccgccgagccgccgccagccgaggggctgctgcggcccgcggggcccggcgctccggaggccgcggggaccgaggcctccagtgaggaggtggggatcgcggaggccgggccggagtccgaggtgaggaccgagccggcggccgaggcagaggcggcctccggcccgtccgagtcgccctcgccgccggccgccgaggagctgcccgggtcgcatgctgagccccctgtcccggcacagggcgaggccccaggagagcaggctcgggacgagcgctccgacagccgggcccaggcggtgtccgaggacgcgggaggaaacgagggcagagcggccgaggccgaaccccgggcgctggagaacggcgacgcggacgagccctccttcagcgaccccgaggacttcgtggacgacgtgagcgaggaaggtgagggcgcccggggcggggctggcgagcggcgcgggagcgtggctggggttcccgaggtgggagatatcgtcgggctgtgccaccggttcgtgcagaagttccagcgagggtgtccgtgtgttcctgagaagccaccgagggaggggttcccgagtgccctggaagtgttctgagagcccagcgcctccccttttctttcctgaaaaaggggacagggtggagctcacttcgggagccaggcatttgcatgacaaccagaaatctgagagggtgggagagggcacatggggtactccgttatggctgggtgtgctgtgagtgtagcagctgggggtacggcaaaaaccgaagacccggtggcaggtttgcgggtctacgtgtccccagagctgaccagtcagacctcccaaggtctggatcggaggaacagcttgtggcagagccggtgattttgtcctcctgcccctcagaattgtccatctccagagacttccttagtgggacaggcaccctgtgaaattccagtttgatttttctttatctcttgcgctaaatctataaagagagttatttttccaggttttaatattgccgataacagccagctttgccttcatctcaaccttgattggatttacaggcatatttttgcttcctgtctcagagattttttcctgaagctacttctgatgagagctggtctcatttgtttttcttttgttttttagctctcttaagcctttaagttgggaacacatcagcctctgcagattggctaagttgatactagagtgagaaaaataaaaatacccttgctgatgtagccagcgatacaccaggacaatttcgggaataacatggagttgccaatttatgatttaaacgtatttttaaaaggctatcagagggccgggctgggtggctcacgcctgtaatcccagcactttgggaggccgagacgggtggatcacgaggtcaccatcctggctaacacggtgaaaccccgtctctactaaaaataaaaaaaaattagccgggcgtggtggcgggcacctggatttcccagctactctggaggctgaggcaggagaatggtgtgaacctgggaggcggagcttgcagtgagccgagatcctgccactgcactccatcctgggcgacagagcaagactccgtctcaaaaaaaaaaaaaaaagaaaaagaaaaaaaggttatcagaaatacaagtcagccaggtgtgctggtgcacacctgtagtctcaggtacttgggaggctgaggcacgagaatcactttaacccaggaggtggaggttgcagtgagcctagatcccaccactgcctgggcgacagagtgagaccctgtctcaaaaagtgaaaaattaaaaaataaaaacgctgtcagttactgtgaccattactatattacacttttttttttcataaaagacattttagcatgaaaagcaggaaggacaccacaaactaaagactttgggaacatctagtctacgcccctcagtcctgaggaaacttgtccctgaaggtggagtaggctgctgagaattcccagtgggtctatactgcttggcccaccagactctcctgctcagaacagtgttctttctaacgcttcaattgttattatggtttaaaaatcaaaacttttggtttaatgattattttgagcccttggatattctgctacttttttaaaaagcattatttgagcccatcgaattcacagatttctaatacgtagattacttctggaattgggaagagtcagaggatgctaatatgacgacagggttggccaggctgggtgacggctgtgggtcctcagcgggcccacgtggccctgaaggtgcagtgttggccagagtgacaggtgaggcatctggtcctgaggactaaggctcaggaagccgactttgtcatggccctcctggttgtggtaacgcaggttttgtgctttatgagaagagctgcccttcagggtcattgtgcaagaccgtaggtgactgtatcagttctttccagaagggccaagtcttccaaggagcaggccagaggtggcctggagtccctgtcttgctttattacttttttggtacagattagcttctcaaactgtaatcatcctttcagtttaatgtttcagctgatccaggattttaactctaaatgtcttttttggctcattaactattctttctctttctatttgctatttagtgttgagaattgttctcttctgtttttcctggagaccgcttgggaatccatgagccacgtgtaaccgatgcttgggctgagagtgatcaaggcgttgtgtcttcatggtgtagttacttcatttatttccttcctacgtgtgggcagtttctcctagactagacgctttgagcttgtgggaaggagtacccaatttgtgtaaaagttgagctttttattgcagccttataaattcagatcaggcttgtcaggctatttaattgtatggtaagtgctttagaagttaccctaggatttgactagtttccatagcagggtgtccggcactgcagtgactggcaactgcctttttccctttttttttctcttgttcgtctcaattttagcatcgttgaaaataaaacggcgattattttttaaggcagtattttcaatatttcctttttttttttgagacagagtctcattctcttgctcagactggagtgcaatggctcaccgcagcctctgcctccccgcttcaagcgattttcctgcctcagcctcccaagtagctgggattataagcatgtgccaccatgcctggctactttttgtatttttaatacagatggggttttgccttgttggccaggctggtctcgaactcctggcctcatgtgatttgccttccttggcttccaaaaatgctgggattacaggcgtgagccaccatgctgggtcagttttcaatatttccgaaagtgtttttttgagacggagtcttgctctgtcgctggagtgagccaccatgcccagccaacttttgagaataaatacagtaaagaatattttcggacatctgcatatttagtatgttggaattatcattattattattatttgagatggagtctcactctgtctcccaggctggagtgcagtggcatgatcttggctcactgcaacctccatctcctgggttcaagcgattctcctgccccagcctctccagtagctggaattacaggcacccaccaccatgcttggatcatttttctcgtatttttattagggacaggtttcaccatgttggccaggctggtcttgaactcctggcctcaggtaatctgcctgcctcggcctcccaaaatgctgggattacaggcgtgagccactgagcctggccgtgttctaaattctgacacgtgatgctttccagcagccctgcgaggcatttcatcacatcaagaacagcttcacctaccactaagaaaaaaatactgttatttaatctcagtgggggtggcagctcccacctgtagtccctgctacttgggaggctgaggcaggaggattgctagagcccaggagttccaggctagcctgggcagcataacaagaccctgtctctttacaaagaaaaaaaaaagttgtttcaggagcttgtatattctccagtctcctagtttaagtgccggtctctgccctgatagtgtttttcaaaaaggctctttgtgatataattaagaaatgtgtatttgggctctgcctggctcttggcactcagcgtctaaacccttgtaatttccaaagtggtaagtgtctttttgtagacgaggacttgattgatggctggggctccttgccagggaaccaaccacgtgattagagggtgggaccttttaggtctccccctgccacccagaaggaagagggctgaaagttgagttgatcaccggtgctcagtgatgtcattaatcacgcctctataatgagatcttcatagaaacccaaaaggaccaggttcaggggctccatgcagcggaacaggtggaggcttctgcagggtggtggcctggagagcacagggaggctctgcgcttctcctccatctgccttttcgtctatatcctctgtaacgtccgttataataagctggcaaacctagctctctgaattctgtaagctgctgcagtaaattaatggaacccaagaagcgagggatagtgggagccctgctttgtagcctgtcggtcagaaccggaggtgacagcccactacttgcgactgccatctgaaatgggggccagtctttggggctgagccttcagcctgtgggatctgatgctaattcctggtagatagtgtctgaattggattaagttagaggacacccagctggtggcccctggagaactgcttgatgcgacacccacgtccggtgtcaggcgttgtgttgagtgttacgtgagtaggaaagacactgtcacatccctgtctcctgcagttcagttgtttatccttagagctttttaacctaaggaatattgggtaaagattgttctgaacgaaggtgcgtggtggtgggctctgcagcggagagaggtggggaagctcaccccagacgcgcttcctctttgggttttttccccatcccctgtgaatggccatccagttcacggcctgaaaacatgaaaatcactgggaacaggaggtgggagaagagttactactttcatcccagttcactcgagagagggttcctccttgaataatttctggtaatttgtattcacagcacaaatgtgctgtgaatatattgagcatttaaatatttacttgtttgctaaaatcttctgtaaaaagtcagttttcattgacattgggatgggattctgcctgcctagatgttgcaacaaacctttcaaaatctaggcatctctggaagatctaatagtggatattcttgagatggtcttcttcatttgcattgtgcattgttaaaagcttttcactgttattctcctgtagtctttggttattaccagaacttaattgacctgtcttgactgtttacatttccatcaaagggagagaggagagttccagtccccccagctgtcatgtttaaaatctgaaacaagctagggttaggatttcttttgctcacagtgaaagcatttagacaattcattgtctcttcttgaagacttgtttagtgtgctcagttaatgtattaatgtttttcttggtaaaaatgatcatttgaaaaatctctcttgttcagaattactgggagatgtactcaaagatcggccccaggaagcagatggaatcgattcggtgattgtagtggacaatgtccctcaggtgggacccgaccgacttgagaaactcaaaaatgtcatccacaagatcttttccaagtttgggaaaatcacaaatgatttttatcctgaagaggatgggaagacaaaagggtgagtgttctcctgttggagaagtatcatctgtgtctggcacgtcatgatgagggagtgttgcaggagatccttactaacacagctcctgccttgcccaggcacgtgggccgttcacttcttcaggccgccctcagctggaagctatccagagcagtgaatgagaagatgataaagtttgtttttttaagttaaggttttaaagtttttaaaattatctagaataggccagcatggtggcttatgcataaactcccaacactcttgaagcctgaggccaggagttggaggctgcagtgagctatgataacgtagctgtactccagtctgggtgacagagcaagactctgtctctaaaataaataaataaagtaaaaactaactagaatagttttagtttctagaattatcaaatacaggtaatgctgctgcattttctgtgttgggcagtcagttgaaggatggcctcttgaccctcagttactcgtgttataatgaaacattctctgaggttctttctttctttcttttttttgagtcggagtctcgctctgtcgcccaggctggagtgcagtgtcgcaatctcggctcactgaaagctccgcctcccaggttcacactattctcccgcctcagcctccctagtagctgggactactggcgcccgctaccacgcccggctaattttttgtatttttagtagagacggggtttcaccatgttagccagaatggtctcgatctcctgaccttgtgatccacccgcctcggcctcccaaagtgctgggattacaggcctgagccaccgcgcccggcctctctgagcttctttctaatcttgcctgtaatacacaatattagactacttttaagttttttttgtttgtttgtttgtttgagacagtctcactcttgcccaggctggagtgcagtggtgtgatctcagctcactgcaacctccgcctcccgggttcaagcaattctcctgccccaccctcccaagtagccgggattacaggcgcacactaccacgcctggcttgcttgcttgcttatttatttatttatttatttattgagacagagtcttgctctgtcacccaggctggagtgcagtggcacgatcttggctcactgcaacctccgcctcccaggctcaagcaattctcctgccttagcctcctgagtagctgggattataagcatgtgccaccatgcccggctaatttttgtatatttagcagagacagggtttcaccatgttggccgggctggtctcgaactcctgacctcaagtgatctgcccaccttggcctcccaaagtgctgggattacaggtgtgaaccattgcgcccagccaagatttttttttaaacagctttattgagataattgatatacagtaaatctgcatagttttaaagcgtacaatttaatacattttgatgtgtacatatcacgaaaccatcgccacagtcaaaataatggacgttttgattaacttttctataattatgataatgaaactagagacttcggatcttctggttaggatttccctgtcacttaggagctccctggctgtggatctgtcccccgtgtgactgccttaggctcgaggcaggaagagcagcacagatactcctggcaccgagggcttgtccgtggagaggggtggggcggacagcgcatacctgcctagccttacagtgtgggtatgtgccaacggccctctctcactcaggtatattttcctggagtacgcgtcccctgcccacgctgtggatgctgtgaagaacgccgacggctacaagcttgacaagcagcacacattccgggtcaacctctttacggattttgacaagtgagttcagacttggccacaaggaagtggacgttgacgtgcaagtgactggctgtgtgcgggtggcttggtgcttctcggtgctggtgtctgtcagattgttcacatcctttctggtcaggctgccgcagagccatttcacagccctgccccacacttctggcctacagcacccctccctgttatgccagtcacagccctgggggcgggcaggcaggagcacagcagggccatgctggagcccccacgagttgctctttctagtcgtcagggcgtggggctcagcagtctcctttcttctccaggtatatgacgatcagtgacgagtgggatattccagagaaacagcctttcaaagacctggtgagtggcctgaaacctacatctcagtggtttaaagaaatgctgctgggtgtggtgggtcacacctgcaatcccagcacttagggaggctgaggtgggaggatcgcttaagcccaggaattcaagaccagcctgggcaacaaagtgagacccccgcctctacaaaaagtaaataaatacatacattagctgggcctggcatgcacctgtattcccagctacctgggaggctgaggggggaggatcacttgagcctgggaggttgagcctgggaggttgaggctgccgtgagctatgattgtgccactggactccagcctgggcaacagcgtgactctgtctcaaaaaaaaaagaaatgctagacggtgtcttgacttgaggttagggtgtgacttgggagttaagatgtggactgaacttgtcatatctttaagagcaatagttgtgaatgagttttttattaaaattaatgaaatgttatattccttgtctttgtttttaaggggaacttacgttactggcttgaagaggcagaatgcagagatcagtacagtgtgatttttgagagtggagaccgcacttccatattctggaatgacgtaaaagaccctgtctcaattgaagaaagagcggtgtgtatttgctgctgctgggggcggggactcacctctcctgtatttccttaacaaagtggaactttgtttctatcagaaaactggaagagcaggtgacgttatattttctttgagattactttctgaaaacaacttcttttattcctcttccagctttgaagtaaatcctgagaagtgaacaggctttgtgtatttcacttaagagtttgcagaataggccgggcgcggtggctcacgcctgtaatcccagcactttgggaggccaaggtgggtggatcacgaggtcaggagattgagaccatcctggctaacacggtgaaaccccgtctctactaaaaatacaaaaaaattagctgggcatggtggcaggcacctgtagtccccgctactcgggaggctgaggcaggagaatggcatgaacctgggaggtggagcttgcagtgagctgagattgcgccactgcactccagcctgggagacagcgagactccgtctcaaaaaaaaaaaaagtttgtagaacagattcattgtaggataaattcattgtaggaggggtctttgtgtttgccattttgttgtattaacgttggcactgcctttttctgcagagatggacagagacgtatgtgcgttggtctcctaagggcacctacctggctacctttcatcaaagaggcattgctctatgggggggagagaaattcaagcaaattcagagattcagccaccaaggggttcagcttattgacttctcaccttgtgaaaggtaagctgctagaaaaacacaggggagtctatgcatttcaccccatgccagccttctacaggtgatctttcattttgtagcatttcaaacttagtagaaaaatacgggagtatgcagaacgctaataagctttttactgagatcttctcacatttggttgcatttacgtcatcatctcctatacagatattttttcctgagccatttgggagtgagttgaaataacatgtccctttagccctgaatgtgtattcctagaaataggattttgttagtgtgaccatagtgtgggtactgacttcagggatttaccattcatttaatacttcaatgtattgccatattctgattttgttacttgacctaataatgttctgtataatacttactttccttcagttcaggatctagtctaaggtcacgtattttacagataataaattgtccttcctctatcacccaggcttggcgccacccagtggcaccattgcaggctcattgcaaccccagcctcccaggtcaagcggttctcccacctcagccttcctgagtagcggggaccgcaggcacacgccatgacatatggctaattttattttttgtagagatgggggtctcactttgttgtacaaggtagtcttgaacccctgggctcaagtgatctcctgccttgacctcccagagtgctgggattacaggcgtgagccaccgcacctggccgagccgtgatttttgatctagctaatccggctgtcggaggcctgctagggaaaggggcggttgtgggaggcagtgtgaggcgagctggggccactctagggaaagggacagttgtggaaggcagtgtgaggcgaacgggggccactctagggaaaggggcagttgtggaaggcagtgcgaggcgagctggggccgctctgttttcgccctcatgggttgtgtctgccttcccctctggtgttgtaagggaccgtctgttacacactttgtgtgaactgagtaagcaggtgcagtagctccagacaagccagcagtcaggtaaatcatggctgggaggagcccccaggctctgaagtttctatcagacctgtgctggctttcgaactggatgggacttgtttttttgtttgtttgtttgtttgtttgttttgttttttttttttttgaaactgagtttcatgcgtcgcccagactggaatgtagtggcacgataccagttcactgcaacctccacctcccgggttcaagctattctcctgcctcagcctcctgagtagctgggattacaagtgcctgccaccacgcccggctaatttttgtatttttagtagagacagggtctcaccatgtcggccatggttggccaagcttgtcttaaactccggaccttgggtgatccacccacctcggcctcccaaagtgctgggattacaggtgtgagccactgcgcccagccgtatttttttaacttgttagtctttattaaacatgggtaaagatagagttccacactgcgccaccctctggatcacttagcagccttgtgtgggatcggtgagatcttctgtgctgatcttggagaaaccggagcgcctgcagcgtattgacaccagaatgaacaagcgccgctgcttcccgcttccgcttgggtctcttggggccgggcagtgtggggtttggggagagagctggttccgcgagttctgacggcgtgttctggccgcacagacagactgtgatcctctcgtgagaggaggatagtgtacagtgttgcccttctcttctaggtacctggtgacctttagccccctgatggacacgcaggatgaccctcaggccataatcatctgggacatccttacggggcacaagaagaggggttttcactgtgagagctcagcccattggcctatttttaagtaagtggaccattgtaacgagctctgtagcctttgtcttttcatgggaataccctggcacttttgtttttcttaggtggagccatgatggcaaattctttgccagaatgaccctggatacgcttagcatctatgaaactcctgtaagtggcctcagtgatggcaaacgccccgtccggtccttgcttgtaaccggggtgtggtgcctttccttatttgtgctagaagaggaggaggaggtttcacagatgcataggaaaggcctgtctcctgtgcctttttaactgcccctgctctgggcagagctcttcagtcactcctgcccacctggcgcagccgtgggaagtcctggatgggagttaatgcagtgggcttcagaactgcagttctgggtggcgggtgggtggatgggttcactgtcacgctctgtgtgcactgccccctaggcaaactcacatcagactcttgtttccttttgtaaaaagttaggtgtgtttctgagacactgacatgatttgactcaactgcagccttccttttttttgggcagtctatgggtcttttggacaagaagagtttgaagatctctgggataaagtgagtattcttatcagtttggtgtcttagtgtgttcaggctgcttaacacaataccaaaaaaaaaaaaaaaaacacaataccataggctgggtggcttatgacagctgagatttctttctcccagttctggagcttgggagcttgaggtcagggtgcctgcagactgtctggtgacggcccacctccctcctagtggacagcccctcggtccagccttccctggaggaaggcctccgtggcctgttctgtaaagtctctcatctcattcccaagggcttccccctcaggacctcccaccccccaaaaggccccaccccatgccgtcaccccagggggttagaatttcaccctgtgaatctgggggacacagacgtggtccattgcagttggtttcctttatttgctgtctctcctttagcactcagctttttgttgttgttgttagagacagagtctcgctccgtcaggctggagtgcagtgatacgatcttggctcgctgcaacctccacctcctgggttcaagtgattcttctgcctcaacctcccgagtagctgggactacaggcatgtgccaccaagcccggctaatttttgtatttttagtagggatggggtttcaccatgttggctgggctggtctcaaactcctgaccttgtgatctgcccgcctcagcctcccaaagtgctgagattacaggcgtgagccaccatgcccagcctgtcactcagttcttaaccagttggagagaaaacggtgagtttgttctttttttaaaattttttttttttttttttttttttttttttttttgaggcagagtcttactctgtcttgcaggctggtgtagagtggcgagatcttggctcactgcaatttccacctcctgggttcaagtgattctccttgccttagactcccaagtagctgggactgcaggtgcctgccaccatgcctagctaatttttgtatttttagtagagatggggtttcactgtgttggccatgctggtctcagaactcctgacctcaagtgatctgcccacctcagcctcccaaagtgctgggattactggcgtgagccaccacacccagccatttttaaatcttttttgagacagagtcttactctgttgcccaggctggagtacagtggcgtgatctcggctgactgcagccttcacctcccaggttcaaacgattctggtgcttcagtctcctgagtagctggaattacaggcgcgcaaccactacgcccagctaattttttgtatattttagaagagtcggggtttcaccatgttggccaggctggtctcgaactcctgacctcaagtgatccgcctgcccgcctcagcctctcaaagtgcagggattacaggtgtgagccaccgcgcccggcctaaggtgagtttgttctggacacaaggatggaggcttgagtcagtgggcagcaaggctgctcagcattgggcccgccacccttgaggcaccacttcagtgaccccttcccgtgcctagaaatgaattttcaaggccagagccttgagtcggcttccttccatctacctcgtctttgatctagaaactgaggagggtggggtttccagccttttaaggaaaagaggggactctgcttaggtgaaaggttttcctggtactcttccatccgaggcagggtttggggagccttcggctcattttcaccagcaaagaatgggcacgtttttatttatcgcaaaacttgggactggtcagtatcacggcagtgaacttccaacaatccaaggacattgacgtttcttctttcgtttttacattcttgggcaaaattatggcttataaaatgaaaagaccaggacgttggttctcaaaaaatgcaaaacagcacatagcgtgtataaagatgtttttcatgtaggtgagctcaggagccgttcgttacagcagctcttctgtagagtagttgataaagtggagggagctgcccttgttcttgctcattccttacacttgatttgccattttccccatttgcaccttaattaatctttagatgacatgtagccagatccgtcagcctaaaacttatttgcctcaaagcagcagtgtgcggtgtcttaagagtgggctgacggagcccaggctggagtccatatgagtctgtgcgtgatggtggggttgctaatattctgtctgcattcactccttgtcacagtgagcacagtagtgccacagggtcctggcgaggacctatgaagctgcgcggcatgcccagagcagtggctgtgcagagggagcgctcagcgtcagctgtgacagcattgagcttctatatagcaaatgagttgttctattctcttctgcttttcagtttcgtcatcacttggtctttgctttaacattttattttcctgttctgcagagacttttcttggtctcctggtggtaacataatcgccttctgggtgcctgaagacaaagatattccagccagggtaaccctgatgcagctccctaccaggcaagagatccgagtgaggaacctgttcaatgtggtggactgcaagctccattggcagaagaacggagactacttgtgtgtgaaagtagataggactccgaaaggcacccaggtatgtagattcccacaggaactgacgattccttatcctgagctctgaagtggccaccgtattgtttggagggtgttaatggattttttttttttttttttttttttttttttgagatggagtctcactctgtcaccaggctgtagtgcaggagtgcgatttcggctcactgcagtctctgcctcctggtttcaaatgattcttctgcctcagcttcccaagtagctgggactataggcgtccaccaccacgcttggctaatttttgtatttttattagagacagggtttcaccatgttggccaggctggtcttgaactcctgaccttaggtgatctgcccgccttggccacccaaagggctgggattacaggcgtgagccaccgtgcctggctgagaatattattttctttctaagcacaaggagtagtatactcaagatttatttttttatttttttatttttggtggttgatcatttaatatttattttatcaaaaaattgcctgagttggctgggtgtagtggcccatgcctgtaatcccagcactttgggaggccgaggtgggcggatcatgaggtcaagagattgagaccattctggccaacgtggtgtgaaaccccatctctactaaaagtacaataattagctgggcgtggtgggaggctcctgtagtcccagctactcgggaggctgaggcaggagaatcgcttgaacccaggaggcagagcttgcagtgaacagagcgagattgcgccactgcaccccagcctggcgacagagccagactgcgtctcacaaaaaaaaagaaattcctgagttttccctctaatagaagtattcttctttcttttatgttaagaaagctttaattgacatgtagttcacatgcctgaaaacacccctttagagtggtgaactggttcagtggtttttcgtgtgttcagagttatgcagccaccaccactcatttcagaacgttttcatcggctgggtgcggtggctcccccggggtgggagggaggatagcttgaggctaggagtttcagaccagcctgggaaacacagtgagaccccatctccacagataatttttaaaagataggaaaaaggccgggcacggtggctcacgcctgtaatcccagcactttgggaggctgaggcggggcatcacaaggtcaggagatcgagggtttagtagaaaccccgtctctactaaaaatgcaaaaaattagccaggcgtggtggcgggtgcctgtagtcccagctactcgggaggctgaggcaggagaatggcgtgaacccgggaggcggagcttgcagtgagccgagattgcaccactgcactccagcctgggcaacagagtgagactccgtctcaaaaataaataaataaataaatgtttttgtcaccctacaaagaaacaacatacctgttagcagcctctccgcccagctcctggcatcacgaatgtctatgatttccctattctgaacacacagctggaatcggatactatgccaccttctgtgtttgacctccttcacggagcacagcgttcccacagctggtccacggtgctgagtgtcagcagtaatctcttgttgggtggaccccgtttcttggcctccttcctctgttgatggacatcagggcagttttccctcagactcctcgagtagggcaggacttcttgaaggttatggctacaggacaccccactgtctgaagtggtttacccagccccattggtgtgcctttagggccctcaggaccctggcctgcagcctgcagtgtggaccctgggactgcttgtgcccaagtgtggcgggcagggcggctcctggaggtgggatctgggtcagagttacttcatgcatgtccagtggcttccagtagacgtggtgccggcagttctccagccttagaaccgtcttccatcctgagggctgtggctttcatcactgcacatgctcgtgtgtgaaccaggcatgcacactgaatctttcattgtgacgttgatctttgatttaaaccttttctcatattttcactgtccagaatgtcaccccttcccccttttttttaaacagggtgttgtcacaaattttgaaattttccgaatgagggagaaacaggtacctgtggatgtggtcgagatgaaaggcaagttgtattttagtcactttgaggcgaatggggcctacgtgctgttttactcttggctttaacacttccatgcgaggggttgtctgagcagctgagtcaggactgtgagccctcaccatgaatagtcatctccaggtcacagaacgtgtttagagcctgggcaacatagtgagaccctctctgtacaaaaaacaaataaaaaaaattagccaggtgtggtggtgcgcaccgatagtcccagctgtttgagacgctgaagcgggaggatcacttgagcccaggagcagaggttgcagtgaactgagattgcgcccctgcactccagcctgggtgacggagcaagaccctgtctaaaaaaaagagaaaagagattgagcctgtgttcttgtttggctttttgttttgccatggagaaaaggaggaaggaagggttaaaaataggtgagaaaatgggaaacatggccgcccttccaggcagggagaccggaggtcaggatcccactgtaggtgcacactgggtgcgagggaagcggcatccacagctgctgacaatgtcgggctcctgcggtcctgctgtgggtgtcctgctctcaggaagggagcagtttcacgtaggtcactccacacaagtggaagcagctgtctctgaaactccaggaatgtgcacctttcctgctgttgcttgctctcccgtccttttaatgaacttttacacgtcgggggatatttctctgtggttgaatagtgaacattttaactgatcaagagcactatgttctgaattgaccaaaaagggaggggtctgttttgtgcattttagaaaccatcatagcctttgcctgggaaccaaatggaagtaagtttgctgtgctgcacggagaggctccgcggatatctgtgtctttctaccacgtcaaaaacaacgggaagattgaactcatcagtaagtaacctggtccctttcctcttctgagtaggtcagcacagatgatgacccagtcgctgcccaacagtgagcatttgactggcctaggaccactgctgggcaggccgggactcgcctatgaatggggtgtggcctcggctgatggaagtgagcgatggcctggaggtgccgcctccttgcagggtgtctctctgagccccgttgagccctcacgtttaagcgagtatttccaaggcttccattctctgccatcatctcaagtgaagctttttctcttctggctgtagctgctgtccctgggcttggggtcacttcctgtggacatactcctgccagtccccagtctgggtcaggtgcctttgaccagggtgcgcagagctgttgcacacagctgtactctgcccccgtgcacccggttccaggggtgccacactgcacccacctggggctcgctcctcacagtggtgcgtgggccctcgcctgtctcacggcacctgctgcctgtgccctcagctcctcacttcatcctggggtctctgctcagcacagagcccggtgcccgcggggattgaatgagccattgcttgttgcttcataggcgtggggtgtgtgtgtgtggtagccaggaggtggcgatgggctgtgttcctcacacaggactctggctgccagctgccctcctgcagagccatgggtttggctctgtaccaggaaggggttggaatctcctggccgcacctttcgcagcatgattctgtgaggagtttagttttcactttgctagagcttggcagggtgcgtggtgccctcagttggcagtggattacaagattggctgtttcattaattctggttgatagaaacatatgggcaattgcagactgtccagagacttgtgtaagtcttctaggtcataaaacataggcaagcagaggcaccttgtaccttccaaacatgctgcgtgacacgcctctcctgaggtttggcatggacgctggggccaccgcatgggctccatcccatgcccgtggctgttggggttttcgcttgtgcaagtctgagacccctgcccctgccagggtgcactgccctcccacatctcctcccctcctccccacgtcagcctgccccatgcctcttttttggatgtaccacaggctgaggggagagaggccacaggttgtcagctctgtttgagatgcagggagcatatgctctgagggggacttgagccagccccagctggccttcacttctcactgttccagcggctctgcccgagatccattccggaagtaagagttagtacctgcaaagatgatgactgtagtcagtttcaacaagcatacagcttatccaaagacgccttgtcgctaggagagtggctttggtcttttggggtcacacgtctctgacatctctctgttggggtccctgcagcagtgaacatttgctgtaaagggaattctttgtccagttacctcaggaaataagatagtattgttttgaaatacccctgtcgcatcttcttttttttcccatttaaagtatggatcatgacttagggggtacttggcgatggactttgtaaaattgttttccgaggtggtccagcattaccagctctgccctcatgggcagcatgagcacggccaagtcctccagccttggctgccccggcactgtggaagccctcgcagctcgtgacaggcgcgctctttcctttcagagatgttcgacaagcagcaggcgaacaccatcttctggagcccccaaggacagttcgtggtgttggcgggcctgaggaggtaggtgtctgcgctctgagcctgtccgccctgtgagtagcgctctgctgtggcagagacccctcaggcgcctgcacccggcttcttggtagagagagtattgtgcgctgaaagggttgccccagtgtcagtggataggacttcattgaacctctgcagacccacggtactccaggactcaggccaagcccgcacagagtgaaataagcgctcccagatgctttcgtgaagtgaccaggcagacctgtctgcgggttgtggttctctgtggttaaacaagtgccttccagccatccagtaacctccccccgggggtcagtcccttgtcttctagtgggaagggtattcgttacacagctgtgaggctgccttacctttgtggttggtgtcacggtgtcggtctcagctgtgttccagcagtgtgtcgaaatcatggagaagcttccagctttctgctctgagttaaaagaatacccttttgttgctgctctcccttgcttcattgtccacacttgctactgtatttttggaggcttacttagcctcagataacatttccagtaaaaataatatgatggcagtcatatgtaatactcactgcacactctgcatctgtgatttggtaagtctcacagcggccaccagaggctgttgctgtgcttgtttccatgttaacgccgaggctggctccctggggaccccatgccgcagcacctctcaggagtgggatgccaggaggtatgcgtctccatgaagcctgacggtcctgtctgtctttgcagtatgaacggtgccttagcgtttgtggacacttcggactgcacggtcatgaacatcgcagagcactacatggcttccgacgtcgaatgggatcctactgggcgctacgtcgtcacctctgtgtcctggtggagccataaggtgcaggcctgtggggcatagttttgactgtggatagaagcagggagtgctggctagctgctgactctggtgctgtcctgggacctcagggaaggggcaccaagcctctgtgttgaacagaagccttggctggtgttagtggcaggaggaggaggattctgggttgtagaagaggtggcgccgagtgcaggagcagcccctgctcatggttgcggggaggtggggggtcttaccctgggcccagggacccctgaaaaggagtgagaatgtctgcagagaggagtcgtttcctttgaagtctgaacagagttccataaccgcagacattaagatctgttttggggtcagtggttgagtccagctgccgcgttacccacaactcgtattccaaaactgctggttaagtttgtcaaggactttcagtatttagtgacttgtaaaaacattgatggaggcactgatacttgaactagtccatgccaatagagcctgtgaaaccaaacgcgggtaattttgtttaatgagatacagaatttgtaggaatatcaacttcccaaatgttactgcaagtgtctagagttagaaatcttcgcattcgaatcaggatatgttgatcacagcctgtgtccaggtatgttcagatgtcactgcggtggggcctgccttgacacttgaaatcactttaggccaggcacagtggctcacacctgtaatcccagcacttcaggaggcagaggtagaaaaatcacttgaacccaggagtttgagactagcctgagcaacatagcgaaaccctagccccattaaaaaaaaaaaaaaaaaaaagactttttaagctgttgaccactctccttgagttatgaacacttagcttccaaaatgccggcctgcaacaaggagtttatgctgagtgccagtgaaggcgccctccttcatgagagaggcctgccatgaggagagcggaactaggcggcgtgtagtgatgcagttagcttacatccagcacagggctccgcacagctcacacccggcccagggctcagcagtgagtagtgctatgcagttagcttacgtttggcacagggttcagtccagtttaaatccagcacggggttcagcggcgcagtagtgaggcagttagcttacatccagcatggggttcttattgccagccagaatgtgcaggcctgtgctgtgatgagcgctgctccagctgctccgtgccccgcactccgggtcggttgcataatggaggtgtcttgcattgactgcccacctaccctgctgtcagctcagcacaggcagagctttgtttgcttcacacgtgtccccgatacccaggaccttgttcagcaagtgacatagtcacggttgtggctctctgacccctctgtgtcctggtgtgtccctgccctggcctaggtggacaacgcgtactggctgtggactttccagggacgcctcctgcagaagaacaacaaggaccgcttctgccagctgctgtggcggccccggcctcccacactcctgagccaggaacagatcaaggtcagcatgcccccacccccgggtgcagggcacatggaggcaattgtggcgttgaaaaggtgtcagttttttctgttattgttagggtggtgactgggggataaaaacgtgacatttgcaaggattctttgaagagacgcaggaacagtgagaactgaatggaatagaacagctttaggatagtaacttgaggctttcagcttctttagggaagttttgcatgaacccgaggggtggataaaaagatgccagggccattaaaaagtcctgctgggattagaagcggcttgtctgggatttacattattgtggtaaaataggccgttggtcttaggtcagagcaaagaggagggttaaatcccagggagaaagtccgtctcaaagtgaaagatggaggaaggagcaggcacgagcgctcctgggatgctgtgttgtgtgaatgaccctgggtgtcaaggaggaaggagcaggcacgagcgctcctgggatgctgtgttctgtgaatgaccctgggtgtcatggaggaaggagcaggcgcgagctctcctgggaatccgtgttctgtgaatgaccctgggtgtcaaggaggaaggagcaggcgcgagcgctcctgggatgctgtgttctgtgaatgaccctgggtgtcatggaggaaggagcaggcgcgagcgctcctgggatgctgtgttctgtgaatgaccctgggtgtcatggaggaaggagcaggcgcgagctctcctgggaatccgtgttctgtgaatgaccctgggtgtcaaggaggaaggagcaggcgcgagcgctcctgggaagccgtgttgtgtgaatgaccctgggtgtcgaggaaggagaaggcgcgagcactgctgggatgccgtgttctgtgaatgaccctgggtgtcatggaggaaggagcaggcgcgagctctcctgggatgctgtgttctgtgaatgaccctgggtgtcatggaggaaggagcaggcacgagcgctcctgggatgctgtgttctgtgaatgaccctgggtgtcatggaggaaggagcaggcgcgagctctcctgggaatccgtgttctgtgaatgaccctgggtgtcaaggaggaaggagcaggcgcgagcgctcctgggaagccgtgttgtgtgaatgaccctgggtgtcgaggaaggagaaggcgcgagcactgctgggatgctgtgttgtgtgaatgaccctcggtgtcatggaggaaggaacaggcgagcgttcctgggatgctgtgttgtgtgaatgacccttggtgtcatggaggaaggaacaggcgagcgctcctgggatgctgtgttgtgtgaatgaccctgggtgtcatggaggaaggagcaggcgcgagcgctcctgggaagctgtgttgtgtgaatgaccctgggtgtcatggaggaaggagcaggcgcgagtgctgctgggaagctgtgttgtgtgaatgaccctgggtgtcatggagaaaggagcatgcgagcgctcctgggaagctgtgttctgtgaatggctttgggtgtcatgtcatgttggcaactctgaagattgcatttgtgcttgttgctttgaatgttaaatcctgagtgatgggtcttttgtttcagcaaattaaaaaggatctgaagaaatactctaagatctttgaacagaaggatcgtttgagtcagtccaaagcctcaaaggtgagcctcattcccaaaatgagggctgtgctgtgacatccgccatcatggcaaaggcggggctgcggggagctgctgtgtatgtgctcagagttgcctctgctccgaagacactggttctgttcccccccaggagggatgcactggggaactggggttggcacggggacttggagttggtgacctcactgctgccttgtgggtggggggcagcgttgggggaaaagtgagaatgaatggactagccattcctgcttgagtgcctctgtatgctgtccttctggcaccgtccgcctgggtgtgggctcttcgcgatggggaggcacttgtcttaccagttctgtgctttccccaacctcatgcataggaattggtggagagaaggcgcaccatgatggaagatttccggaagtaccggaaaatggcccaggagctctatatggagcagaaaaacgagcgcctggagttgcgaggaggtaacttagagatccctcagtccccaggagctggcccttacgctgcccctgggccctggtgcccgcggactcctgcgttccttcccactggcctcggcggtgccactaggcatgtgcccccatgggtgatctgcgccctttgtcccctcaggggtggacactgacgagctggacagcaacgtggacgactgggaagaggagaccattgagttcttcgtcactgaagaaatcattcccctcgggaatcaggagtgacctggagcactgtggtgagcgtctgcagggggcgcgatgggggtcctgttggctgctcatgctgcttcagttatccccgtcactgaggaagcacctcctttaaggcaggggtgaagggtgaagccctagtgtcatgtgcccagggttagctgagcctcgtgtgaaatgtagagtcggtgccgacgtggcctcgactgcgccctctgaccacattgcagatggcgcctttcaggcagtgctgggtgagggaggagctgtggccaggtgttgggaagtgccaggaagaggagggtggccatgcctggccatttcctgatacctgtgctagtgacggccgcggtgtgtccactggaaagaaacactggcgtgcacggctgtgactgtggtttcagcagttctgagacaagagccttccaagtcgggggctggggagcagagtgcgggagctcctgagtcctgggggcctccgcgcctcacagcatgggcacatgtgggacagaaggcctaatggggtgcctgagggtggcctggttgctgtccccccagggtgggaccatgagcgagtaggggtggcacacgggctcagctctctgtggccggggtggctcctcttgcgggactcaacgtcagccccaaggcgatgttcagggggtccctcagccttttgaggtggtgccgtttagggccgccatgcctgtctatccaggggacggactccgcctgctgttcccgcgctgagctacaggactcccgagtgtgagccgcggttcctctgttgcagcgcagccgtgtgtgctgtggagccgaggccgtcctgcaggaagccgcgtgactcccgcctcctccctgtgctctctggctctggactgtgactgcgcctggattctgccattgcgacacatttttgtgcctttcagcccctggtgtctgcagtgggggatttaaggcacccgcttccacttctttcttgtttggagttttctgttggaaccgccggcgttggctccgaagacttagcgacgccactggcggcaccttctcctgcgcccagtgatgtttccacggtgcctgtacacagccgagcagcatttccgttgaaggacttgcatccccattgcgggcagtgctggacgtgtcccggagacccaccgggagggcgccgccatgccttgtacccccaccgtgcaggttgtggccggttttctccgcaggttgaacatggaaataaaagcaaacttgtatgaaaaa

SEQ ID NO: 373 - DNA, 13487 bp, Homo sapiens
actccccaaatttgcacctttgacccatgagtttgcataaagaaataactacatgcacccaaggactttccagacttcccttttccttccaccaagcacctgctaatcccagtatccacccccaaactcctttatttttttgtagagatggggctctatgttttgggggttttgcaggggcagtttgagacatgggcttgctatgttgcctagactggagtacagtgttgtgatcatggctcaccgcagcctcaaccacccagcctcaagcaatcctcctgccttagcctcccgagtagctgggacacaggcacatggcaccacacccagctaattctttgtagaaatggaatgggatctcactatgtttcccatgctgttcttgaactcctggcctcaagtgatcctcccacctcagtctcccaaagtgctgggattacaggcatgagccatggtgcctggcctaaatctttttttttcttttttttggagacagggtttcagtctgtcacctaggctggagtgcaatggcacctgtgctcaaatgatcctcttgcctcagcctcccaagcagctgggactacaggcatgctacaggcatgctccagcatgcctgtctaatcttttctaataaaattactgcctgccttaaagacagcacagggagaaatatttgagcttgacactcctatctccttgtgagtcgacttatatataatataaagcttttctcaaaaacaacaaaaaacccagtgtcgtggtatcagcttccggtgcatcgagcagtgagccctttttactacagggtagagcagagctgtccagcggtagaggctcagattgtctccaaagtgggggaaaatatgtacattacatactgaaataatagaaataagcactggttcctagctattgttactaaaaccaaatggaagcttctttgttggaatggttgctaaaatgttctcagcacatgttggaaaatattttaatggactcttggctggaaggctccagtcatgagtccaaagtcttctctctagtgggtctctgtaacttccaaaagctggtgcgagggagagttgcagcttgggagagtggcccctcagcagctgcagcacgccaagattctggctgggtttccgaggcacctgttgtccaaatcaagaccatcagtcacttctcccttcctcctcccaacgatgggaaagtagctcagatgcacaattgattctgttcccacttaagtccctaagaaaggggctgcttcgtgtacattttctcccagtcccttttacccagcgtctcccagattaagtgagcagcacactaattaggcctgagatcaacatgacaactcgggttctttccagcagtctggtgcaagtgactattcactttgtcatctatcagggcaggcttcagcctaaagctcaatgcccatcaatgctcccacagaggatgaagcccatgatgccacgtctggtcctctgcacagcaggggataacaacactctggcctgcaatcatcctggcccctctccttcttcctgtaatgccaacgaaggtcctgtttaagagttcagccaaaggtgaacactggctggatgaggagcagcaggaagctgcagctccgggtctctctgtagagggctaccttcctgtctcaaagctgcccaactagctgtttccagacatgtctatgaaatgtttagtcccacaaatgctgtgccctgcagctaggagagatgcaaagtgaactgaagatatggtccagtctccaaggagattactatctaggggagaatttacatgcataaaaacatggactagaaacaaaggtcaaggcccccgactgcaccgacacacagccgtctggtttggatcatgcaacaccactctgtgccttatgttgatatgaaaacctgggcatccccagtctcagctgctctgagcatttggactctatcttgtcaaggaagaaagaacactttgtgactgtatttttagggagcacaaggcaaggcactaaacaatctggcctaccaatcaccctaagaatcttgaatgttttgcttttaactctatttccttcccttagcatgaatttttattttatcttattttattttttgagatggagtttcgctcttgttgcccaggctggagtccaatggcgcaatcttggctcactgcaacctccgccttccaggttcaagcgattctcctgcctcagcttcccgagtagctgggattacaggtgctcaccaccacgcccagctaatttttgtattttttttagtagagatggggtttcactatgttggccaggctggtctcaaactcctgacctcaggcgatccacccaccttggcctcccaaagtgctgggattacaggtgtgagccaccacgcccggccatgaatttttaaaagaaaacaaaaccctttctgcttggaaaaatgtccatcttggaaattggcacctaggatgcctctagaatgagagataagcatctatcattggcccagaattgaaacagccacattattgtaggaacaaatagttggaaaataataccatctcacgctataccaggaattacaatgcacaagatacttgcacattcccaatttggtcctcacagcagccctgtgaggtaggcaaacaagtgatatcctctccattttacaaggggaaaaaatatgtttgagccagagcaattgccactgtaaatttttctggggggagggcggcggggacagagtcctactctgtcgcccaggctggagtgcagtgatgcgatctcagctcacagcaacctccatctccctggttcaagcaattctcctgcctcagtctcccaagtagctgagagttgggcgccaccatgcccagctaggtgcatgttggccaggctggtctagaactcctgacctcaggtgatcctcccgcctcagcctcccaaagtgctgggattacaggcgggagccaccgcgcctggcctgccattgttaattttaactccacccttgccaaagatgaactcttaacatgaggagaattatttaggcctaaagttctttgcttataatattataggttggtacaaaagtaattgaggtttttgccatggggaggcggcgaaccggcaagagtaatcccgataaaacacactgtcaaaaagaaagacctcagacaccagtccccaccatgcagaacatgttcatgtaagttattcttctaggtaacccctcctcctcctcctcaagatctcagctctaaatcactttctcaaggacgccttctctgtcctcctgttatacactcatagtacactgaattttatctctatgacacttaacagtttacactacacatggactctgattttcataacagagttcatgatgttctcactcatcataatctacccagttctagggggtgggtcatgggaccaggcagtgcggacttgaaaaataaaaaataaaaacaggccaggtgtggtggctcatgcctgtaatcccagtactttgggaggccgaggtgggcagatcacctgaggtcgggagttcgagatcagcctgaccaacatggagaaacccccgtctctactaaaaatacaaaattagccaggcgtggtgatgtatgcctgtaatcccagctacttgggaggctgagacaggagaatcacttgaaagcaggaggcggaggttgcagtgagccgagatggtgccattgcactccagcctgggcaaaaagagcgaaactccatctcaattaaaaaataaataggccgggatggtgcctcacacctgtaatcccagcattttgggaggccgaggcgggcagatcacaaggtcaggagatcgagaccatcctagctaacatagtgaaaccctgtctctactaaaaaaatacaaaaaaattagctgggcgtggtggcgggcgcctgtagtcccagctactcaggaggctgaggcaggagaatggcataaacccaggaggcagagcttgcagtgagccaagattgtgtcactgcactccagcctgggcgacagagcaagactccatctcaaaaaaaaaaaaaaaaaagagtacagatatcacaggatacaaggacattaaataagatagaaaggagggagggaaagagggaaagaagagaccacatgtagacccgactgtgtttccaataatgtggaagcttaaatgttaggttagaatattatagatcatatgcattaaagcttcatactgcagacacttgtaaacagtaaattcctgaaagacctatgaagttggttgcagcagcaatatcagcacttgtcatttggcaagcttctttgaagctagccaatagataatagaggtcactatatacatacatatatatatgtatgtatacatacatatatatatgtatgtatacatacatatatatatgtatgtatacatacatatatatatatatgtagagagagagaacagaataagagtaacaagagtaattttttttttttttttttttttgagagggagtcccactctgtcacccaggctggagtacagtgacaaaatctcggctcactgcaacctctgcctcctaggttcaagagattctcctgtctcagtctcccaagtagctggccacaagtttcgctatggccggcacggtggctcatgcatgtaatcccagcactttgggaggccgaggcgagcagatcacctgaggccaggagtttgagaccaggctggccaacatggcgaaacgccatccctactaaaaaaaaaaaaaaaatctgccaggtgtggtggtgggcacctgtaatctcagctaattgggagggtaaggcccaagaatcacttgaacccgggaggtggaggctgcagtgagccaagatcatgccactgcacaccagcctgggcaacagagcgagactctgtctctaaataaataaataaataaataaataaataaataaataaaattttgagaaaatctagttgatcaatggcctttcaacagaggtctaagatccaattagccatggtccaggggaacagggtatatagaattgtcctttccagggctaagtgaggcaggtcagaaagcctctttgcaggctagtcattactctcaatttggaagtaatttatttaaaatttcaaaacaaggggtatgagggaaatactctgtgcacaatgatgtatcccttcagccccagaaaccctctgtagagctctaggatttgcagtcagcatttgaaaaaatagggggcacttattaaaatggcagattctcaggggccagtaccagagattcagattaagtagcttcagagtcaatgaacagaaaaatctgcctttaaaaaatcagcctgggcagtggcttacacctataatcctagtgtcttgagaggtcaagacagaaagatcatgaggccaggatttcgagaccagcctgggcaacatagccagacctcatctctacaaaaaaattaaaaaatttgctgggcatggtggcatgcccctctagtcccagctacttgggaggctgaggtgggatgattgcttgagcctagaaactagaggcttcagtgagctatgatcatgctactgtgtaacagagcaagacctacctcgaaaaaacaaaattcagcaccttccacagttccgaaggcagtctgtgaagaaatagtgtggtaacctcattttgtcttgaaatatcttccgaaagatcctaaacgttgccttttcctaactaccaccttcataacaaataactttccatgataaaggggacattatttctggcctccccaacaccactacacccttaaagcccacttccttccccagcacacacaaactcctatacaaactgtatctagataaaggcgatagaactggaagttttctgatggctgggcacagtggctcacctctgtaatcgcagcactttgggaggccgaggcgggtggatcacctgaagttagcagttcaagaccagcctggccaacatggtgaaaccctgtctctactaaaaatacaaaaattagctgggcgtggtggtgggtgcctgtaatcccagctacttgggaggttgagtcaggagaatcgcttgaacttgggaggcgcaggctgcagtgagccaagaccgagccactgcactccagcctgggcgcaagagtgagactctgtctcagaaaaaaaaaaaaaaagaactggaagttttctgaaagctggtctttttgttcctcagtttctatggttggccttacctgctcagtcaagcatcttttattaataaggcctcgaaatactcaatctgacctaaacaaaattgactatgaatgttttccttgcaaagatcacatatgcaagaaaaatgtttgaaatgttcaccatctttaaaagaatctgaagacaccatttatagttctgagtaaaaggtttgaatttaagctgttgcctccctgcctgcaacagcagtaattcaagaattctaagttttggcaaggcactaaagtttgctgcttcagaatttttagaatttaaacaaattttattgcacctgtaaatggaaaaaccctgtagagcagagcctccctagaaagccacttcagagacaggaaccacagagggcttaatgaatcccacgtgtccacaaagcgtggctcaacagccggcagtacatatgccagcaaacacaaaccagatagatgcccttaatgacccaggcccattgtaatcggaactcctcgtttagaaagagaaaaaaatgaactctcctgattgaaataactccctccccaaaacaaagtcaaatcccaatttcttttgaggtttacaaagagccctgatgttttgttgtttgtgcgtaaataatacttaaaggtgctcacatttctcagaaacaagaagaagagaggagctttcagagttcacttgatgccaaatgcagcctcagccagacacgtgagaaccacaatcatcctttggaaacactatttaagatcaaaggggtctatcctgtaccctgctattctcatctcctggaatagggaaagacttgtcaaaaaacaaaacaaaatgaaaccaaaaccaacaggcaaaaaaaccccaaaagacaaaaaacaaaaacccaaacccagatccaagcctgaagatggaataaatgatttagcttcagagttgttggtatataacccagctagtccccactccctcctattccagccttcaccacacctgcccccccacctttatccttatataaaacttctttcttgaacattcaattaagcaagtagtgattcacaccacacaagcatatgctttagactttgaatacttacctcctagtttctctctgcagaggatgagccttgtttgggggaatggttccatgagtcaaacctttgcacaagttttgtggctcctatagcactctgtagtactgaagctgttcttctggtggttccaggagaattgtcttaccaactacagtgagaccactaagtttggttacctgccgtgttatttcccccatgcaacagaacctctaaatgaaaatacaggtctgggctgggcatggtggttgtaatcccagccctttaggaggccaaagcaggaggatcacttaagcccaggagtttgagaccagcgtgggtaatatagcctgactccatctttacaaaaatgaaaaaaaattagctggatgtggtggcaggcacctgttgtcccagctacttgagaggctgagatgggaggatctcttaagcccaggaggttaaggctgcagtgagccgtaatcacgccactacattccagcctggatgacaaggtgaaaccccatccgaaaaaataaaaagaaagcacaggtcagcatttcattctatgtgacttagtataatcacctgaatgaaatgataaatgaaccaaaatggatgagaacacactgatatcaacaaaccccaatggcaccaaaacagttacgcttctgggcaaactgtccattacggcaatttaacagacttttgctcctttactcaataggcaatttaactgagaaactagagagcacttacaggaaaagatggtagagaaacggggcagtgtccggctctgccactcactcacacagtggccttgagcaagctgctaaacctcaacatgtccatttccacatttgtgaaaaaagggatatgacgaaatagtgtgataacgtcacaggagagtcaatgagttgatacatattaagcatttcagaagaatgcctagcacatggtaagcactttgttggcattggctactatagtgtagaccttcaccaccaccctttttttttttttttttttttttgagatagagtcttgctctgttgcccaggctggagtacagtggcgcaatcatggctcactgcagtactcacggctcactggagtacagtggcgcaatcacggggcttgaaccccgcctcccgggttcaagcaattctcctgcctcagcctcttgagtagctgagacagcagtcgtgtgccaccacgcctggctaatttttatatttttagcagagaagaggttttgccatgttggccaacctggtcttgaactcctggcctcaagagatcagcccgccttggcctcccagagtgctgggattacaggcatgagccactgtgcctggccccttttctttttttttttttttgagacggagtttcactttgtcgcccaggctaagtgcaatggggcgatctcggctcactgcaacctccgcctccctggctcaagcaattctcctgcctcagcctcctgagtagctgggattacaggtgtgcgccaccacgcccagctaatttttgtatttttagtagaaacggggtttcaccatgtttggtcaggctggtctcaaactcctgacctcatgatctgcccacctcggcctcccaaaatgctgggattacaggcatgagccaccgcgcccagcccccttctttcaataaaacaaaatacctaattagcgttatctgacagtgtctccgaatttgtcaccaactgataactgttgtttcaataaatattcatgtgagccaggcacggtggctcacacctgtaatcccagcactctgggaggccaaggccggcagattacctgaggtcaggagtttgagaccaccttggccaacagggtgaaaccccgtctttactaaaaatacaaaaattagccaggtgtggtggcacacgcctgtaatcccatctactccagaggctgaggcaggacaattgcttgaacctaggaggtagaggttgcagtgagcccagatcgtgccactgcactccagcctgggagacagagtgaaactctatctcaaaaaaaaaggtttttttttagtaataaaaattgacttaaaaaaaaaagtcctacctgtaatcccagcactttgggaggctgaggtgtgttggtcacttgaggtcaggagtttgagaccagcctagccaacgtggagaaaccccgtcgctactaaaaatacaaaaaaaaaaattagtcgggtatggtggcaggcacctgtaatcccagctactagggaggctgaggcaggagaatcgcttgaacctgggaggtggaggttacagtgagccaagatcatgccactgcactctagcctgggtggcacattgagactccatctccaaaaaaaataaaggataaaaatataaaaattcccaaacattctccacgcaccttgggtagtaacccaagtagaacccccaaacctgattcctctgaatatttcagtagaaaagcaaaattatacagagccataattttctatcacagtatttttatttagggagcagctatggtacgtgaaaggcctctaccacctggtgccagccttgctcctttcatcagcccctccagggggcagtgtagtagtaaaaacactcccaacagcaggcatggaagctgaaaccatggcacaaagccgaggtgcaggtgcgcagagggtggcactccatcgtccctgtggttccccagacactatccatcccatctgtgtaaggcagtcatggtgaccaaaaaaatacaaatactcactttatgttgaagtggtatgtttcaggggtaggagacctcagggcaagaacaggggtggagggagagatttctaaagaactgacaaggttctattttagtaatggtcagggggtgtccattttatataataatcctttaaactgttcgcatgcttttttatttttattttttcactctcggcctccctcctcttttgcatgctttatatacttttaaatgtgtatatttcaaaaattaaaacaattgttttaaatacattggaatatgctgtgtgagcttagggttatttttcctcagaggataaggcaaagagaaaatgatatctgggagaacaaatatgacccacgcgaacctagtaaagttgttgcattccagcatgtgtccctgtgtatatgtgcaaaagcagctcagcgcactcctgtgacctttttaaatctagcatattatcataaataaacacacataaacaactaataacttcaatttttaataatggaaacaattttgccattctagaaactattttaggggagaaaaatcttccctacaaaaataaacttaaacccatcaaaattataaatattataactttttacttctgccatttaaaatgctctcctgcaataccaccccttcatttaacatccttcctgtaccatcacatattgaagagaaaacagtattacagcaaagcttagatagtttaacataatgatttgtacaatgattcttaaaaaatctttggccttagtggccttttttcttcacttacacattaaaaatgctgctgcagtaaccagtgtttgggaaaggacatcagtcttcaagaaccataaactgacagaatttcaatacagtaggtttccaaattgcaatttgtagtgcacatgacagtaagcgaggttttgggtaaatatagatgaggatgcctattcagacaatctacttcaagtaaaaaaaaaaaaaaaaaaaaaattcacagatacccatcagctactactttaggttctaacagtgtcttaatctgagaaacaaatgcttcacaaaatataagtttactgggatgaataattaaaaaaccaggtggtaataacaatatactcaaatccaggccatagtctgaataataaaaccagtacaaaaaatcacgaaggcattccctgaacaataaaggtaaagtgttggatgacaatgtcactaaaacctcatcaatgtacaaaagagaagttacatgcaaaattaaacaagatgtgccatacatattttatagctaattctatttttttcaactttccttaaatgcttaggaagatatgattgtctcagtaaattgtgtggcacagcataacaacttaagtctgcctccaacaagatgggtattctccaaaaagtcagaagagccaccaagagacgaacagaaatgcaataaaaggcacagttcacttgggcaaagaactgaagcaccttggaatttcaaaaagaatccattaggtgtcaccaaagtgttaacaattccttgggaatttataaacaaaaaatatctagactaaaaatagaatataaggcccctctggaaccactgcacacctttccctctgttctcagattaaactgctgcataaaatgaggttatttagcctgtttttaaggaaggcttctattgcacatgcatctctttggttggtaataacatgtacttttgttaaaatatttccataatgaagccctgttgtgtggttagctgggtgtggactttcctccctttcttgggggccctcctactcacagtcaagttgccctttagaactaaagatctggtaggattgggtctttattcaatagccctgttctctattatgtaagaacagatttcaatgtagaaaagaaagggagagggagagagagggagggaaggagggagggagggagggagggagggagggagggaggaaaagaacaaggtagggtgggagacagcagggaaggaaagaaaaaagggaagaaaggaaaaggaaaggaggaataaaagggaagagagtgattgtcaccaaagtttacttgacaaatatcctagctaacaatcaagggaaaaacagctgcccctacccaaattccgtctcaactttgaaaaccacctgtggggggaaagctatacactatgtaacttaacaagagttagtgaactgtcactgtcctgcctatgcagagcagctacaccaatcagaccttccactccaaaagggcagaattaaagggtcggatccagctgcgtgaggcccacctctgcccaggtcagtaggctacacctgcctgattctctgattggtcagctgcagagttcatgggtccctccttttggtttagctcctgcctctggctctgttcccatattctacccaccaggaaaccaagcgatcctaaaatgggtttaacacctccacactgaatgcttttaactcgtttacaagcaactacccctttctccactacccctaactgaaaagccaagtcaccttccatagcccgcagcactcgccaccaccgcacatgccttcttccaaacttacactttgctttctctgtcaaccccctaacaaaatccttcacaataaattcctcagagttcctagattcctgtgcctttcgattcacatggatagattcctctgacattaaaaaaagaaaacaaaaccaaacaaaaaaccagacaggtagtttcaaaataggacaagtattcagaaagattcctagttaagctttttaaaaaatcaactgcatatctgtaagcttaacagcatcatcacataattaaaataaccaaaaaaaaaaacacccccagagttcatgcttccaagcaccctcgaatgctcctgatgaggcgacaggttcacagcttgccaagaggtaacactgcggtgctgaacaacaagcttgcagagtcccttacatgggacgctaaggtgcaggatgctgtgtgaccaggtttggggaacaaaatctacagatagaaaggcgaagaccctagcatagtggggcaagacagcagccctctgagaagagaggcacttgctgctgttttgtacatcggtcctgcaccgggcctcacgggcagggagccccgctttaatcaggcttccacacctcacggagggcttcttccagcttctgcctgtaggctgtgtagcgcctcttcaggttctgcagctgttcatcttcttccttgtccaagatgcgcaagaaattctgtagttctggaaggctgaaggcttcccactgtcaggaaacacagaaagaaaaatgccagatgtttaatactcagttagacttaggaatgctgaccaggagctcccagaggtgcggctgccctcccctccca

SEQ ID NO: 374 - DNA, 35690 bp, Homo sapiens
gtacagatggccagggcgtgctgtgcatgttactgtgcaagcaattcagcagggctgctgcaaaaccagctttctcagctctgggtgctcgggcttgtctccataacaagctaccatgtaacaaacggatctcagcagggtgaacaacagttgcagaaagtgagctgtttccttcacccccaccctgctcccttcactctcaaaagttacaaactgagtttccttcctgataaactccaaggcttcctcactgattggtctcagtttgggaaaggacgtgacatcagcaacttcgcagacttagggctggagggttcttgtggcctctggcgggcctccagccagttaggtaaaacgtgtgtgtgtgtgtgtgtgtgtgtgtgtgtacacgagcgcatgcctctctctgatcacaggtagcactcagattaccctgcctgctctgtgctttgctgcagaccatttgaccagaacgtgtgcagctcagccagccacagaactggaatttttcaggagcagggggagcatggagtttggactttgctgagcaactgaagtggagcgcagagcttgctcgcttaggagagagcatcatggatggcaaacaagggggcatggatgggagcaagcccgcggggccaagggactttcctggcatcaggcttctttcaaacccattgatgggcggtgagtcataggggcagtggaatcagccctggggaggttggctaatgtgcttaggagaggagggttgggcagtttcagtggctctgtgtgaggtgtccatggggctgttactgggcagatgtccacagctcactggtatatattctttacacagctgttcaaaaatgtgtatacttctttctgcagaatcctacagacaagacaaattcaattgtcacaaattattctccagtgaaaatttcagctcccaggaatcattctttgtgggtcaaatgcattatttattaaattggaggtttgaaagttacttataaataggaaaatttttaatgctaaaactttttaatttgtaagtcttaggtgtttggcatttaggtggggcagggtttataaagatgttcaaacattgagcactgattgagtcactttcaaaagagacaaaagagactttgttttacttaaaacattggagaatcatcttacaggtattgttctcatctgtcaagtggtgtctgtgctaatgtacagaatcccacaaatacacacttcggtgagcattcagcaggtgcctgttggctgaaaggattctgaaaaatgggtttaggcatttgcacacaggttcttataaataatagtatattggttagtaatatactggttaactctccagccccaagtctgcaaacttgctgatgtcacgtcctttcccaaactgagaccaatcagtgaggaaaccttggagtttatcgggaaggaaactcaaagttcgtaactttcggagagcaaagggagcagcagggtgagggtgaaggcaacagctcactttctgcaactgttgttcaccctgttgagatccttgggggcttgtgacggagacaagccccagcacccagagctgggaaagctggtgttgcagcagccctgctgaattgctgtatttattatttattaatttttttttctttttgagacggagtcttgctctgtggcccaggctggagtgcagtggcgcgatctcgactcactgcaacctccgcctcccgggttcaggcctgtatatataggcggggcacggtggtttacgcctgtaatcccagtactttcggaggccgaggcgggcagatcacgatgtcaggataccatcctggccaacatgatgaaattccgtcgctacctaaaatacaaaaattagctgggtgtgatggcacgtgcctgtaatcccagctactcgggaggctgaggcaggagaatcacttgaacccgggaggcggaggttgcagtgcacctagatctcgccacagcactccagcctggcgacagagtgagactccgtatcaaagaaaaaagaaaaaaatatatacctggtatactgtccacagcacctgttgatcaaaggggcaataaacagggaccctgaagtcagggtgttttgttttgttttgtttttttgagacggagtctcattctgtcgcctgggctggagtgcaatggcgagatctccgctcactgcaacctctgcctcccgggttcaagagattctcctgcctcagcctcccgagtagctgggattataagcgcccgccaccacacccggctaatttttgtatttttagtagagacggggtttcaccacgttggccaggctggtctagaactcctgacctcaggtgatctgcccgcctgggcctcccaaagtgctgggattacaggtgtgagccaccacgcccggccgtcagtcagggtttattaatctactatacaggtaccaaaaaggtaaaaatggaagaaataaaacacaaaacgtcttccctttgactgagtagactagcctgctcattcattcattcatttatccaatttcacttataaaatgagcagagtactcaatggtgagtgggatttagatccacaaaggcagaactggattaatcagcagatgtattgagcatgagtttggagaactaggaaagcaagagtggcatcaaaaatcacttttcacaaagaatttctttttttttttttttttttgttttttttgaagtggagtttcactctgtcacccaggctggaatgcagtggagcaatctcagctcactgcaaactccaccttcccgtgttcaagcgactttcctgcctcagcctcctgagtagctgggattacaggcgtccgccaccacacccagctgatttttgtatttttagtagagacggggtttcaccatgttagccaggatggtctcaatctcctgacctcgtgatccgcccgccttggcctcccaaagtgctgggattacaggcgtgagccaccacgcccggccactttttacaaggaattatatatataattatatatatatatatattttttttttagatggagtctcgctctgttaccaggctggagtgcagtggcaccatctcggctcactgcaacctcggcctcctgggttcaagcaattctgcctcaggagggagaggcagggactaggtgggactacaggcacacgcctggctaattttttggggtgttttttttttgtattttagtagagacggggtttcaccatgttgccccaggctggtctccaactcctgagctcagggaagtctgcccgcctcggcctcccaaagtgctaggattacaggtgtgagccactgtgcccggccgataaatatatttttaaaacagcaaaccaatcattatgggaaagaatcggtaatttggttgacttctgcacggttattttatagctaagtattgtatttatttttgtttccacatgggagagaggcaccagccacttttcactgttagggtttctttttcttttttttttttttttttgagatggagtctcgctctgtcgcccaggctggagtgcagtggcacaatcttggctcactgcaagctccgcctcccgggttcacgccattctcctgcctcagcctcctgagtagctgggactacaggcgcccgccaccacgcccggctaattttttgtatttttagtagagacggggtttcaccatgttagccaggatggtctcaatctcctgacctcgtgatccacccaccttggcctcccaaagtgctgggattacaggcgtgagccaactgttcaggatttctaaagttcctaatacaaccctggtggggtcagggtgggtgagtgggagtgggcaggtgttatacgcaaaggcatggtgcttgtaaagtcaacaagtttttacagctagagtgcaaaatgtgaatgtcttagggagtctagtgagaacaagtttgaagagatggagtggcagataaagcttgaagagctaagtggaggaggtcaggcttcatgaggcaggaaattgagagccattggtggttctagaacagagacctggtaataaggctgtaggtcaattaacatggtagccacagctgggatagattgtgttggaatcgtgggagatggttgcattcatccagtggttctcaaattctcatgtgcctctacatcacctggagagcttattgaaatacagataatgcagcttctggctgggcacggtggctcacgcctgtaatcccagcactttgggaggctgaggtgggcggatcacttgaggtcaggagttccagaccagcctatccaacatggtgaaaccccatctctactaaaaatacaaacatttgactgggtgcagtgcctcacacctgtaatcccagcactttgggaggccgaggcaggcggatcacctgaggttgggagttccagaccagcctgaccaacatggagaaacccagtctttactaaaaatacaaaattagccgggcatggtggtgcatgcctgtaatcccagctacccgggaggctgaggcaggaaagtcgcttgaacccgggaggcagaggttgtggtgagccgagatcacaccactgcactccaacctgggcaacaagagtgaaactctgtctcaaaaaaaaaaaaaaaaattagctgggtgtgttggcacatgcctgtagtcccagctacttaggaggccgaggcaggagaattgcttgaacttgggagggcggaggttgcagtgagctgagatcatgccactgtactccagcctgggcaacagagcgagactctgtctcaaaaaaaaaaaatgcagatgatgcagcttttgatgaagtcgtaggcctggggtgggggcctaggaatctgcattcataacaaactcccaggtgaaatggatggtactggtcagggaccatactttgaaaactactgcactaatccaaccatgaaacttacatttggatcgaactttggaaatgacagagaaagggcgatgatttcaaaggaaagataaatcagcgtatgttgcttgattaaatgttggaactaacagaaggcaggcaaaattataaggttctcaagcccaaagtaatgtcagataagctagataagagggaagttggaaaggaagttgccttggatgcaggatgaggaggggaggatacagagttctgttttggacatgatagtgctaacaatgatgcccagtgcacagtatgatgacatgggactgagacttaggaacgatcacaggttagaagccagatacctcagaatgtcctacagaggggctgtggttgaaacctagggaagggagaaattgtccaatggctaagagctgagagtcaaccaaggatggaaccctgggacaggcctccagttgatgaagtaggaccagtaagttggacagagaagcagaaagagattctggatgttgtaattacacaggtgctaagggaagagaagttttcaaagaagtagaagtcacaagggtaggtgcctggatacttctggtttcttacctcctgttgtgaatctgactggcaaattgctactcaccttctacacccagctgagccattgcccccatgaagccctcctagactttccacctctccctactcaagtggagtcattctccgtctgctttgcatcagtcctgccccttgggtaaaacctcaattgtagttggttgcttttgtttatgcttctgaggtcttaaccttggtgaagtgtggaatggggaacactcagaatgctgttttcaaatagctgtgccaagaaactcagctcaggtgaagcttgtccctttgcacaaggccaagttagaggggaaaatagggcccaggtgtggatcatcttgctgctcccacctccacctgcaggcgtttttctgcccacttccctgggggtagggagggaggaaaggctataaaaatgggcaaccaactctttatagagatttgtttcatgttagactctcctgtccaaggagcagggaaagaatgtcttaattttttcctgaaagtagcttgttacgagttaaattgtgtaccctgaaaatatatatggttaagttcttaacccccgtgcctcagaatgtgaccttattagttaagattagttcaggtgaggtcgtaagtagggtaggatggaccttaatccaacatgaccagagtccctataagaaaaggagaaggagacacatggagaatgctatgtgacaacagaggcagagataggagtgacacatctagaaaccaaggaacaccaaggactgatggccactgccagaagctagaagaggcaaggaaggatttttccctagagcctttggatagagtatggccctgtccacaccttgatttcagacttctagccaactgctagcctctaggactcggcgacaacaaatttctgttgttttaagccacccagtttgtggtgtttcgttatggtatccctaggaggctaatttatacctactcatagaaacttaggaaaatacattgaaggataaactaaccacccataattccaccaagcaggtaatcactgttcccagtgttagtgtctatcttttggggttttgcctgaagactgacaactgtagagatatttctatccttgcaaaattgagcccaccctgtagagagtattcacatttaaacagaagacaagctagaacaggtattgaaagaaaacaattttattgtcttatggtgaatttttagatattggggcacctcaggaggggtgagttttctgggggaaaacctgcctgttgagacagaatgggtgataatgtgagggccctttggagaaggcagctttatattgagagagagagagagagagagaagagagagggagacaggaaagagaagagagagaagagagagaagaaagaggagaggagaggctggatgatggaactggagaaagaactgcagtggacaggcctgacttgcccaagagttgcctcagtgggcctttctgtttgtttctgactgtaagcctcttgtttctttttctcctctttctgtttgtcctgggatcaaaccaaggtccacaataattgtgaatacagcacccagatactttccaggttctggcaggttggttcatgccactgaatccacccttattgtgtcctgaagactgaaggcaaatactcctgtcccctcagagcaacccgacttcttttttgtctccttgactttgcaaaacgtttctcaggatgagtagatttatgctaccgcccagcattcactggggttctcagaacatcagtaatagctattttcagcatgtagcaattagtgcatcttaaatctcttttgaaataatggaaatgaaaaaaatgttccacaaattacaataaaaatgaaatggcagcctccctaatgtgctccaggtttgatgagggtacaatttaaaagaaagataagttcttgctaatacacacacacatacacacaatctatgctctctgaatgttagaaaaatgttaaactaggccaggcgcagtggctcatgcctataatcccagcactttgggaggctgaggcgcatggatcacttgaggtcaggagttggagaccagcctggccaacatggtgaaatcctgtctctactaaagttacaaaaattaactgagtgtgatggtgtgcacctgtagtcccagttacttgagaggctgaggcaggagaaccacttgaacccaggaggtggaggttgcagtgagccaagattgccccactgtactccagcctgggtgacagaatgagactccgtctcaaaaaaccaacagaacattacacacaaagaaaaatgttaaattattaattgtcactactgtaaattttcacataatcactcatttgttctgatacctgctgaggtcaaagtccttgtataaatttgagatggattttagttttacagggactcacgtttttcttctgggcaggagcataggcatactgtgacaggcttaacaaaccctgaactgaaatgactttatgttagaaggggaagcctcatatcctgctgatgggaacatacagtagggcagccactttggaaaacagtctcaaaataaacattgtgttaccatatcatacagcaattcttttaggtgcatattcaggagaattgaaaacatatatctgctcaaaaacttgtatatgaatgtttatagcagcattattcataataggcaagaagtagaaatgacacaaatttttatcagctgatgaatgaatacataaaatgtggcttatccatacaatggaattatttggccaaaaaaaaaaaaaaaaggaatgaagtactgatgcacgctacaacatggatgaaactttgaaacatgctaaataaaagaagccagttgcaaagtaccacatactgtatggtttcatttatatgaaatgtccagaataggcaaatccatagagacagaaagtagatccatggctgccaggggctgagggaagtagaactgtggagtgactgctaatgggcacagagtttctttttggggtgatgaaaatgttctaaaattgattgtggtgttggttgcatagctctgaatatactgaaaactgctgaattgtacacattaaatgggtgtattgtatggtatgtgaattatatctcaatacagctgcttgctagctagctagctagagatattcacattgtcagcccctcactacgtgtaccaggacaacactctgtacttctcaaagacacaagctgtctctgctctgtaaacactacattctgcagaggtgcaaattcagatagccttgttattctcttggagaagtacgtacttctttatttgccccaaatagaaagagtaatggtcccatgatgaatgagcagaaagtaagaccatttgtggctacacttgataaatgcgtcatttttatgaaatctggacagttacaaattaggatgcaatctacctgcctggactgtttagcctgtcgacaataataatcttagggagctctaagagaggttggggaatgtggcagctgtatttcttagcagctgagcacttggaaaaaaaagtggattaatcatcatacatatggtgatccatcaagatacatttgcaaatctattgaaaactgattttcaaaacctttctcaatttgtggctctttgttctcattcaagattttgtgtgaatggtatttggcattatcagcaccaacagggtggaattagttgtccttttaattctaatttggagatcaatctttccatgtctgcagtccgaattttagcttccaagccctagaatcagcagtattattccagaaataattaggagcctcagagaatgccgtgaggacattgagtatctattaagcgtgaggttttgacggtacgaaaagccatttcacttaagatgtaccttgtctcaagcacctttagtgaccccagaaggaaagcattggatgggcggtatgtagatgggctcatttgtcttccttttatgtactaaatgcttaatgaatccatctggaagaatggtaatttgcttactaatacagattttccagggcactgatggcttcaggtggcagacagacgggcctcatgtgttaagtacaaagtgttaagccaacatgtgttaaatacaaaggatacttcatagcctttcagtttgcaaggtatagatagttaagtatcctccttctccaggtcttctcagtttttaggagctattagcttccgtgcaaggcataactggcaccagacctttctaccttgtttgtatgtagtgtgtttggcgaagcaggtggagctggagctgaagcaggttcaggcacgcctccctcacatttctactggaaatcagatgaagcttgagatgagaaaaaaatcagatctatgcctcattcagttatattcaattaagagagaggaaagcatttaatgggttgggattgggttttcaggcttctttcctaagaatttgttttccttctatgtggttgtagaataaatttgctattttattttatttttttgagacagagtctcactgtgtcacccaggctggagtgcagtggcatgatctcggctcactgcaacctccgcctcccgggttcaaccgattctcccgcctcagcctcccgactagctgggattataggcgtgagccaccacacccagctaatttttacatttttactagagatggtgtttcaccatgttgcaaggctggtctcgaactcctgacctcaggtgatctgcccacctcggcctctcaaagtgctgggattgcaggtgtgagccaccacgcctggtgtaaatttgctattttaaatagcaatgatgatgaggtataattaagactctctgtttagtgttagggcaggataataatagtagctagtatgtgttgagccatggtaagtacaggttgagcatcccgtctctgaaatccttgggaccagaagtgtttccagttttttcagatgttggaatatttgcatatacataatgacttatcttgtggatggtactcaagtctaaacacgaaatgcatttatgttttatatacaccttacacacataacctgagataattttatataatattttaaataagtttgtgcatgaaacaacgttttgactgcaacccatcacatgtcagatgtggaattttccacttgtggcatcatgttagcactcaagaagctttggattttggagcattttggatttgggagttttgggttaaggatgctcaacctgtatgttatatattagggctgctcaacttgtaactttacagagaaggaaactgcggcactgggcctttcccgggacccacaggtcagaaaaggtgaagcgggtctgaattaagagctttctttaaccaccttggcatgctgcctttgagggtaaataatgtccctgtttcaaggtgagactgaacactgatttgtgcttaatattaggacaggagataatctataaatagatatggttctgtttagatttgattccaaacctaatggtgtatgtaattacatgattactactattaatacagaacactgtttggtgagatgccaaagtctgtatttcatgcaggaaactagactgacagctacagcttaacacactaatgttggtaattagtgaagctctcgcttaactaaatgggccatttgcctttgaaaccagtgtgtaaatagaaatagagtaatctgtcatcccaatccacctcttttgtccttagtttgaggactggctgtagttctttcccaagctatccagacatttcaaacaaactgtgcacaaaaaatattaataaagaagagaaatgctgaattcctgatgggaattttggttgagtgaatccaatgtctccctccatccagggcctgttaggctcttattgatgggcaaggataagcctctgggtctaagtgcattagcaggatataacccattcccctctttccatacagatgctgtgtctgattggtctcctatgcatgaagctgcaatccacggacatcagctgtctctgaggaacctcatcagccaggtagctttttgaaaatacaatacagaagaaacctatcaaaatattaaaacaaatgtgtgacataataacatagggacttttaaattaattcattaaatagaagacctagtggtgattctagtaactaccataacgtctaaataggatgagtatagattttgagatattttagatgtctacagcaattgtaatacaatagaaaatatctgtaatttctattggagataaccctacataatactattactactgtggtttgttgtctacattctgaactgaaggaaatgctaaatttcagatagagctgagtgagaataaatgtgctttaaaaaatccaatttcatagacctatctagagtaagaagtcctcctataagaaaataatttctaaagaaaaatttcatactatcctaagccactatcttaagccatttttggtagcagcagtctattataaatagattataacactaattctagctaaaagaagttaggctacttctcagataaaattagaaatttaccctattttgatagcatgaaaaatgatcactgcagcttttatatatcacttcttaaattggacagatactcatttacattcagtatttatgtgtttatgaaacatcagccagaaccatatctccaagttctatcacattatttgtgtaagatgtctttttagagccccggtttctgctttcataaaatgagtattctaatacctacctaggtcagtccaccccataactcaataacaaaccatcccaaaactcagtgacatgatacagtaaccattatttcttgctgatgtgtgtttgtgtcagttcatctaggctgggcttggctgggcttggctcccagctgtgggttgggtgtagccctgctgcacatctctttcatcctgcttggaccactggctacctgaggaattattttttcttggcaaaacgctggagcacagcaggacaagccccaccatgcaagaatacttccaatctgttcatgtcacatctgctaacatcccactggtcaagtcacatgaccacatccaaagtcaaggctcaagagaagtacattttgtcaactaagcgtagttgacgactgaaaatagatatattaaagttaagccattcaatctttttttaaaaactaagaactgactgtggactgaacactgtgaagtaatgggttaattaccttatgattttatatgactcagacttgttaataatttagacaaatcacagttaatttaaggtagaactgtagcttgatgatgaactacaaatgagtttctaactttacagaaggaacctctctgcaatgtgaatatgtggtgaaaactttttgtgttacgaatagctgtgttgttgtatttcatttacgtggatttatgtataaacacctaaatgctggttttatttttatcattattattattattattattatttttttgagatggagtttcactcttgttgccatctggagtgcagtggcgcgatctcggctcactgcaacctccgcctcctgggttgaagcaattctgcctcagcctcccgagtagctgggactacaggcatgtgccaccacgccccgctaattttatatttttagtagagacgaggtttcaccatgttggtcaggctggtctcaaactgctgacctcagataatccatcagccttagcctcccaaagtgctgggattataggcatgagccaccgtgcctggtctaaatgccggttttacaatggcagttgtgcctggaggagtatgcacattttcctattggttgtttttatggttgccttttgcccaagttctgtacctcggcctgccttcccccaacttgtgtctgatacacttgcatgatttttgcttcatgtgacaatcatacccctcttgtggcattgacaaagctactttctataagtgtgatgactgtgagaaaataagatattttctcctgccaattggacatttaagtcttaggtatgaatagtaaagtaagaaatgacatattcttttctttgatcacgacaaaagttggcacatttttttctttctttttttttttttttttttgagacggagtcttgctgtcgcccaggctggagtgcagtggcgccatctcggctcactgcaggctccgccccctggggttcacgccattctcctgcctcagcctcccgagtagctgggactacaggtgtcccccacctcgcccggctaattttttgtatttttagtagagatggggtttcaccgtgttagccaggatggtctcgatctcctgacctcgtgatccgcctgcctcggcctcccaaagtgctgggattacaggcgtgagccactgcacccggccaagagttggcaaatttttttcagtaaaggaccagatagtaaatattttaggctgggaggctgaggcaggagagtggcgtgaacccaggaggtggagcttgcagtgacccgagatcgcgccactgcactccagcctcggcgacagagcaagacatcgtctcaaaaaaaaaaaaaaaaaaaaaaaagaatcttaggccttgcgaaccatgcagtctctgttggaagtacctaactctgctgtttagcagaaaagcagttgtagacaatatgtaaatgaatgggcatggctgtgttctgataaaactttgcttatggatgctgaaatttgaatttcataaaattttcacgtgtcacaaaatattcctttgatttcttttaaaccattaaaaatgtagaaaccattcctagctacagaagcaggtgtaggctagatttgactctgtaggctactgtttgttgacccccttgtcaaaactatgatagagctaggaaatctaagaaaaacaattaaatgtcaggaaaaggagggtttttttgagaaaaaaaattgggtgaaactgatatttttattacaaatattattaaatcctgtgtgttactaaatacttatgtttaaagagcaattatattagttaataggtacatttcaatttcctaaaataagaaagtacatttaggcttcctaaaaggtacatgcagcagtctatttcttttccctcgcagtttgaaaatttccttttaattgtctcacaaggtagagccacttgtgaatatgttaaaacttaataattgcttgttaaaacttagcaatttgggccacgctgactttaaaaaaattgagaaatttcataagcatgaaagaacttaaacacgtgtgcagttgaataaaaagtgatgatgatgagaatattgccatgtgactgcctccccaggtcaggaaatggaaaaatagcacaatgctggctcctccaaagactcacccatccctccccttattgtgctttctagaacacaatcctgtccctcttccacaggagtaaccattatcccgatttccttgttttctttatggttttactctatatattatgtcttctgaaacaatatggggtagttttgcctaattttgaactttaaattgatgtaatcattcagtgtgtatgcttttggattttgcttcttttgctcaacattatttttgcaagcatcacccttgtagtgcttgccattatgatttgttgggtgtaatctttctgctgaaagattataccaaagttaattaattcagtccattgttgatggacatttggtttgtttgcagtttttgactattatgaccaatgctgttgtgaatattcttgtatatttatctagatgtatatatacctaagagtcaaattgctgagtcataggcatatgcattgtcagctctaatagatacagtcaaactgttttcctgagtggttataccataccacactcccaccagtagtgtggcatttttttttttttaaagtcaatataaacaccttagtgtaacatctgactttgagccaggtcagctttgtcatagtactggaatggtggctgaaaagcagccccagggcactgttgctttgcaccccttactctgactgtttcccctccttcaggggtgggctgtgaacatcatcacggcagatcatgtttccccactccatgaagcctgtcttggaggtcatctctcttgtgtgaagattttattaaagcatggagctcaggtaagggcagctgaaacaacatcttagaaaccaagaatgaaaaatgactatgtatatcccttctgaataacttccagcacttttgattagactgatttgaaatatgaagacagttgtttttcaagaaaattatgttcatcaggcttgtttgctttagtgatggatggatgaaatactaaatttttagtcacgcttacagtctatatcattttctttatcatacactactaataaatagttattagacttctgtcttcattgttatggccggaaggtaatgaaatattgtggaaagcacacatttgcctgggatggctaggatgtctgaggagacagaaaatctatgtggtcattcatcctttagctggcaacctggacttgttcacatggtagcagggattgcaagagcagcaaaaatggacctgttttgtgttaggcaactgaatggtgggttggggaaaattatgggcttgctatcttctggcaacagcaaatgcaaagtcccagaaatgatagtgagcaatttttatatcttgaagtcattccttacggcaggacagtagagtaggtgagagggttcagaacataagcaaccttgtccatgccaaaaaaagaatgggctttgtcctgagatcagtaaagagccagaggtgagtgcactgccagatttatatttgggttaagaaaacattcaaaacttggaaacagggaacgtgtcaaggtgaagcaagagacacctagggtacaaacttgaaagaagtgctcgctctcagggtcctgcactatttgtgtgactccaaaaatgaatatgtccttaaattttttaccctgggcaacttttatgtctcactctggtcctggccctgcttggaagtagagtttgagaaggaattcgttgtcttcacaatatcattgcttaaaagattcaccagataatcatttaatgatatacaagaatgtgtctgcacttggcttttctattcactatttaattatagcccaaacactgtgaagttagacattaacttcgaaatttctgtctgatttccaacattagaaaagatagcctcaaagattatacttttatggccctataggacattaaccagtttttatgtttttatttttttaatttttgagatggagtctcgctctgtcgcccaggctggagtacagtggcacgaactcagctccctgcaacctccgcctcctgggttcgagtgatactcctgcctcagcctcctgagtagctgggattataggcacgcaccaccacacttggctcatttttgtatttttagtagagatggggtttcatcatgttatcatgttgcccaggttggtctcgaacttccgacctcaggtgacccgcccaccttggtctcccaaagtgctgggattacaggtgtgagccaccgtgcccggcggagttttgtatctattagcaaatatatttcagcagtccattgactatatacgtttttcttttttctttctttttttgagacagagtctcactctgtcgcccaggctggagtgcagtggcgtgatctcggttcactgcaacctctgcctcccgggttcaagtaattctcctgcctcagcctcccgagtagctgggactacaggcgcatgctaccatgctgggctaattttttgtatcttagtagagaccgggtttcaccatgttgcccaggctggtctcgaactcctgagctcaggcaatccgcctgcctcggcctcccaaagtgctgggattataggcgtgagccactgcgcctggccaaatgtttttttgagccagccttaccatcttactggttccctcattaatgagtgagttgaataaaatcttgggtatgtgttaattctatatttgtatgaaagtcaagttttttaaagttttctaaattatactttaagaatatactaaattacacagctaataatttcaacaatttcctcacagcagcaagagtaatcttcttgcacccgttaagaaattgaattggtgtgggatgggtctaggaaagaagtttaaaatagggattagtttgtaagcgattgaaattatcctaactagtttcaaagttcatgttcctggggagggcatggaggagatagaacattgagtaacattttcgatgctttatagccactccctaattccatttttcacaaaaacctgtggaatttcgtagttatttctccattttatagctgaggaatttaaggctcagagatgttaaataacatcttcagagtggtggaccccacatttgaacccaaaacatcccccttcctgtcttcattctggagcttcttttaccaggtgaatggtgtgacagcagactggcacactccactgtttaatgcttgtgtcagcggcagctgggattgtgtgaatttgcttctgcagcacggagccagcgttcaacctgagagtgatctggcatcccccatccatgaagctgctaggagaggtaaatctgttgagaatttttttttctacccactccttcaagggacatcttactgctgaaagaaagaaagaaaaggagatatattttagagcagtagttctcaaaatggagtcccaggactggaagcatcagcatgacctggcctgcaaatgcagattcttcggcctcactccagccccattgaatcagtaactggggatggggctcagccctctgtattttgtttaataagccctccagctgctttctggtacacagtaagtttgagtgcctcccttttagagcattttgaatgtttttcactgctgtattactgaaacagggcttggcacatagtagactatccatcaatatttgtggaatccgttgttatacccgtgaccttatagaaatcaagttatttcataaaacaaattatattcttctatttcagggccttaaagaacattgtctcagtgacacttaagtttgccaaatgaaataagctttcaatttttgaaagtatttgatgttgcatacagtttgggataattcttttcattaaagccataatttttctgatagtcttagctcataaaatcacaagtttttattttctccaatatttagcatcatcgtaatgaccataccttgccagagggctttctgtttctccagtggctttcatagaatggcttcccatttgactggaccaacccactcataatgatctcccaaagcattaatattatttattgagaacatcttaactcatcatattcgctgcatacatagaactaaaatacagcaagagaaacgtagaggagcaatgtcaaaaatatgacatcctggaccaaggaagtgtgattcagctttcacctagtttttcagattgggccctgctcatgttggatttggcagtttcttctaagcattgcctatacccgctgtggcctgttcctcccgggcctgcctttggagaggttgtaagtttccttccctgtcccgtggcccacactgtgccctttattcttcagttccaccttcaggtcctgttcctccatatctctcccaagctctcacttcaatttctgtacttagacaaactacaaagccacagacaattgaaaaaggtggatagttgctggttggttaccgtggctagtaaactcaaatggagtttcacccgtagttgcagattgcatcctatggtcaaaccattaactgatagcagtggttaaaatcactcctgatttggccgggcctggtctcacgcctgtaatcccagcattttgggaggctgaggcgggcggaccacgaggtcaggagattgagaccatcctggctaacacggtgaaaccccatctctactaaaaatacaaaaaagttagcagggtgtggtggcgggcgcctgtagtaccagctactcggaggctgaggcaggagaatggcgtgaacccaggaggcggagcttgcagtaagccgagattgcgccactgcactccagcctgggggacagagcgagactccgtttctaaaataaaataaaatgaaataaaataaaatcactcctgattctaattgaaggaaatagctttttggtcccctggataagctgctgccaaatttaatgcaaaatggggatggcaatgtctttctagctaagggaacttgtattgtaactgtttttcttcctgctttgggctgcaggccacgtggagtgtgtcaactctcttatagcttatgggggcaacattgaccataagatcagccacctgggcactccactctatttggcttgtgaaaaccaacagagagcctgtgtcaagaagcttctggagtcaggtaaagcaaaaagcaaaccaaaacaagaaaagaaaacgaaaagtaaattaaatgtattttaaacatcttactgctgtaggagagaaattagtgtgggcaatggagttggacaaggtcagggttcatattgactgtgttcccttggggaattatttcacactgtttgaactgtagttctctcatttgtaacaaggatgaggaggaggaggaggaggaggaggatgatgatgatgatgatgcctcttctcagggtggtcctcaatgattattagtttctcctccctttcctctgtctccctccatttggccagtcacattattaagccctgcataacttgcaaagctgttggattagtgttgaatcttcctatttgggaccttaaccagttctctttgattagatattgaacttgccccattgcaaatattatattttccttgaaaaggcctatgtacccttatttcttttcacctccctgctgttgtccagcccccttctcaacacctggaacaccatttcatcacctctttaattatctgagtcctatttattctttaaggcttcagtaatctgtttcccaatgaatgttgttgcagtccttattgcctcctactcatctggcaggcattgctatgaattaagagatgcaatctctgtctctcccccactgcccaccccacctctgccactctgggcagattttaagcctctagcctggaaagggccatgtttgatatccctcacaaagtcaggaacaatacaagaccagatcagttaacatttgttgagtggacatagattttcattttaccagagggatggcagctcaggcaaagccacatgttcccacatgtcacagtgaaagctaggctctgggctggggtggggatttgttaagagtgtaagagtggaattgggtggggacagtcctagaaatccaccttactcctgaaagggagaactttgccaccttccctgtgatcttgggattggccagtccaatccaggggatacccccatgagttggttggttgcttttcaaagtccaaatcaccagtcccaagtgtccagttttacaccctgtggcagctgcacaccaggtgagtttggctgcttggtgtaggctggatttcaccatctagtctctccgtcaggctgtactggctaatacttaggttccattaataataatgtggagcttttatgtcactaggatttttcttatatgcatcatgcctatctatgtacagtgctgaaaggcaaatttttaactttctatgctatattcctcatgctgtacattcaataacattatcaggtgggattttccccacattattaaatggaatcacatcatctcccatttttccaggattgctgtgctcaatatggatcccctcttgttaggaaattttggggctcggggctttgaaaagccccgatggttggattctgctccttgctgactcttttttgttctcgtgactgtttaggagcggacgtgaaccaagggaaaggtcaggattccccacttcatgcagtggccaggacagccagtgaagagctggcctgcctgctcatggattttggagcggacacccaggccaagaatgctgaaggcaaacgtcctgtggagctggtgcctccagagagccccttggcccagctcttcttggagagagaaggtgcttctttgccaaaacctaagccctaatctgttgacatcccttggggctctagtagaaggcaggtatttggcaatttctggctcccattcctataaaaagatcattctctgacatcaccaaatctgggaagttgagataattcaatattcaatgagatacagtactggtcacagtacagtaaataactgtcctgctatttagcatattggatacaggtttttgggatgatctaatattcattatggggtaggccagttttttaaaaattaagatactgttttaaaattttagtattacatttatttaaaacatgctttagaatgaggcagcagagtcctctttggggttgtaagaggccgcaggatatcttgttgaaccacagatgggccagactactggacacttcgtttctgggcttaaaatgcagctgtttaagagtttagggttcacaccaatccaaagatatttactattataaattaaccaatgataagtccacacttctctataagtaagaactgagactcccaactcgaacaatgaaatattgtggttgagcagtgtgtatggaagtagggctttgaggcctgggctgggctggggaacaaagacacctcaagttggggagccacctcttgcaatcttcatgggctcagaggcagttgagaaaccagctcagtacttcttttcttaccggagtatggactctgaagtcttagggattctgggactttgaagcaggccttcctaccagaaggattctgatgttatacaatctagttattttctccccacatgatgagcagtaaggttggctttgggcagaactgtaaagtgggctaaggaatccttcttcctcctactctcactgccccagggtacttgcagtcaagtccctgcctgggggcatgccaaacaaggcctatgctcctgagcagtgctggtcaggcagaaaagattgactccaggcctggacaaggaacagtccagtagaggccccttacagttaagcagtgggataatcatggagcagttctatctgcattttaataattacttgttttgaaaaagttctatgtctacgaggcccataaaaatatcttaatttttaaacaatcagaataaaaaatgaatagaacaacatggattgtaatcatctttataccaacacagttgtgaaatagaatttttaattgttttcactgagaaagggattcataaaggcaaaagtgcctcaggtccccctcagtcataacgtagggcatacgttaatgtaggatgtatatgtcccctcctccatcaaacaacctcatagcattctcaaattgcctcccctggcttttcccttctgctttatttcccaaagccattcctagagacagtaattactttaattttgaatttacgttttgcacggtgacagtgtggcctatggtcccactagtttatgaggtgtcatttgctgctggagagaatcactacttgttttgcctccatgagtcaattttggggttttggtgtagtcacctctcagagggctcggagcccacaagaaatggggtcaggaaagtgcagaaaactagacctgtggattgctcacagcagtttctgtctctgggtgcccctacattcatttgcttcagtccacctgtttctccgtttcctggggaagggaatttattcaattactgtcctctttcaatggtatggcaacaggagaatgttggtaaaacccaaccatgttctgaattgggctttgcgtgggtgttaggaaaggtaagattttcccgttttctgagaaaagggaaaagattttaagaatattgccacctcacccttgataagcatctaaagcagtgtttgctcaattaaaacctagaaatgactgtcagcccaacatgaccgcagcccccatcccccctcacccagtgcactttggctttaaaacatcaatggttgttgctggccgggcacggtggctcacgcctgtaatctccacactttgggaggccaaggtgggtggatcatgagttcaggagatagagaccatcctggctaacacggtgaaaccccgtctcttctaaaaatacaaaaaaaattagccgggcgtggtggcaggcacctgtagtcccaggtactcgggaggctgaggcaggagaatggtgtgaacctgggaagtggagcttgcagtgagctgagatcacaccactgcactccagcctgggcgacagagtgagactcagtctcaaaaaacaaaaaacaaaacatcaatggttgttgctgggggaaaaaagaaatcaaggcccaaaggaatatgccaattcataaatacacaattagctggttttattaccgagcaaagcaaaccccttgaatatttgcaggtgccagcaagtgactgcaaatctgtagtgggttttcagctctgtgtctatggacttgaagctacagttgttttacattgtcttacttgtagtaaacagcagcattcagttggcatcagtagttattaatacactgagtttcctgtgacatcccacttttcttaattctctatcaggcctgctctgagatcttgttatttgtaatgctttatcagtacctcctacggttgcctctgacagcgtttctagcacagatgatcagtcacatgtttcaacattccttagtgaggttagattaggttcagtttccccacagtgtgctttttgctgctcgttaatatgtgccttgagaacactgggaagccgttcatttttaaatgctttgagtatactgggcatcatctcataggtgccttactccaacagggcccttctgttagggcctggtttaaaatactgcaagtatttttttgattgtatatgtgtcgagttccatctctccttgttctgcatcaccttgagagataagttaactcggttgatcctgtagttggtggtattgctataggaaaatagagaccacagtatccttttggatgtattcacaaccctgaccgcacactcagatgacctcgggcacatgcctttagaaaatccagatgcttgggcttcacccaacaataactgaagcaacatccctggttggggggactcagcgtccatgtagttgaatgtacccccaccccaggtgagtctgaagtgctacctggattgagggctacggctttatggagttcttgagggtatatagttttgctttttaaaaaataaccaaaagaagattcccattacaatttgatgcaggaacaggggtaggggggcagggaaaatcattccccatccttttgccctataacagagtttctcaaccttgacgctattgacattttgaatcagttgggggctgtcctgtgtactctgggatttttagaagcatccttggcctctcccattagatgccagtagcacccttcctcaagttttggcaaccaaaaatgtctccagacactgccaaatgtcccctgaggagcaaaatgatctcctcctcctttccttccctgagcctcctcccagttgtgaaccactgtcctaaaatgtaaactgttgggtgttccctaagcaaggtttgtgctagctagttcacttttcacttatgaattgaagcattggaatagctctgaatacaggatgtaaaaacaaacacgacttcacatactcttaggattcactgtgagctcattatttttgagtaccttaatttgctcaagttataaaataaaaatgtttgcatctagaaatatgcccttatttttaaagataaaagaacaccattaaacataaattttatttgtattattggaatttttgtatagctgtgtaattcccaagttagcttatttaagcctccattagtgaggctaagctttaaatttctttcactctgttctaaattaaaaacctaacaagcttatttcaattagctaccggaaaagagagaacatagcctaaaaatgccttctacaaaaaaaccccagaaaatggtcttaaatagttcaatattatttccttataacaatgttctatcttggatgctttttttttttaaaaaaaaggagtcttagatcaatagcaccattgtatgacttgtcttatgatctttctccagggcccccttctttgatgcagttatgccgccttagaattcggaagtgttttggaatccagcagcatcataagataaccaaactcgtcctcccagaggatctgaaacagtttctcctacatctttaaatgcatctagggaatggattcacaaacgatgtgaaaacattattgagtgttgtagccactagaattttaaaatcaagttggatttatagagtttgactagttttttcgattagatttgtatttgttataaacttgtttatggagtttgactaattttttctattcaatttgtatttgttaaactcaagccagggttgaaagacactgcatacgtttgtattattagttagaaggcatgaagacttttttccctgcatggagagtgtcataagttattgttttgcatatctactgcatgccaagcactttctgcatcatctaatttagccctcacagccactgggtcaagatgtccaattttccagagtaaggatagaggagtcaaattcaaatacaggttttctgacattaacttatgtgatgacttgatcgaggcaggcttttccagcatcactgtcctggttccatctctgctatatgggaatgaaaataaagaaacatatttcttggcttgtctaatttgttttaagcttccctgttgttacaacaaaaccactactgtcctagcatagtgtgggcgccagttctttttttcaaccaaaacactatacatattaagcatattctagaaccttgctgcttaatacagtagcaactagttcagtggttctccactggggttaattttgttacccagtgatgtttaacaataactggagacattttgtttgtgacaactgaggaggggtgctacaggcatgtagtgggtagaggtctggaatgctgcaaagcctcttacaatgtacaggacagccccaccgcaaagaactttccagtccaaactgttaatactgtagtgcccaggttgagaaaccctgctgtagccatgtgcctatttagaagtgtaaattaattaaaattaggtaaaattaaaaatccagtttctcagtgtcattagccacatttcaggtataaaatatgcacaaatggctagtggctactgtattgaacagtgcaggtacagattattgcagaagaaagttccattgccccattgaacagatttctattggactgtgctctttggaggctcgaggaatggatttttaactgcctttcagtttcagatttacaggaacactggtataatttagtaatgatggctgtagtttcagttatctctctgagagatgaatttggggctccattgcatcaatcgaaagaaaattgtaactccttaagtcaaatccttacctgtaagattacatatggtctagatgatctctaaatctatttccaatataatttttctgtaatttttaatttgctatatgaaagactccagaatattagtctaaaatgcacagctagtttcccagcagatggcactgttgtcacagtcacttaagcgaaaggtttgctcctcataaatgacccatcataaaatggtttacaacataagctctggaaatttccattcaagaatgaaaactttgtagtgatagattccactgacaccgggtttccttcttttcctatgtacacaataatccaaatgtgactttacagaacgttacctctcctacttctttttaacagaactttacctcctacttttaaaaaaattgatctgatcatatttacatgtactgcttaggatttacgccgttaattaacatcaacatcctgccactaggtaattcatttagttcatttacttagaaaatatgtgatgaattcccatgtctttatcaggcactattctaggcaccagggtggtaaggaatgtgacaggtaaagatacttgatttcttggatgttacgctctggtcagagtcatccgctaaggggtgaggagctgtagacgttttgctatggttttctttctgaaagcaccagtttagaaaatagcatggtttctcatataaaatgtatcagacccttgcttatgttaatcttccttcagtcaaatccaccgagtttaacccagaactgtaacaattattagaacagcatttttttcttcttagatagtccaggcagttaatcaatttgcaagtccatataatagatggtcatccctacagatgggaaaaataccgttaccacttcactcatagcaatttaggaaaatttcaaatgacctcacttagccatgctcaaaaagaatattatatttaaataatctgttatgagtctagatgtggttatatttataagtggcatatacctttgagtgctttatcattccaacctggtacaacctcataaattctatcatcaaagctggttaagtggcattgaatagaccttacctttatgaatgatggacataaactcatgaacccatcttttttaaatgatcattttgtctgtttttagattgcaaacgacacatatttattgtcaaccaatctcattgtcattgtactacatattccttgcttttattcagtacacatgctggctacttggtgcccattgctagcacaattcatgttacaatgaaagaggaaggcaagaggaagggaccaggaaaggatggcttatttcttcagggtttataatggggctaattgacatgggctgatactccgtgtaccaggtcgcagtggccagccattaagcagacattaggggctcagaaatgagggtctaagatgggctcagctgtctactctggagcatgaggtttcagccttcataatatgataaaagcccagcattagggcttcagcctcagaccaagccagcatcaaaaccaactgaataatagctcccattctagatggcttgctgaaagctaggcatgatgcattagtgatttataaaccttccctcaaaccctcacagttcttatcccgattttatggatgggggtgcagaggggttaaggaacttaacaaagtcagtaggtggtgaagccggagtttaatgcccaagccagggctgttaatcagtacacactccaccttctcttttcttcaatgaatcccagagtactggtcactgggtcctaaaaacaccctgcttaatttcctggtaggtctgggaaaggaggtggagcccagtctgtaggtcagaggtcccagtgtgataccgggaggctgtgccaggtttaggcctggacatcacagagccctttcccttatcacatgaaccagcctgggaggtcccaaacttgctgtctcctgaggcaaatgggtcagccttgttctgccagtgatgctggtgagcacagaatgacgaccccttcccataagaccaaagctaacatggcaaatgaacttttttctgaactggtattattttggaatgacttagtgacaaagtctttccctgtaatgtgggagggtggaggagaagcttcctgggctttggacaaaattggctgcttatttcctaattgtgtatttcttttctttcctctgtaatggttttctattgcgtgtaacaaatgatcacaaacttaagtggcttaaaataacaccaattgattgtctcgtaatttctgtaggtcagaatttcagggatggggtggctgcattctcggctttgggggtctcacatggctgcaatcaaggtgttggctagggcaatggttttcatctggggctcagaggtcttctgagctcattggttgttggcagaattcagttccttgcaattgtaggctgaggtctctcttttcctgctagttgtcagccgagattgctctcatcgtctgaagaccagcgacagttttttgacatgtgaccctttccacaggatattcttgatgtcgatgtgcactttcttccaggccaggtggagtgcatctccctgacttcctaccttgtgaccagctggctggcggcaagagctctgcttctaaagggctcacctgattaggacaggcccaccctgtaatttgggaccttaattgtatcttcaaaatcacttcaaagcaccacccaggatagtgtttgattgaataactggcaaaagaagtatgtacaccagaggcttagaatcttgggggcatcttagaattctgcccaccaaacctgttaatacctaatagccatcagttctgtgttgatttatctgaagtacaatacataatatcataattatgattctttttttttttgacacagcatctcactctgtcacccaggctggagtgcattggcgccagctcagctcactgcaacctctgcctcccgggttcgagcaattctcctgcctcagcctcccaagtagctgggactacaggcgcaggccaccacgcctggctaatttttgtacttttagtagagacggggtttcaccatgttggccaggctggtctcgaacttctgacctcagatgattcgtgcgcctcggcctcccaaactgctgggattacaggcgtgagccactgtgcccggccatgattatttcttttttttttgtgccccccctcccccgcccccccacctgccctgcataatgattatttttattccatccaacatgcatacagtgtttactccatgccaggcatggccctaagaatttcacaaacatcaactcatttaatacttataataattctattatataggtgctgttattatatccattttacagctacggaaactgaggcttagagaggtcaagcaacttccccaaggtcatacgcttctgtcagtttcctttaatcacatcaagcctacatcatcaagtttggcagtgtgatgaatgaaaagtccaggtggggccaggaagtgggacttctcagccttgacgcttccctttggggccttttcactaagtacagggccactggcgtgctcacctagcgggtgtggtgtggtgggggagtgctgttctctcttctgctggccttcatgactcttctataaatctaagcaagaaagttccaagtaagcagatgttttacaagaggcttcattaaagtttgtggaaacgaagagggaagctgagtttgctacaggttcacctcctggcctagcttttggccaacatccctgggatagaggacattggtgccttacctctcctgacttcacttatctgtgatgtttcctccacatcctggagagtgaagcccagagagaaaacgagcctcccttctgttcaaggcccacctcccacactctggtttcttgtctcattccacggtggtgtcactgggagtgaccagctcctactcattgtgaaatagacttacttcatgaccacagaccaatcttatcatatggctgaggtgcctgcaaattccaaaggcgtgcacttccagaggcagggcaggggggctttctgttagatgtaacctggaggttttgtttgtttgtttgtttttgtgagtaaagaacaggaacagctagggcttcctatgtcttgatccatccttcccttcagggtgtttggactggggaactaaggaagtcagtctcaggattggttctgccttgggctcttctgaatgagaaacaaggccaaaatccttggcagggtcctctcagtacagaaaagggttcaatcttcatgctatcacctctatgatgtgataaagaagaatgtgttactacctaatataccctccaagaccttttgactccttcaagtgtataaattctcactgatttgacaagattgattttctaccctttactttgcaaaatccattgtgagaccgaagcaagtaaaattgatttctgctcacttcctttcccacctaaggcctctttgctcattcctgaagatatgagattttctaactttcaatgcccttttgaaaagcttggggtttttttagtacagtaaaaatcagatggttctacaggtctgtgtgggaattttaatgtgatattctaagtgttgatgtgtcattcattcaagaagacacctctgttgtatcatacttggaagcctaagtatttacattgtaaatgttgagctatgaccatgaaaactggggatagtatagtatcaccttgattttcattcaattcacattttgtgcatttcgcttaaggatgtgcttcagaaagccagtggtagaaatttattcctctgagttgcattgtacagaatcaaatgtagcgggtctgcattttatttttcaacataaggtttaaagaatgtcctttttagttctctaaagagaatttaattgattcttaaccaccatcagcctggctggaaattcaacattagtcacaatatgggctccactgaagggttaagcagagatatcacgggtttgtgttgcccagaacatacaagaagggccctttggtcttaggtccaggtggccgctaatgatgtttgtagtctaggcccatgtggttctttggaggcaggaggctccgaggcaaccatgtaacataatgctcaggctggggctgggagccctagtgcctgagacccagccttcctacagagaccctgtagccactccctcttaatgctgtgccacctctccaacacaagctgttatgtgggaagaggacatgagcaccagcttctgggacccattcccaaaccccagatcccctttagtcttggagaattaaagtctctccatgttagcaaactctaccctaggtctccaagtgctctctgtcttctaatcctgggaaaatctagcataattccctcagtgagtttcagagatgcaagccaagaaagtgggcactcatcacagaaggcacctgcctctggggaaccataaccttcaactctgcagcacaaatgttcctgagcccagggaaatacaagcttggataatttctattcgccaacaaaacagaaaaagtgattatagggaggtgactttggaggttggagaataagaaagatgtaaagtaattgtctccaagagtgggaaagttaacgttactagataaacatggtaggcttgttaggtatgttgagtgcccacttgagcaccgtggtcatgcttgttttcctccagccatatttagtgctcaggtacagctgtagcttgggtaaagaaccgggaaagaggaacaatggagttaaggggagtatccaagagtatgactgctgtctaaactgcgcaaggagggataggaggacttgcgagggcagggatggtgtatggtgaaaaagtgatagggtcaatggactggaggttctagtggtctcagtgagtcaaagaactattggtgtctggggtactagagtgagtgaattagagagagagagagggcttgatggttagtgagaggctcgaaatcaagattttacaggtagtttggttattggagatggcagactctaagagaaagtgggtggattaagtgatgtagatgagaagattattggaagtgaagacttcaagggacagagacgctaggatgcagggtgaattgtcttcgctatgagtggaaaagttgtcaagaacaatgacaagcatcaacgattaaaaggaagatagaaatggcttttatccaaaagacagacaataacaatttctggcaaggatgtggagaaaagggaaccctcatacactgctggtaggaatgtaaattagtgtaaccactatggagaacagtttggaggtttcccaaaaaactaaaattagagctactatatgatccaacaatctcattctgaggtatataacccaaaagaaaagaaatcaggatatagaagagatatctgcactcccatgtatattgcagcaccattcataatagccaatatttggaagcaacttaagtgtccatcaacagatgaatgaataaagaaaatgtggtacatacgcacaatggagtactattcagccataaaaaactgagatcctgtcatttgcaacaatatagttggatctaataacctgacgtttcttttcttttcttttttttcttttttctttttttttttgagacggagtcacgctctgtcgcccaggttggagtgcagtggcgcgatctcggctcattgcaacctccgcctcccggtaataaccagacatttcttgatgaccacaacaaggaggagtggggggttgtgtcctctgatggtatgtatgtaaaaaaacctagatgtttgacagagaagaacaagaaatgatctaaaacagaggttgacaaacaatggttagcagacggaatccatcttgccacctgtttttgtaaataaaactttattggcaattggctacacccattaatttacatattgtctatggctgcatcagcatgtcagaagagttgagaggttgtcacagagagcagatggcctgaataacttaaattatttactatctggtcctttacagaaaaagttttctgaccctgatctataattagcaatgaagagcaaaacattaacctcacaatgagaagtaagcacaattaatataacaataatttttattgccacacgaatgtcaaatccttctgctccttctgctctagatcatcagatcaaacattttggctcagttgatttttttcatggtcaatctattcattggatggctgaaatgatagaatggctgcttgttttacctttatgtatgtatatattttttcttttgagcctaagccagcttacatgattgatttagaggtaaatttcataatgtgcagatccagagcaccattcatttaaaaagtaaactgcagactatggcactattctttggtttgttatggtactgagtaaagatgctagtggatatgtcttccatgactgatttcctattcaatcttaccttgttccctgttgttagtcctgagaatatgaaaccatcctacattgctttgcccactgtctaatgagacagggatagacagcactctcagggtagtcaatctgtatgcttatcagtggtcactgatgtttcttctttggaaaatttgaatcaagcaatacaaagactcagagaatggacaactgagtcagataagtggtaggacaccagagtaagtatgcacgtatgtgtattgttaaacttcctgaaactatcttcttcattcctgcttttcctggaacctatacagcttcctcttccaggagatctttatccttttacttaacctaacttgagtagattctattcgttagaatctaatgattactaagagcatgtgagtgtccagttcttggtcataagtgggtctattggcttgtctcttccaggaattcagataagatgtgttccccaggccagcagtccttcatgctgcttgtcataaggagaaaagaatatggagagagcagcatagatgcaaatcagcctttactcgttggaagaccattgctggcaggaacctaactgaaacagagccaacaggtacagtcctcttccagtatccttggggaattggttccaggatcactgttggatactaaaatccacagatgctcaagtccctgacataaaatgatacaggattttcatataacctaggcacatcctcccatgtactttaaatcatctctagattacttaaaatactgaatacaatataaatactatatagttattgtactgtatttttaattgttatgttttaattgtttttcttcaatatttttgaaatctctggatgcagaacccatgaatatggagggctgatgctatacagtctgtaacagatatacttttctagtctttttttttttgagatggagtctcgctctgtcacccaggctggagtgcagtggcgcaatctcggctcactgcaagctccgcctcctgg

SEQ ID NO: 375 - DNA, 32719 bp, Homo sapiens
gtgacggcctcggccgcgggcgtttacactggctctgcctccggcatctcttcgccggtgcgtcctcgccgcgcccgtaggtcccggcagccgggccccgcctccttcggagtccgagcgatgggcggggaaagggacaggcaggtatagctctgtcggcgccgcggtgtccacctcagtcaggccacggtggaagacgcgtgccgcggcgcctggttgcctgcagcggcccggacccgagaggtgagaagagggaagcggaccagggaagagggagggagcggtgctggccgccaagcggtcagcgggcccctcccagagtcattctgcctgggtccccgcgcggtagaatcccagatcaggggtcgccgccgtggagcggggcgtgcgtcaggttatttcccgggtggtccggggccgggcgagtggcactgcaccctggtgatccgggcctgcccgtctggctggcggctgcccacccgccctccatcccgcgtatctcgccgtatctcgccgggtgccacgcactccgctgcttttccagtcctcgttgatccgtctcgaacctagatatctggaatagggatcgaggagataggagccaccaccacctcggacagatggggaaactgaggccggcacaggcgagacggcttggttatcttggttattaaaaatcacacacccgattaagtacaaaatcaggacctgttctttcggactcacacactaagttggtattatttcactggatggatggaaacactgagaagacagagagggcccagagccttgcctaaaaatacacagcaagtcttttgcagagctaggacttgtacccagctctccaaactcatagactatcagcctgggctccttccttgcacagattggggatcacagtgagttagaaacattcagaacttaaattgccttccggcgcccattctagttaacctgtcttttctccttgtccccaacagttctttatgtgaaatctacaactaatgtgatatgcaatactagattaagcagaactttttgtttttgaaaattgaatcaataagaaatggagggccaaagctgtgggaaaggaatggaccctttaaaatcaggaatctcaaggcaggatatagcaagggacagagactaatagctgtcgtttattgagtaaatgctatgtgccaggcactgtggtaggtagttgtgttagccttacaaaccagcaagttaggtaatgttaccccattttacaggtcagaaattgatgctgagtacagtgaagttttacaaaaccattgccatatgactgctgagcagtatagctgggatctgaacagagatctgtttgacttccagaacacatccagtgattctccaagtgtggtcctaagctcactcgttcagcatcatctagcgtgtggagtcctggatctcatccttggatttgcagggatggtcctaagaagctaacggctctctgtatttgacaattattgtactgtaatgtgctgcctcctaggggaagatctagaggtgaacatactctgggctaggggtaatttttgagggaaaaaaatcacttttttttaatttctgatttgactttttttttttttgagaccaggtcttactctgtcatccgggctaggagtgcaggggcgcgatctaggctcactgcagcattgacctcgtgggttcaagcaaaccttccacctcagcttcctgagtagctggaaccacaggtgcacgctgccatacctggctagtttttgtagtttttgtagagatggtgtttcaccatgttgcccagtcaggtttcaaactcctgagctcaagcaatcctcctgccttggccttccaaagtgctgggattacaggcatgagccactgtgccctgcccacacttttattttttattttcccccatgattgacagaaggataatcacgcttttagtgaatgtaaacccccaggcagatgcttgccaagcttaatttcttgacataagcttggttttggcatgtgggggcggaagagtggggttggagagttaagtgagaatggggaaagtaactcctttttccttatcatatagctgttaaattctaattcactcaacagatacttgctaagcatttattaggtgcaagacatgttcaagacactgagaatacagctttgaacaaaacagagcaagtcagtgccctcatgtgaaagacaattaacaatgtgtggtatggaatggtgagaagagctatggagaaaaataaagggcataggagtgcaaggcagggctgggcccaggaggaagacatggaaatggcagcaatggcagtggtgctatatttatttatttatttatttatttatttatttatttattttttgagatggagtttcactcttgttgcccaggctggagtgcggtggcgccatcttggctcactgcaatctctgcctcctgggttcaagtgattctcctttgtcagcctcccaagtagctgggattacaggcacatgccaccacgcctggctaatttttttttttttctttttttgagacagagtctcactttgtctccaggccggagtgcagtggcgtgatcttggctcactgcaacctctgcctcccaggttcaggtgattctcctgcctcagcctcctgagtagctgggaccacaggcatgtgccaccacgtccggctaatctttttatttttagtagagacggggtttcaccatgttggccaggatggtctcaatttcatgacctcgtgatccgcctgcctccgcctcccaaagtactgggattacaagcgtgagccaccgcgcctggcctaattttttgtattttttagtagagagggggtttcaccatgttggccaggctggtctcgaactcctggcctcaggtgatccacctgccttggccccccaaagtgctaggattacaggcatgagcccctgcacccggcctgctattttgcatatttgtttaacttttttttttttttttttttttttgtggagacaagatcttgctatgttacccaggctggtctcgaactcctggcctcaaagtgatcttcctgccttggcctctcaaagcgctgggattacagacatgaaccactgtgcctggcctctgttttatatattgtatctaggaagggaccgatttatataaggtgtcatttgaggttgggcaatgagcaaaggccccaagggcaaaggctgcttgatattttcatggactggtgattggaacactagtgcataggaggaagcaagacagtggcagttttaggctcatgcatagaagcttataccaatgtttttagaccatatttggtaggagatagggagccagtgcagatttttggggagcatatccaaatggttgacctcatcttgctaatgaatgcttcttttgaagaagaggcatagtgctttaaaaatgtaggttcaggctgggctcttcctttgctcatgcctataatcccagcaatttgggaggccgtggcaggcagatcacttgagctcaggagttcaagaccagcctggacaacacggcgaaaacctgtctctacaaaaaatacaaaaaaatagctgggcatggtggcgtgcacttgtgatcccagctactcaggatcgcttgagcccaggaggtggaggttgcagtgagctgagatcatgccactgcactccagcctgggtaacagagtgagaccccatctcaaaaataaaaataaaaaatagccaggcgtggtggctcacgcctgtaatcctagcactttaggaggccgaggcgggcggatcacgaggtcaggagctcgagaccatcctggctaacacggtgaaactctgtctctactaaaaatacaaaaaattagccaggtgtggtggcgggcacctgtagtcccagctacttgggaggcttaggcaggagaatggcatgaacccaggaggaggagcttgcagtgagccaagattgtgccactgcactccagcctgggcaacagagtgagactctgtctcaaaaataaaaaattaaaaaaaaaatgtaggttcaatattagaggaaactgagtgaccattatacaggaactgtgtactatttttacagcttttctgcaagtccacagttatttcaaaataaaaattttttttaaatgtaggttcaataaagtgtttaaggctgaactatgcctgcaactttcaaatagttgaaaaacaataatgacaaaacccatataagtatggagagagagtgtgttaacatcttatgaactgtaaaattgctaaataggtgaattgttagtatggaagtgttccatgtatcattctttcaacttttctgaagatttaaaaacagcttcaaaataagcaatcaagcgacagtatacgtttgaatcaggcaggcttgttcaagtcatgattcccctacttacaagctgtgtgtggctgggcgcggtggctcacgcctgtaatcccagcactttgggaggccgaggcaggcggatcacaaggtctggagatgagaccatcctggccaacatggtgaaaccctgtctctactaaaaatacaaaaattagccgggcatggtggcaggcgcctgtagtcccagctactcaggtggctgaggcaggagaatcgcttgaacctgggagatggaggttgcagtgagccgagatcacaccactgcatttcagcctgggcaacagagcaagactctgtctcaaaaaaaaaaaaaaaaaaaaaaagctgtgtgaagtattggaaaattatttctaaactacatattctagtctagtttatttttattaaaaatatatttttaattatttttttttcttacactgtagctcttaccagtctagtctgagatttttccatataagagaggagacttactttggttgttgacttgttcacattaatgctgggttaatgttaagacttcaggttttccacaaacttgagatctttaggttgtttttaggtcgactctagttttcctgtaattatctgatgtatatacacttacagagactggcataggcaatctattagaggaaaaaggttaggagtcaggatacttgggttctggatccatctctgcctttaagtagcaaatgatttcactaatctgaacctttatttatttattttattttattttttgagacagagtcttgtctgtcacctaggctagagtgcagtggcgcaatctcaactcactgcaacctctgtctcctgggttcaagtgattcttgtgcctcagcctcccaagtagcagggattataggcatgtgctaccacgcctggctaatttttggatttttagtagagatagaatttcaccatgtgggccaggctggtcttggactcctgagctcaagtgatccgcatgcctcggccttccgaagtgctgagattatagttgtaaaccactggtacccagctgaactcttatttcttaccaaaaaatcatggcggttggatttcttgatctctgtctagctctaaagtcctgtaattcaggaaaactaccacttaatgatttgatcatttagtttgaactgtctcatggttgggacagagggttatgacttgcctggagtccagggctcctgacaacaggttactttttctactgaccctcactgcctatggttttagattgtgttatgtgttaaaagcagttacttaaacacacatacacaaacatgcatatcacaccatatttacaacaggttgtgaagctcagttttaaatggcctagatttcttaggaaaatcccagtacaggttgagtatcccttacctgaaatgcttgggactggcagtgtttccaatttctgaatttttttttttaatatttgttttatacttactagttgagcatctctaatctggaaatccaaattgctccagtgagcatttcttttgagcatcatgttggtgctcaaaagtttcagattttggtgcatttttgattttggatttttgaattagggatactcaacctgtatctgattaatatgtcatcaaatctatccaatgaagctgtcatattttaaaactaaatataactgtttttagaaaaatattacaaaaagaaataaaaccttgcttagatacttcctcccaaagttgtgtgtgtctggggacttaagaaatacatttcccaaggctgcgtatccagagtattggaacattcagtgacgatttcttaggaattgaaatataaactgcaattgaaaacaaaatgacttagctgggcacagcggcgtgtgtccataataccagctaatctggaagctgaagtgggggattgtttgaggccaggagttcaaggctgcagtgaactatgatcatgccactgcactccagtctgagcaacagagtgagactgtgtctcttaaagaaaagaaaaagaaaattatgtaacaggttatattcaagctactcttttccccttcagataagaattagactttatagctttattgtagtataattgacatacaataagctgtacatatttcaaaggtactctctctatatatatacataaaactgtcaccacaatcaagatagtgaacatatccatcaatccccaaaatctcctcatgcccctttgtaatctctctctcctaccccaccttacttcctatcccgaaatagccactgatttactttctgtcactataaattagtataaactttttttctttctttcttttggtggaggtgtcaggaaatgaacttgaggactgattagtttgcattttgtaaagtttttgtccctgaaatctccttcatctaatattaatgtagtgtacaatgcagtggcatgaagtacgtgcacaatggtgtgtaaccattactactatttatttccaaaacttgaaatggaaactctgtaaccagtaacaccacttcccccagtacccagtaaactctattttctttctctatgtatatgcctattctctctctctctgtgtatatatatatttttgttgttgttgttgttattctgtcacctgggctagagtgcagtggcatgatcatagctcacttcaaccttgacctccttggctcaagcaatcctccctcctcagcctcccaaagtgctgggattataagcatgagccaccctgcctggcccattttgccttttctagatattttgtataggtagaatcatacaatacttgtccttttgtgtcctttttttttttttagatccagctctttttttttattttttatttgtttgcatcgtgtctgtcttttgcttaacataagggtgttaagtttcctccatgttgtagatgaagagtatcagaacttaattcctttttaatagtcaaataatattccattttatggttataccatgctttatctgttcatctgttgatggacacttggattgttttcaccttctggctattgtaaatagtgctgttatgaacattagtatacaaatatctgttcgagttacagtttttagtcctttgagtataagcggaattactaggtcatatagcagtgctgtgtttaactttttgaggaaccaccaaactgtttttcacagtgttggcaccattttacatttctaccagcaatgtatcaaatgtatcagctgtttttttttaattttatttatgttattttttagacagagtctcgctctgtcactcaggctggagtgcagtggcgcaatcttggctcactgcaagctccgcctcctgggttcacgccattctcttgcctcagctgcctgagtagctaggactacaggcgcccgccaccatgcctggctaattttttttttttttttgtatttttagtagagatggggtttcaccatgttagccaggatggtcttgatctcctgaccttgtgatccgcctgcctcggcctcccaaagtgctgggattacaggcgtgagctaccgtgcccggcctcaactgtcttttttttgagacggactctcggtctgttgccgcagctggggtgcagtggcgcgatcttggttcactgcaacctccacctcctgggttcaagtgattctttgtgcctcagcttgctgagtagctgtgcctcagcttgctgagttacagctgtgcaggtgtacaccaccacacccagctaatttttgtatttttggtagagacagggttttgccatgttgcccaggctggtctcgaactcctgacctcaagcgattcacccgccttggcctcccaaagtgctgggattacacgtgtgagccactgtgcccggcctcaaatgtcttttaaagaaacaaaaatttttgtccaacaaaagtcaaagctaattcttcttggaaaagtttttgttaaaataactttttaaaataaaaaccattctgtccatcaaaaactttattagatacttcctgtatgtgcctaattctatgctaggtattatgatagtacacaaaaagtgtagaacatcttgaataattttaatctagttaggaagataaagcacatattcaacaaacgtttattgaacatataaatggaattcagcagagaatgaggtactgtagacctttcactctgccccatttatttttccaattttggcttctctcctgtacttgagaaccacatttctaattgcctgctggacacaccatctggacatattataaaaatctcaaatctaaaaaacccaaagtcagattttttgctgcttcctatctttccattttcttctccatcttcctgtatatcatccttccttttgtgtgatccttctcagatttcatcttagatttgtctgtgtatgtcctttaagcaccacctcttacctagttgtaccactgaaatggcaaacctcctgccctttcctgccttggaagttaggcctttggtaactgtagcttagaggatgaactcgtgacttcttggaattgcataaaaactaatccttcactccagccttatctcctacaacttcacccttggaacctagtgtgaccttttcctgggtcttggactatactgtgatctttcacttgcctgagttaccttttccctttctattaacgttgcagcttcctacttcacgttggcctgcagtgtattctccactctcagaatactctaaacctttctgttatggtacctagaatgctgtttaaaactctgtcttaatccactgattttgggtagaaattgggttattactcattttagcaagaatttactgaacctctactgtatgtgctaagcatcgttcttgataatggaaatataataagtacaagaaagactgtaaataatagttttgcttataagtaatataatttcagaagtctgaagtgctatgaagaaaataaagccagataaggatatagggaatgctgggaaggaggtgttattttatttggttgggatggtcaaggaaggtttctgtgaggaggtgacatataaactgaggccaggcatggtggctcacacctgtaatcccagcactttgggaggcagaagtggaagaattgattgagcccaggagttcgagaccagcctgggaaacatagcaagaccctgtctctacaaagaaataaaaacaaattagccaggtatcgtggtgtgtacctgtagtcctagctacttgggaggctgaggtgggaggattgcttgggcctaggagttcaaggctgtagtgagctatgaccatgccactgcactctaacctgagtgacagagtgagatcctgtcactaaaaaagaaaaataaaagctgagacccaaaggatgagaacatacctgtatagatctgggagattattattctaggcaaagacaacttgagcaagtacagtgaccctaagaatggaatcaacttggcatgttccagcaactgcaaaaaagccagtaggaaataagggcaaaaagggaggcagtgttcagatcttgcaggctattagagtattccaggtgagagaggatggtaggacaatagtgagaagggattggattacaaatagtttgggcagtggggagaggataaatatattattcaaggcacaacagacaggatttactgatggattatatatgggagcatggcataggggaaagaaagattgacacctaagtttggggtctaggttctgatgcattgtgtctagcacagtggttagcttatagtaggagcttaaaatatgtgtgtaatttaatgaagaccagtacccaacctctaggagctcacatagaaaagttagccaatccagctggagaaggcttgttgacacttgaggacattaatggagtaagcatgggttgcaggcccatttaacacagatggatctgagttttcctctgatgagttgttgtcttttcctccaaaggatccttttcctctcacagtattaacttctcagtctagggcaagggcctggaaagtagcctgtgccatcctggttgtaggcatcagtgaatgaaatggagaggaatacagaaggctttgctcatccttggcatccctgggcctttatagtgctgtgatcttccctggacttgtctgacaacagtgagttagaggatccgatggtactatatacatggagaatctgtcttggttgtacctgtttatagtttagttttctttttcttttttcttttctttttctgagggtctcattctgtcacccaggctggagtgcagtggtgtgatctcagctcacttcagcctccacctcccaggttcaagcgattctcctgcctcagcctcctgagtagctgggattacaggcgtgcgccaccacgcctggctgacttttctatttttagtagaaatgggttttcatcatgttgcccaggctgatctcgaactcctggcctcaagtaagccacccgcctcagcctcccaaagtgccgggattacaggtgtgagccactgtgcctggcctagttttgtttttctaaaaccaccttcaactattttttatctgtaaaagacaaaaggtaaaatattagttgctttagtggaaaaagaatgaaataatataacatcagaccagaagatatatgattatttgccaaatgagtgatatagtaagtgactttctcaaaatctttcagggcctatgcattgcctgcagattcaagtctagctttcttaacccggcataaagggccctccagaatccccctcaggtacctttgtaagctcctcccactaatcccccataaccattctctgttttaaacataacattctcatttctgattcttttcctccaacattagaactattgctgtttgtgttttcttctcccttacccatattccaagtcttctttcatcctttcaaacctgaactagacttcagagcccaggttagatatgttcctcccttgaaaactttctaaacaaactattcttaaactctttcatatttctcccctgcttagatgccataatcatagtagtcagcagcttctagttttatttagcagtgagtttgtagcatacatacagaggtaaaccaaagcatgattatggaactttgtgggttcatacttgtaggactgtttctgagtgaatacataagtttctaagagctagagatgggaaaggaccatggccatgaatgtagagaaagggagagttgggaacaacattgttgatattattactggatcactttgtgtagcagctaggtgaaactggaatgtgtagagtagctgaattttaaggtgttcagaaatatctgaaattagagaagctaattatagataggtggtaggagtagtaccatattaaaaaaggatctattcttgggatcccaaaatatgcattttattaccttgctctgtcatttataagctgaataaattactaaattgggccagtcctttcacttttaacctatgtatgtctttatatttaaagtgggtttcaagtagacagcatatacttgggtcttattttttaatcctatctgacagtctccatttttaattagcatgtttagaccattcatatttaatacgatatgtttggattaaactctaccatcttactggctgtcttcgtttgttccatctgttttttatgttttatcttccttttctactttctcttgagttgagagtttttttatgattctattttatctctactattattacttatacctttttaaaaatgtagtggttactcttaggtttaaatgtacatgtttaatcagagcctatgttcaaataagataccatttcacatctagtataagaccttacagtttgctgggcatggtggctcatgcctgtagtcccagcactttgggagaccaaagtaggaggatcacttgagcccaggagtttgagaccagcctgggcaacatagtgagacctcatctctatttaaaaaaaataataataatcagaaaattttaaaaagactttaaaattcccaattccccctcccattctgtgtggttgttgtcacacatttattttgcatatgctataaagtacattcccatttttggtttaaacagttatcttttagagcaattaaacattttttaattgaaaaaatgaattttactttatcttcatttgttccatttcctggactttctttgttatgtagaactgaatttctgattggtgtattctttttggctaaagaaccttcctgaaactgtctctctctctctgtgtgtctctctctgtgtttctctctctttccccatctcttcttctccttcccactccctctctgtctctctccctgtctcccctcatctctctctcccgttccccccacatatatatggtgctggtctgctggccttaaatcctctcagtgtttatctgagaaagtttttatttctttttcatattttattttatttaagacagagtctctccctgtcacccaggctaaagtgcagtggtgtgatcatggcttattgcagcctcaacctcttaggctcaagcagtctccctacctcagcctcccaagtagctgggaccataggcacacaccaccatgcctggcctcttatcttttaaaatattttttctaggtaaagaattctatgttaaaagttatatttctggggtcagatgtggtggctcacacctgtaatcctagcactttgggaggccagggtgggaggatcacttgaggccaagagtttgggaaccagcctggggagcttagtagcaagaccttgtctctacaaaaaaaattaaaaaatgagccaggcttggtcgtgcacacctgtaatcctcactactcaggaggctgaggtgggagaatcacttgagcccaggagttcgaggccatggtgagccataattgcatgtcactgcacttcagcctgggcaacagggcaagaccctatttctataaaagatatatatttctttgatacaaagataccactccatcatgttctggcctccatgatttccaataagaagtctgctataattcttatttttgtttctgtataagtaatatatgttttttctttgtcttcaggattttctctttatcttttgttttcagcagcttgaatatcatatgtgtaggtgagggtttttgttttctttttgtttttatatttactcttcttggaattctctaagattcttggagatagattatatattatatatatatgtattttttttttgagacagagttttgctttgtcaccatgctggagtgcagtggcgcgatcttggctcactgcagcctccgcctcccaggttcaagcaattctcctgcctcagcctcctgagtagctgggactacaggagcgcaccaccatgcccagctaatttttgtatttttttagaagagacggggtttcaccatgttggccaggatggtcttgatctcttgaccttgtgatctgcctgccttggcctccggaagtgttggaattacaggtgtgagccactgcacccggccttttttttttttttttttttgagaaggagttttcctcttgctgtccagacaggagtgcaatggcgtgatctcggctcactgcaacctccagttcctgggttccagcgattctcctgcctcggcctcgcgagtagctgggattacaggcgtgtgccaccatgcctgactaattttatatttttagtagagaccctgtttcaccatgttggtcatgctggtcttgaactcctggcctcaggttacttggatctatattttgatgtctcttattaattttggaaatttcttggccattatatcttgaaatatttcttctgcccattctctctcttcttttggtattctaattatgcatatgtttgatactttgatgtgtcccgcagctcttggatgttatgttacattgttgatattgggggttttttgttttgtttcgttatttaaacttttctgcgttttagtttagctaatttctgtttatctgtctttttgagttcatcgattctttctttggctttcaggtctagtaatgatcctatcgaaggcattcatcatctctgttactgtgtttttcacttttagcattccttatttgattttttcttacagtttccatttctttgttttactttctatgtgaatttttatctatattcttcccagatagcagccatactgggcaagatttggattcccttagttttttcttatgtctcttttgcatatcttaggtttggaaaaaccttttcacccagaaatcaccaagagctctccaaaataggacgttggtgcactcaagctagctctagaaagcaggaaatgacaggagagtcacagactggttgcattgtagagcaaagagctgctgggtgtatccatcaacctgattgattttctcagggtcagtggtcacctaagtctattctttctttccttatctacttcagaagaccatcaaaatatttactcatgttaaacctaaacaaaatgaatatgggttacttttacatatcttgtgttcttgaataagtcataggtcctggattttggcagtttggtaacgtaaggtttatagaacttcacaagggcccatttttctgtcagttccaaaacaagaaacttcctgagtccttcatctaaaatatattgtctcggctgggtgcagtggctcgtgcctgttatcccagcactttgggaggctgaggcggatggatcacctgaggttaggacttcgagaccagcctgaccaatatggtgaaaccctgtctctactaaaaatgcaaaaattagccaggcgtggtggcatgcacctgtaatcccagctactcaggaggctgagataagagaattgcttgaacccaggaggtggaggttgtagtgagctgagattgcaccactgcactccagcctgggcgacagagtgaaactctgtctcaaaaaaaaaaaaaaaaatgtctctatctggccacagtcacaaatgtttgttcatttgttcattcattcattcaaatgttttgtaagcctgctatctcagcgttactacattccattcagattacactgatgaacaagatgtctttcctccaggagctagagagattcctacttcactaatacaagagtgtggttagtactctaatggaggtgcaacatgctatgggacacagagggtgtagtatttcatttgggctaggggagattggttagtgctttctggaaaaggtagcattgtaactgggttttaaaaaattattaggatcttgacaggcaaagaggtggatggccattctaagctaagtaaacagcttatgtaaaggcactaattcatgaagcatttggtaaacaatttatgttctattcctttgagagcctggttcattttcttctcttactccggttattagacttactatttgttgttgtcctttctctttttctggctatttttacctcctttgttttcctatagttcctcatggtagatcttatggcattagttttatagtctaggacacagagatgaaggatcacctgtattgcctccaagtggaagtgcagggcaacattatttctctatttaacctgtgtttcagtgtgtgtacttagaatagtaaagtgaatcttgcatgaatgtaggccctgcccacagggcagatgactccatactagaacatagtggaatagacaaaaaccttctacagcatgtatgagacacttggcccatcgaccctcttcatgccctttacattcagcaccctcatattgacttctctctcctctttcctaccaagcaagggagtactgttcaaagacgcaaatgcattctgccctagtttctttttattgctaaaaacatttatctttaccctacaacctacttttctatttattttcaacatttagcaggttgtttaaaaagggaccaaaaaataaaacaggaccatcttccttgtttcagggactggtaggcaggcattaaggttaaggtaggggttaagaccagatcctattttgcagtctgcctgggaggtgaaaaacctgggaagaagaccgctggtagcatatgtatggaaaggagacaggctgcccttacatcttttcaggaggaaaaactgccagggggagccaggcatatatggagaagaatccttaatggtttatactcttgggaagtcctgtacccagccagttatttgctttgacttggctgtttaaggtctggttctggtctttttttttccccctaaccaagacaaatgaggctcaattaaggaaaagggacataagatacctattccaaaactgaattccttttaactctcatgaaatgacaaatagaattgttagtatatgtgagcactgagaattactttattgatgaacactggtattttctctggtgtaggaagctgaaccatctatctccagaaatgtcttcagaaagtaaagagcaacataacgtttcacccagagactcagctgaaggaaatgacagttatccatctgggatccatctggaacttcaaagggaatcaagtactgacttcaagcaatttgagaccaatgatcaatgcagaccttatcataggatccttattgagcgtcaagagaaatcagatacaaacttcaaggagtttgttattaaaaagctgcagaagaattgccagtgcagtccagccaaagccaaaaatatgattttaggtttccttcctgttttgcagtggctcccaaaatacgacctaaagaaaaacattttaggggatgtgatgtcaggcttgattgtgggcatattattggtgccccagtccattgcttattccctgctggctggccaagaacctgtctatggtctgtacacatctttttttgccagcatcatttattttctcttgggtacctcccgtcacatctctgtgggcatttttggagtactgtgccttatgattggtgagacagttgaccgagaactacagaaagctggctatgacaatgcccatagtgctccttccttaggaatggtttcaaatgggagcacattattaaatcatacatcagacaggatatgtgacaaaagttgctatgcaattatggttggcagcactgtaacctttatagctggagtttatcaggtaagcagcaatgaaacaattggttatttctagaaaagtaatctagtacatgaaatctcatatctctaagggatctgaggaatcacaataattaaaggtatcatttattgagagttcaggatatatgaagggtagaggcaaaattcaaaccctaacctgactccacaggtaatataaggctggttcactggacctccaccacccagtacaactccttaattttacatgtcagaaaatcttggctttgcttgagattatttgtggctggttattggcagagtcagcattagcagttaggcaagtgggtaacagaatggagttgagagtgcaggagtttctcactttttttttttttctggagacagggtctcactctgtcacgctggagtgcagtggcactatcttagttcactgcaacgtccgcctccctggctcaagcagtcctcctacctcaacctcctgagtagctaggactacaggcacatgctaccacacctggctaattttattttattttattttattttattttttatttttattttttgtagagacagggttttgccacgttgcccaggctggtttcaaactcctgagctcaagcaatcctcccgtcttggcctcccaaagtgctgggattatagccatgagccaccacacccagcctcaaattctaaatgtctcttaccttccattaaaattgctgatctattgagcaactcttactaaaggtagtggttgtcttggattgttggggagggagggaaaaagttggggaccacagtttcatattatcagccaggagaaaggataagaaatcaaattcttgagtctcccatagaatccactaatctgtcattatcatcatgcccctggcttttggcatccaggagtcagtgccaggattaaaccttctctaatgcaggcatttcaaaccaacaagggaaggggaagagtagctcactttagttggtgctcagatgagtggggagggagagtgaagatggtgtgaagatgagctgtctactcatatataatggtaaataataagtctacttacttatttattatttattcatttatttataaagagacagggtctctctatgaccaaactcctgggctcaagtgatcctcccaatattgcctccccaaatgctgggattacaggcatgagccatcacgcccaaccaacttttgcctttttgttagtatgtcccaccaagaaggaagaaggcataacaattctgaaaacttattagacagaggaaaatataaagaagtaaaaatgcagaatttttattaatatgggagacagtgtggcataagtacatatatactgcatgagaatggtttcttagtatgaggttaaagataatctacaataatttttaaagtgtgattctactttgatgtaaatctaattttttgttttaccaattaaaacttcacttgtacacttgctcttagccaagaggctgagaagccgtaagacttcacttttacagtagtgatttgtaatttaaggaaaatacttggtttcttaactagaataattttttccaatttgaagttttcttgtggatccttgagaatgtttttcttttaaaagaggtctgttctttgtgatgggaagaatgaaaaaaaaaagaggtatgaaccttattcaagtttaagaaacgtatgaaaagaaagaaatccaaagttcctgtctcacctgggttaataagtaacagtgtgaccttgggcaagttgcttagccctttaaacataattttcatctttgtaaaatgagaagattgatatatgattgtgtttattctagctctgacattctgtgatgctctgatgatatgtctccatgcaagaaatgtcaggataatataaaatttagaagttcttttccatttatatttaacacttctatatccttccttccaggtagcgatgggcttctttcaagtgggttttgtttctgtctacctctcagatgccttgctgagtggatttgtcactggtgcctccttcactattcttacatctcaggccaagtatcttcttgggctcaaccttcctcggactaatggtgtgggctcactcatcactacctggatacatgtcttcagaaacatccataagaccaatctctgtgatcttatcaccagccttttgtgccttttggttcttttgccaaccaaagaactcaatgaacacttcaaatccaagcttaaggcaccgattcctattgaacttgttgttgttgtagcagccacattagcctctcattttggaaaactacatgaaaattataattctagtattgctggacatattcccactgggtttatgccacccaaagtaccagaatggaacctaattcctagtgtggctgtagatgcaatagctatttccatcattggttttgctatcactgtatcactttctgagatgtttgccaagaaacatggttacacagtcaaagcaaaccaggaaatgtatgccattggcttttgtaatatcatcccttccttcttccactgttttactactagtgcagctcttgcaaagacattggttaaagaatcaacaggctgccatactcagctttctggtgtggtaacagccctggttcttttgttggtcctcctagtaatagctcctttgttctattcccttcaaaaaagtgtccttggtgtgatcacaattgtaaatctacggggagcccttcgtaaatttagggatcttcccaaaatgtggagtattagtagaatggatacagttatctggtttgttactatgctgtcctctgcactgctaagtactgaaataggcctacttgttggggtttgtttttctatattttgtgtcatcctccgcactcagaagccaaagagttcactgcttggcttggtggaagagtctgaggtctttgaatctgtgtctgcttacaagaaccttcagattaagccaggcatcaagattttccgctttgtagcccctctctactacataaacaaagaatgctttaaatctgctttatacaaacaaactgtcaacccaatcttaataaaggtggcttggaagaaggcagcaaagagaaagatcaaagaaaaagtagtgactcttggtggaatccaggatgaaatgtcagtgcaactttcccatgatcccttggagctgcatactatagtgattgactgcagtgcaattcaatttttagatacagcagggatccacacactgaaagaagttcgcagagattatgaagccattggaatccaggttctgctggctcagtgcaatcccactgtgagggattccctaaccaacggagaatattgcaaaaaggaagaagaaaaccttctcttctatagtgtgtatgaagcgatggcttttgcagaagtatctaaaaatcagaaaggagtatgtgttcccaatggtctgagtcttagtagtgattaattgagaaggtagatagaagaatgtctagccaataggttaaaatttcaagtgtccaacatttcccagttccacagtgggaaattttgcacacttgaaattttaaccaagtggctagatattattcctcctttgaagctaatggcatttgtatatacacactgcagcagagcttgtagctggacagagtcaaaaagaagaaaatacggtttcaggctttcttgcagatatgaagtattcttggaatgcaataagtatgtattgaactgtactgtaaagtagctccaaaacttaattactctcctgttttaggggttatacatttggactgtgcattctccaagagatgaagcggtgaagttgggatttacattggaagtgctgtagacttctttatgtggctcagtggagagagggaaagaatgttgcacctgctctagtaccataggtcaagaggcttctggatcacaaagtcataactagacaggtttgttcttgtagttttctatccccagtctttgctccccagatggcagtagtttttagtaggaaagtgccattcctgtccttaaggcacagtctcatcagaagtctaatacctgggcaggtttataacatcctgagagccagcctgacattagacagaataccctttgtaatacattggaaatttttactcatgcctttttgtttaggataaataggtaagcacaaagagctcttcaaaatcagaaaaaacaataggagtccttccttgtcttttctgtgatctctgtccttgtttctgagactttctctaccattaagctctattttagctttcagttattctagtttgtttcccatggaatctgtcctaaactggtgtttttgtcagtgacagtcttgccagtcagcaatttctaacagcattttaaatgagtttgatgtacagtaaatattgatgacaatgacagcttttaactcttcaagtcacctaaagctattatgcaggaggatttagaagtcacattcataaaacccaagtgctatgggtgtattattcatgatagctggcccacaggtcatgaattgaggaggaatttgctttcaaaaagcaagaatgtccaacactgaaagtttatagttttatatttggaccttgaaaggtaagaaaaaaccaggttctccaaagttaggaatagggaactaatttatgaaacagccatcttaaaaaaaaaaaaagtaaactgcaaaagtacaaaatcatttttcaatctgttcccagtttctaaacaattttaaatatttatgagaagcaaaccctatgtgtagggcatctgttggagtgggatgcttttagacatatattaagtatgtacatgtttaatatgtatatttaaaatgcatatatattttattatatctatattatcctatatagatatatgtaacttagctttattgttagctccataagctgccagtgttgcttttctgttggtagagctctcccatttggtgacatggaaaatacctttccattatcacaacaaagcagttgctcagtagaaagtctagatttctgtcttataggtgatttctgtcttataggtgattataatcaagtgtaggcttcctgaattttgacatccttttagaacttgggtctggaattccagaaatgttaattgctgcttgtatttgttcttgtttgttttttagccagtatttgccctttctatccagccttatgaataatagcagtaaaatcacagtatcttggtcagtctttatttttttccttttttcttttttaagagacagtcatccaggccagagtgcagtttgatgatagcttactgaagcttcccactcctgggctcaagttatccttccattttggcctcctgagtagctagaccataggtatgcatcaccacaccctgctaattttttaaatttttttctagagagagggtctcactgtgttgcccaggctggtctcaaactccaggctcaagcaatccttcagcctcagcctcccagagtgttgggattacaggcgtgagccactgcacttggccaagttatttatttttaatctctcttgcccttctcccaaggcaggcttaagttgagactattataggtgtctaataacctgtgacagagtaatgagtacatgcttaagatgttataattagccaacaccaacacagcaaaaaatataattccagccaaagattctggaaaatccctcagaaggagggataacaggatttgacctttaccagcgatttctgtccatatgtggatgtaaacagttctggaacgttatgcatgcagttagcgaatccttgaattatgttctggtttgtacttgtcccatccatccaaacaagagattctgcttttggtagccatctgtagaaacatttaagatgtcactagaatttacatttcatcctctctacttgggttgaggttgcctatacttgcatattgttaaaatgttttggttgctgatattcagaggaatgaaacctggaaccaaagcctaatttgccgataaaaaaactgttttcggccaggtgcagtggctcatgcctgtaatcccagcacgttgggaggccgaggcgggtggatcacctgaagtcaggagttcgagaccatcctggctaacactgtgaaaccccgtctctactaaaaatacaaaaaattagcggggcatggtggcacgcgcctgtagtcccagctactcaggaggctgaggcaggagaattacttgaacccgggaggcggaggttgcagtaagcagagattgtgccactggactccagcctgggtgacagagcgagactccgtctcaaacaaacaaacaaaaaactgttttcatttgctctcttgaccaaaggataggactttagttctttaagcattattttaaacactatattgatacaaaaatatcttgcttactctaaactttagagtctaaatgaagctttttctcagtacaagattctgagtatcataaaatggttatttaattgaaacgtagtgtggtatactcttgatggttagaactcttacagccttatttatttttaagtttgttacagccaaagggttggagtgtgccagtgcacaggtagactaaggaaaacattatagaggagtgaagagaacagaccattgaaaagactattatctgaccagcggaggcagaaaagagaggaacccagttgaataggatccaatccctggttagcctctacacaataatagggagacaaggattaggagccatacctcccagagcaaggtatctttctagagcaaatttctctttctagaaggggagggtcacagggtcacagattcaccaaagctgaaagggctgaggagctcatggtagcctgggctgacctactctggagcacggtgtcttccttctaaactgagtgactgtagtactatctgtgcctctgatggtaataaaactgacaagatgtctaatttttttttaagtaggaccaaaggaaaacaagatttagatagtctgactttgcttttgaacaacagacattgcaagtcaaaattgttgtcaaatttacatatggtaaatgatgaactttaaaaatgtgtccaggtgttagatgagttcattagactcttttaatgctaatggctagtacgtttaaacaaaacagcagttctctgctgcaatattcccattgaccacttaaatgaccataagtggtcatttaagaacatgttagggttagccctgatctgaatataaaagtgagaaaagggctacagtgcatttcttggtaacttaaactgagtcttgaagttataatgatccattcgagttctgtgatccttattgttcttaattgtgtttctctacgtattgttacagatgagccatacgtttctttgtatcaatgtagacatgacttcagatacctctgaggacctacccagcagtctaggaccctgggccaagtgctgggactatggtactaaatccagtagatgggctgtgtagcaactctcccagggaacacactagggtacttagggaggtgctttgtggagcatgttgaagctttgagatctgagcaggaggcagtgatgtccctggtctattcagggaaagatttcagtgtgaaatggtaaacatccaattgacaggatttagattttgcttagtttttctgctttttaatgtttctatcccccatctcagtgttttctttatccatcccagtgatgccttatttgaaactgggcttaaactgcaaaaagaatgaagttggatttaggaagctgttagatcattgagtggtgttgagagtgaagtttcactagcagggaagtttccttgagcctaaaataaaaagaaaaaattaaaaagaatcagtttttttaattaaaaaaatagaaagctgttaggctcctaattcgtggggtttttttttgtaaaaacagtttagataatcctgaatgcaatcattaacttggttgctaattacaagaatgaaaattataatggaaaaggacaaaataatataccagctggtttgttattatagtccgtgtattaaaatactattgaaatacgttaaaggtaaatttttaaggtttaaaaaaaatttagtaacttacagggatggagaatttagatgtcagaggtggggagatttatttttataaggtaatttttatcctgataaggacttaaaaaaaagttttgcaactgaaattttaaagtaaacatgttaagtacagttaaaaagtaagcattgtagtaaatagtggattctctggtgtgtattttttatctcagtgttgaaaattggaaaagaatggactgaagtctaaaaactggaataatgaaggacactaaatgcctttattgtagatactatgtttgtaagtctatagctaagcaacttaagccaaaaaggtctttcaactgaagctttaatcaacttattttggagatgttctcttcccttatctcatgcgtcatccctaaaataataagatacatgggatcaaatagcccttgccttttcaacacaaatcagttggaaaattatggtttgagtcctgttgctgccatggcttctgtttctcagaaatgagtgtgtatgaacataccaatctatgtaataggctacctttttttgtcttctttggaactttgtacacaaaccaagacaatatcagggtgacaggtgaatgaacttaaattctcagtcttgtctattcaccaaaaaagtatactgcctgttttttctttaattattcaaggttgatgacttttaggaacatgttttatactgtattttttaattaaagcaagtgccttgatgtaattccatgtaaatcattgcttaaccctcttatgggatgaggatgagttattaatgtattgcagcctactggaaaggagggggagttggttaatagcagatacttttcttctagaagcttatgttttatgctgtttattatgtaagatcctgtatgtgtgttgagatttagaggtttcatttgttttgtctgctaataaattgttactctaataatacattactctgtatttaaattatttaagtgcaaggagggttctgactaaaacacatttaggccccagtgagttttaaaataccatctgttggccaggctcagtggcccacacctataatcccagcattttgggaggctcaggcgggtggatcacctgaagtcaggagttcaagaccagcctggccaacgtggtgaaaccccgtctctactaaaaatgcaaaaattagctgggtttggtggtgcacacctgtagtcccagctactcaggaggctggggcatgagaattgcttgaacatgggaggcagaggttgcagtgagccgagatcacaccactgcactccaggctgggtgacagagcgagactctgtctcaaaaaaatacataaataaaataaaatatcatgtgttaggctgggcacggtggctcacgcctgtaatcccagcactttgggaggctgaggcaggtggatcacgaggtcaggagttcaagaccagcctggccaagatggtgaaaccccgtctctactaaaaatacaaaaattagccgggcgtggtggcaggcacctgtaatcccagctactcgggaggcttgcggcagagcattgcttgaacccaggaggcaggggttgcagtgagccaagatcaggccattgcactccagcctggacgacagagcgaaactccatctaaagaaaaaaaaaatcatctgttacatttggagagtaattcagtcattaatgtttcccagtcataacaaaaggatctgtcctcggagaaggacataaagaaatccaattctttttcctttatggtcttgaatgagtcacttaaacctttggtgaagaggggaggaggactagattgcttgaggaccctttctgttttttgtttgtttgttttgagacagggtcttgccctgtcgctgaggctagaagtgcagtggcgcaatcatggctcactgcagtcttgacctgggcttaagcaatcctcctgcttcagcctcctgagcagctggggttataggtgtgtgccactacactccggctagtcttttctattttttgtagagacggggttttaccatgttgcccaggttgatcttgaactcctgggctcaagcattcctcccgccttggccttccaaaatgctgggattataggcgtgcgtgactcctattccatacagtactgggatcagaaagcccaattttggatcatgttttactactatcttaactctgaatttgggcaagtgacctttgagccacattttttttccatcagtaaatagaggctaacaccttctgatgactgagagaactaggagtagattcctgattggagcacaccattttgtaaggaaatagagcactactctcaccctatacatgccatgaagcctctcccagaatgtcctcctctttatgcctcgctcagttcatgagggtacagggttaaggacagtttttagtcctccttttgcagtaaccctgagcattctcccaacctcattcccacctcacagagtgaaggagttgaatagtctaagggtccttccagtcttaccgtagtgtgcactcctgcctgtgagcagcacctaggatccagagccctgtgaggtacactcagtcattctggagcatctctgtcagccatcttggagggcctcacttccccatctgtcctttcagggcttgtgtccttggcctcttctctcttcacttaataccactgcttaagtattttgttttcagatccagttgaggctgatgaaagtatgactcagggaaatagccacatgtgcaggtatacacgtatagctctaaaaaggttggctcatggactcccatatgttgaacaccttgcattataagcccactctacataacttcatccacatgtatgtcctcaatcaccgtgctatctgtggcagccaaaaaatatttctagcctaaccattctagaacgccaaacagtctatctgtctgtatataaatctccagggctggttgttaacagacaactgcctggatgcccagagacatctcacatgtaacatgaccctcaaacttgtcttcctttctcctggtaacatactttgatcctggcacgacccagccacttaagcagaaacctgaaatttcatgaaatctccctttacaactcccacactaaatccatcttaccttgtaaatgcctctcaaatccaacatgtttttcctacccctcagtgttaattatttctcttcagtactataccacagcctaactagtttatctgcttttctacaatccaacctccatactagttatcaattattttaattaaaaagaagttgaccattgctacttagggcaagtagaaggggtctctagtgcctttaggataagttcaaaataaatggtctaacccacaagacttaaaaaactctgcccttacatctccagcctttcgttctaccacacatcctttgcttggcttaccacccaccaaccttaggtgctcccaaatgggccattaaaaaaaaataccccaggcctttatatatgctgttctgccaggagttgcctcccagccccatctccctaactccctacttttccttccagatacttatcaaatgtcccttttccttagcaacatttcctactgaattcctcttctctcattcaggggctcctttagggtccacctctatactcctgtatatctttgcatatcctctaaaatgacatttaccactcataaagagtaaaatatattatttgcatattctcaaaaatgacatttaccactcactcccccacgtcccgtctatctcttctactaagcttcttgagagtagggccatgtgctccatccttagagctcctatgacctgcagtgggtttataaggttaaataagttattactgcaaacatggatatgtttgttgggtaattatttccctaatactgcctcatttccagagcttgagtgtctatccacgatcagttacatagcctatggttttttggttttgggtttttgcctttttttgagacagggtcttgctctttcacccaggctggagtgcagtggcgcaatcatggctcactgcagtctcaaactcctaggctcaagtaattcttccgcctcagccttccgagtagctgggattacaggcatgagccaccacatctgactaatttcatttttgtaggaacggggtcttgctatgttgctcaggctgctctcaaactcctgggctcaagcattcctcctgcctcagccacccaaagtgctgggattacagacatgagccaccatgctcagcctggcctatggttattaataggttgggaaaagtctctagagaagagatggtatgtaatggaggggattaggtggtcccaggcagttacttctaggtaaattgtttgaacaagtccaacatcctatgtctcttccttctttccttgttgccttccctctcaatctgtaccacatcagagaaattacaagtggcagctccaaaggtttcttcagttgacgctgtctccctatgtagtccacctgtgccctctggtggccacagtatgctaccacattccactttaaagataagtctggcttcaggtagcatgaacagcagtttaataggtccacaaccttggaattaaattatctgagtctactgtggttttgtattatgatttactaaaaatattaaataataagtaaacagtgcttgaaatataatagacaataaatcttagcttacttgcttttgaatcagggcccttatgagtaatggcacagaaaacttgaattatcatctattgattaggctggtggctctcaaacactgaaccccaagacctgtcagtggaaaaaagggctgataaggcaggtccttgactctagatgatactcattatgttccaaatagggatggaatgacaatagagtgcatttatagaacacttagtctcaggtacacctttttatcctcatgacaacacaattgaggtaggtgcctaggtatagtatgttggcctacagagaggattagtcaactggagcagaagtggggttgccactcaagtgaggttggagtgaccaaagaggcacggagaagccacagaaagcctgacgagggataatatcaacctcttttagcttaacaaagtaccaaaaacccctgatatccaatagaatcgaagtgttagccagtgtaaactgaactaaaaaattttctttttcggatgatttccatcttccgatggaagtccaggatctaaatcatgatatattaagtaaatcaagaatgttaaatttgttattattattattattattattttagatggtgtttcactctgtcacccaggctggagtgcagtggcaacctccacctctagggttcaagtggttctcctgcctcactctcccaagtagctggtattacaggtgcccaccatcatgcccagctaatttttgtatttttagtagagacagggtttcaccatgttggccaggctggtctctaactcctgacctcaggcaaactgcctgccttggcttcccaaagtgctgggatgtgtgagccaccatgcccggccagggatgttaaatttgtttttttaaaaaagcaagtttaagcacatatttactgaacatctactatatgcaaagcacttagacaagccctttcatactaaagtcttgtgtgtataaatggaagccaacagaagtcctgcaatgactttttggtggagggacatgggttcaactataaatagtatatattctatatacttatcaaattacattatatataattcattatcaaagaacagagattataacctggattggaattatatttgaggcaactatattcatggaaaaattttgcaaacccttttaaatggaataaaaccctaccttatctccaagccatttctagtagaatcaatgcttaatacagctttaaaaataaggtggcttcaacacattgtacgtgtctatcaatttatacacaaatgttttttgaagtgcctacgatgtgtccagcacagtcctaggcaccattaagattataaaggttgactgatccctgctgtcatggaacttacagtctaaagagccagagaacatctagaaaacatctaagtatttgagtggtacagacaagaagtttggagaagatgaggggaaaacaggtggagtagttgctggagtctccaagaaagcctggaagaaagaggattccagttagttcctgaatgtgtagggcctagcttagtagaaaacaggatgaggcatttgggcaaggcacacaggcagaagtcggtatgcagtaaaagaaaacaatggcctcttcagggagcattatgtacacagaattgtatcgagctaacaagttggaaatgcaggttgtagtcaactatagaggatactaaaactcagctgaatagttttttttgtaggcatttgaaagccactacagacacttgggcaggggaaatggtgtgatgccaatagatcaaacaatatgtgcagaatggactgcaggagaaaggtgagggaaggaattagatactgtggcagtaatcctgacacgagaggatgatgacagcaattaaggagctgacaaagaaatacaaccacaggacttagccagaagagtttgcctctcccacatgttaagaatttaaaatatgtacagtacttttaattcaaatgatcatattagtttattaaaagaaaaaatatccaaaataagctataaaataatctatttaaacatctgctgtttttcagtgattgttttgttaatgtggaagcaacattttctatgattaatctgctgttacctgttttgactgagctactacaaaaagaaaaatcactgaattgctatgggtttctgaaatatccaaaaaattaacctgaagcagggggaaaaatgacatcacaccattagcaggtattgtgtgaaacttctaaaaatgaaactgacatttatctgacttattaggaataaatactctctaatgaactctctaa

SEQ ID NO: 376 - DNA, 270203 bp, Homo sapiens
atgcgtggccgtggcggggggcgcgcccgctgtcctgcgcccctgcgctcgctgctgggcgccttcggggcccgggacgctgccgccgccgcccgagatcctgcgcaaggtaagcgcgcgctgcggggaggggacgcgggacgtggggcccggggtgcccgccgggcacgaggcgctgggggacgactcctcctgaatcccttgcccttggccgttgcgggtggccgggaggcccgctgcgcccccagccacagaggtgggcgccccgggtctcgggcttaccgcccccctcctccccctcgcagcaaagtcaccagagtctctccctaaacaagggcagtgtccgcagggtcagaagcgctggcgttggggtcgacagtctggggtttggaattcccctctgcccgctgtatgagcctgtgcgcatggcgtttgaccttgctgcgcctcagtttctgcatctgtgaaatgggggatacctgtgtcttgggggcagcagttgggatcgtatggacagcgctggccacccaagggagggctctgtgcttgatcgcccttcttccccagggagggccatgggcctccacccacgtgggactggcccctcgccccctgctgggcagacacctgaccctggagagggtccagctgcagttcaagggatgggatctaggaagaggggcctgaggaatccagaaaatggccagggccccagctgggccagggaagaggagttgaggacggggagtggcctcaggcctcctggtgacaaggctagagttttgcctgtgctcagtggccatgggtgcatgagtaccaggtgtccagcaggcagagcccggagtggggtggaggagagctaggccagtgtttccgcactggcccttggtgaggataccgggggcacttattacagattgttccaggggccccacccaggcctgccccttgcaatctcctgggagaatctgtgtttttaaccaaagcaccaggaaactctggtttagatccatccgtggttcttttcagtgcctcgaaacgggttgatcctgccttcccttgaagacatttctggttgtcacacctgggggaacgccactggcacccagtgggcagaagccggggacactgctaagcatcccgcactgccaggagccctccttccccacgaggcggtcatggtgtagtccacaggctagtgctggggttgggaaaccctgagatacagggatacatggagtcacaaagtcaagaaaggaggacatggggatttgggggacacttgagagcccgctatctgccaggccttctgtggtgcccttggaggagaagctcgtggcagaagctgagctcaggcacagaggatgggcagctgaatccactcatcaggaatattgagcccctactgagcgccagtcccagtgctgagctcccagggtggagtcgggagagggagatgaggcccctctagggtgctcccctctaatggggcagaagcccctcccccagtgcctgcacagagtaagtgcccacaagtgtcagtgccctcccctaaagcacccctgtttttggcagtgcatgagtactaagaacagtggggcatattctgggttggattttgggaaagggcgttcccagtcctaaccttcggcagcttggcagtgtgttcagggccaccaggagcccatgttctgcctgcagtaattacgcaactcctcacctgttccttgtgctcctcagtcgctgggcatttttaaaatagttctgcggcctctgtctaggccttgatggatggatggcagggctcagccactgctgacccactttccccaaggagaaagcggaatattttgtcagtgggtcagcaaatgattattcatcattgaaaatgcttcaggcactgatctagatgctgggatgctgcggggagcagggaggccctgaggtgagaattcacttgatggcactggggaataggagggtccttgaggctggaagcccatcagctaggggactggagggagctgagtttggggaggtggcccatgggccttggcctccatcagaagtccctaggggttctacatgtgcaacccgaggccaatggcaggttctaggctgaagaattgcatgtccctctgtgtctgagagaaagctcctcatggctgctgtgtggccgcaggtttatttggaggctatggcagcagagttgccagctgcttggaggacaggagggtccatcagagacggagaaagtgggaagcactgggggctgataggacctgctcatgacttgggtaccccaaatccaggatgccctgtaggtttggggtctgagcactgggtggatggtggtgctgtttatgggggtgtggaaggcttggtcggggaggagggagactggccggaggcttctgcagtgcattccttcactttccgtgggagaggggaggtctgggagaggaagcgcgcattccgtgctgaccatggtgatttggaggggctgtttacactgggccattgcacgtctgagtctggagcttggggcggtggttgttctggaggctccaatctgagattcatcagaatggggctggcacttaaaggaggtcacttgggagggggctgaggcagagagtgtggctgggtttcttggtttcaatgttgcatttcaatgttgagtcagataggaccccagtgcaaatgccaagttttgggttggagcaagggtcccggcacccaaggaagaaccaggctgtgtgcccacaactctttgggcactgtgatgccagacctcaagaaggtccctttgacttcattccttttggaaccaggaggatctgtccagctgccacctgaagctcagcttccatgatttgtgtggctacttcccggagcttgcttgggaatcttaactctcacccttaaagggataatgtgctatttctggggccagggctgcattaatttaggaacaaattaaccactcattcttccagacttcgaagtctgatttcgaagtgctgactcgtagtgggttatttctgcactaaatgagttttttttttttcctttaaaatttttgtttgaagggaaaggcgtgatcaatgatatcatgacatgtcccagctgatgctcattaaaagttgtggctttaggggctgcaaaagacagtttgaaatttaatgccttgtttcctggctcagctcagagtcggggctgggcaaggctccctggaggctataactctgaagacccagattgggtctggagttgcccaattcttttgaaatcttaatgacaaccagctggacttagcaggcttttctggtagcaagtgactgaaatggactagacacacagaagcaaaagggccatctgttaattcaggaaactgggcgtctgtagctccagctagcctctccttgtctgtcccagactcagggtgggtcatatagctggcccttgaaccacttactggagtgagggagtggggaggactggacggctgagacctagctgtctcctccggtccagaaatggagctggcatccccgccatagccagcctgagacttccagtaggaaatcaggaggatcgcagaaggacatgggtactgggggtcacaaacgccagcatggcagtgcaagaaccccacagctgtgcccacctgacctgcaaaacctgccgtgcattgcaaatcacactgcagccttcagttttctttcctgtgaccaatgggtgcttggaggcaaaaggcagagtcatgatgtcccggcagctcgagaaggccctgggagaggtgtgacctggctacacatcttcgtttctctcctttccccccagggtgctcagggcacacctgtgagagccaagcacctccccacagccagtggcccctcaggtctgcttctccttcacctgctccaagcctcacatttttctcaccacttagtccaaatccccacgcagctgtcaccccattactttaaggactgctgtctgctggtgaactttgctgatgactaagttgatcgctccgtttttgtttgaagggaaaggagtgatccccaatctttagaaatggcctaggctggacgtggtggctcacgcctgtaatccaaacactatgggaggctgaggccagcagatcacgaggtcaggagatcgagaccatcctggctaacacggtgaaatcccgtctctactaaaaatgcaaaaaattagctgggagtggtggcaggtgcctgtagtcccagctacttgggaggctgaggcaggagaaaggcgtgaacccggtaggcggagcttgcagtgagacgacattgctccactgcactccagcctgggtgacaaagcgagactccgtctcaaaaaaaaaaaaaaaagtcctagcctgtagttgggactccataaatattttatgggatgaatggataatgtggtctccagctcaggggataagtttttctggaaaaaaaattactcactcaaacacatacacgtatatatttaattacactagtatgtcatgaatacatcctccaagtgagcaattgaaaacattgcaaataaggctcaaatccctctggaacatgaatcctccccccgcccgccacctttcgcccttccccagggaagccactgttaccattcatggcatttcccaccaaactttcttgacataagcatgtgctttttaaagaaatggcatcacacagcacttctcgctgtgaagctgttttcactctgcagtgtatcttggagatttatctggcttcataggttctgtctaattgctttagaatattccatggctgttttcgcctttctgctaccgatggccatggaggtccctctcagatcctgtcacaggctgtgctgcaggggacaacctgcgtgaggcactgagcacgtctgtacaagtgtttctctataaggcacatccgaagaatggaactcctggggcttaggatgagtgcattttaaatttaagctgctattgccagactgtttcccaaagtggctgtgtcactcccaacagcagtgtcggaggtacccgtttctctcgccagcacttgatacattcacattctgaaattttgccaatcctccagagaagtgaaaattacattgttcaatttgcattgccttgattgcttgagagtttttcttatgtgacttggccatttggatttcactctctgagcgttgcctcttcatttactttttgccctctttttccaggggggtcgttcgtgtgtttccgagtggtttgtgagcgccgtcgatctgatctggaacccgatcctccgctggctgcaaatattcgtgtcctgtctgttgtgtgtcttttcactttgtttatggtgtccttggttgatagaagcttttagttctgatgtggtaaaatgtatccagctttttttttgtttttgctttttgtgtcttaagaaaccctcttctgcctcgagtttagagtgaacagtttttctcagtgtggcagggagggtcctggttttagctctgaaagtcctgcatcctgagaagtcctcagccgggggcataccaggatggctgctcaaaaacacatccctctgcgtctccttttgaggcttgtatagctttttctttgcatttatttttcttatctactataacgtgtgtgaaagaacagtatgaggtagaatgcagggttttaataaggattacaggagtcactgggtttaacccagggatctgttgattctggtggggattcctagccctgagggagcagagggaggaaaggtggtctgggggtggggacagatccagtcaatttactttacccctaactgtgaagtggaccatggcttccaaaccaaaactcagagcagattttgggcaaaaattggtctgatctggtagcctacatggttttattaatacgattgacaattggctgtacatttcccaagcagggaccagctgtgtggagaaatttggatgctccttctcgcagcctggctgctttcccagggccggccccaggagggaggctccccgcgtgcccgcctacgcaagcagcctcggactgactcccaacaaccccagggtgctggctttcccggaaccctcctctgattcgggatttctaccagacttcggtagcggtttattttaaggaaaacaacaacggtacacttcccttgcataggactcctagcctgggccggggctggctgggatgaggggatgggaggaccgggggtctggcccagggtttgcgttgtgggctttgcattgggcagggggagttgccctttggaagctggtgaccttgtggcctagatgacctggagcaatgtcgattttgcgtgattacagtattttcaggaaagctacttaggtgcaccagtcaccagggacggttcacgcgtggacatgtggaaggcctttcctggagggaattcagcagctcttgggcctcacactacgaagtgggccagaccggtgggctcgctatggaaggttcctgcaccaggcattttagtgacaaactgtgggtcaaaggaaacacaagtgagcgcgtgggcaagaaggtgtcgtactggtgcccgtgtgtgcaacggggcagccctgactcagtgcctcagtgcctcagtgccttgggtggtgcccttaaggacaagtgtgtgtgaacgtgcatgagagtgtgaggatgtacatgagtgcgtgtgcctgtgtgtgcctgattgtgtgtgtgtatgcatgtgtttgtgaggccgtgcaagagtgtgtacgtgcctgtgtgtgactgtgtgtgtgagggtgtgaagctgtgatgagtgcatgtgcctgtgtgtgcgtgattgtgtgtgtgcgtgtgagggttgaggctgtgcaggagtgtgcgtgcctgtgtgtgtatgcatgtgtgtgagggtgtgaagccgtgcaggagtgtgtgtgaaggtgtgcgtgagtgtgtatatgagcaagtgtgtgcatgaatattacatgcatgagtgtgtgcatgcacaagtgtgtgcatgagtgtgtacgtgcatgagtgtatgtgtgcatgtatatatggatgcgatctccctcaacctagtgtgccagcctcagcacagccctgctctgaccagaggcttaggaggtcctccagctcccagcccctaacactccatctaagccaggcctccaccttcactccccggccttcacccgtgctgctccttctgacggaaggctcctggcctcccgtggagtgtacccatctgtcaaggcccagcagcgagacctcgtctgtgaagcctctcaccccctattccggggggatcttttccccctgtaagctcttattgtccaaatctcttcttcatataaggacaccagtcagattggattgcccagcccccaccccctcagcagcctcattttaatgtaatcacccctttaaaaaacgccttctccaaatattgcattctgagacactggggatcaaaacttcaacatatacatattagggggagtacagttcagcccctgacagcttggctgggaacgtgagcggggcctcgggtcctttccactcgggcttttgcataggcagcttgaggtggagaagtgagcaacccgagagaaacagactcaagttctgtcaccgcttatgatctggctttggacatcacagtcccacttctgccttagaatcggccttccctgactcggggtcggcatgaacccacctctcagtgggagggtgcaaagccacgttgcaagaagaacatatgaggttggaggtgatgttgtggccatttttggggaaaatcccccaaaatgtgactgcactgggagggactctcagatgcttgtgcctggtttctggcagatttcgacccaggcacgtttttctttgctgggtgtgctttgcctgctgctgctataaatcacagttgtgagtacagctacagccgagtcctgtgagtcctctagtgaatcactcaaactgggggtggtcctggggacccccagcacagtaatcaccctgttcactctcttgttaatgatccatctgctccaccaaaggtaaacccagggcagcagtgactggcgcatttttgtgtgcagggcatgcactccgtgcctggcacctagcaggtgtgctgtaagctctgtgtccaatggagagcatgatggggaggcgatggtggggaggtggggttggtggcagggaggcctcctctcctcacccgcgtgcagaggcccttgcggctcacaggagttcctttaagtactgtcgctctgacattgagcttttcacctctccctaaaggaaagccatttagcaaaaagaatctcctaatttagcaacattatctctgtcaagttacaggaagtgggcatgtggcctctttgcgtgagtctctcagcggtggaagctggctcttcctcctgaaaacatgtcgtatttttagaccgtcttgaatgatttacacaccttttctacaagcagacctggagatgggaatgcgcaggcctgcccggacatcttctccaatacccaccctatgtgttcgtgctgtcacctgacaggtgcccttggtagcccttctccatccaagcctccctccaggtggcctgccctggcctgctctgtggtcattctgcctcctggaggccggcacagacttcctgcctcctgcacattgcacatttggacctaagttcattgccactcccccagagggcaaacactaaaaatagactcttcactggatgaggtttctaatataagctaaggactgtgtctctccacttacgagtgtccgaaacagctgtatgaactgcacattctccgtcttccatgactaaatccccttaacgaccctaattcactctaattccagtaacaaggacgctccagcactggaggcttggtgcatgttcgatttctatttttattttaatggctttgctatctgtgccttttcctataatccatgacaaatcatgataaattaactccatttttttttttactgtttggttaaacattgggatgataaaaaataaggcgatattcctcttatttgtagattactgtgatttctgacctagagtattgtggtcacgggtgaaagtgcagaatattgtacactgatcatttgcgtttgcttgggagtcactgcagtgggggattggagaggagccactctgcagtcactggacagtgatagtcacaccagccaggtcctgtcctcagtcctgctcactcatctacacatctctgtgggagatgagctccacttggtgggaccccatttgacaggtgaggaaaaccgaggctgaaagggacagagtaacgtgcccaaggtcacagctgctgagccgaatttgagcctggacagtctgctggattcttggtcgttctgtgatcctgtctctcatgaacctggatttatattatatcccattggttctggaaagtgtctgacagcaggtcaatgcttgttgttactgcctgctttggaagcccttaaaagatgccccaactctggctgtccttgtggggtgcctgtcttggaaatgagcaggctgctgactgaaaagagcctttccctgtaggtgggatgtggtgccccacaggtgggaccccgtgtgccctacaggtggacactgggatggttctctccacctgtcctcatctgtggcttcttccctttgttagagtcttgagttgatgttggatatgagcgcacctttcttccgaggatcgtctaagcagggtggaggagatgcaggttgcacagaggtgggagaaggacccttggggccaggaggcagatgtggggtgtccccagctctgccccgagtcccagtgtgaccttgtacatgttcacccttctctgagcctggctttcctcgtggatggagtgtaattctgaaacccagtgttcatggctggtcaggaggatcacaggagagatgtctattgctgccagaacaatttaccaccaactcagcagctaaagcatcaccgatttattgccacacacagcctgtgggtcaggggtgcaggtgggcttacctgcttccctctctgggtctcagcagcgctgtgctgtttgccagatgctctgggagagaattcacttcctgctcgttctggtggttgtcagaattcagttccttgaggctgtaggactgaggtccctattttcttgctggctgtcagctggagctggggctggagccggggctggggctggggctggggcctgggcccgggtcattttggttctcagctgtagaggccactgccttccctggctcacgtctaccttcaaggccagcaagggtggctgaatcctctcagccttcaaatctctcctccctcccttccaccctgtccactcctgccttcccctctgcttcctgagtgattccatgaggcccatcgggtcttccaggttcatctccatatcttcaggtctcctgattataaccctgatcccagctgcaaaggccttcacattggtgcctgcattggtgcttgatcaggtcaccgggggtcgggagtcctgagggaatgaatggctctcaaattctgctgtccttactgtgggtaagtggctgagggctgcttggaggaacctcacagtaaaacagacaacctctcacttaaacagcacataaactcatatgtgaggctctgatttgtagcagtaatagtgcacaggaagttttttcatttattacagatttagctgcagggtgcttttgataaaaagacccggttgaatatagttaaaacaaatctgggatccgcccccttgctgagcatttctgtcgcccctgtcccagtccaggctgccccatctctccctgtccgatgcagcagccccgtccccctggtccctggggccatctctgctgtcgtccactttatcctctatctggcggccccaacacccttccaggagaggtcaatctgctctcagctcttcctggctgaagaccctcctgggtttcctgtttctcccaggataaaatccacgcttctactcatgctggggcaagaggccctttgagtcctgaggcctgtccccatcctcagcctcccgccatcttcccggtactgccccacccctcacccctggctgcttctcagcccctccagctgccctgtgcttgctagtcttgccctaccacctcccacccccgctccctggcctccatgcctggcacaggccctgtgctcagtgaatactggttgaatgagtggacacgtgaattaacgaatgagagactcaaatgatcaaatataaagcagggcctgtgtctcagggacactcctccagcctggcaagtctgtggtcttcaggcccgttgccgaatgaagggtctacttcccatctttgctgtgagtcccaggtttccaggggagcaggaagtgctaatgttctaatgtctgcaccttcacttccagctgctgatggccccccaggcccatccccaggaacagggaggctccctttatgccacagtgtatagactcacaggtcccccaaagtagcaattgaaaagaaccagcagggtccgtgaccgcaaactgcagcctgaagtaccagggtaatctttgttacaccccaagttgcgggacggcagagccctctgccaaatagagaagtgaatgttattctcccgtgggctttggaagacccttgcactattattaatatctcagggcgaaggccggtgagggcgccagaatttaattgcctaaataattgctttccccaaatgcgaaatcccgatggacccaccagcttcagtgtgcgcatgggttttaatgaatggtgggcgccgagagatcacagcttctgtgcaaacacggacggccgttactatttataggtttgtacaggttgattcttgggatcatcattgctacggctgcagaacgtaagatctatttttaaagcactacctataagcctagtgctatggattttctgtaatttatagctcgggctacgagactgcttttgaatggttactctgtaaagtacttaatctacagttgctgcgacggggtgctggtggcatgaatctgtgctgtggtgagtccgtaagcccagctccacggactctgctgggaaaagaaacaactctcttaagtatataaatccagtaaacataggaaacgtccacattgaactggcagaaggagaacatgtttgggtgacaaggggcattatttaaacatgaaagatcttcctttaaaagtgaaagaaaagaagtaaacactaatagtgtgcacaacagtgccaattctagaagagggtatggatttgctcttttatttattattaacattctaacgatccaagtatttcatgatctccgcctcctggcaaaaatgaaagcattttgagtagggagctcagacagccgccgtcgtggagtctaggctcttccctccgcttctgtaggcagctgtttcaccacggagggcagagatgcccagaacatccgccctgtgcttccatagtcatatgtgtctgtgggaaatatatggtactggtgagtgtgtgcactcacgtgtgcatgtgtgtgcgtgcttgtgagtgtgtgctccatgagtgattatggcattgttatgttatgtactaacccaggaaataagagctccaatgatgttagactacaaagatcttttgcagtacaaggaagccgctgagtgctattccctagtgtggatataccgtagggcagccattctgctttgagggacatttaggttgtttccacttgatcggcctcatgcataccttcctgtgtttggggtttctctggagtagatgacaagaactggatgagctgggacaggacattttctatttgggcagatgcagccagtcatcctggttgccggtttcagtcccacccagcattcgtggtgcctgtttcaccacatcttcaccagcacttggtgttagactttcaactttgcctgtttgtttgtttattcttttcttcactggggtcaggggctaaagcctggtggttaagaaggaggcctgaggggacagatccacgccagccctcctgctccctggatctgtggcctcaaggagctctactggttcctgtcttagactttttgggctacaacaacaaaatatcttagatggataatttagaaacagcagaaatttattgctcactgttctgcagcctgcgaagtccaagatcaaggggccggcagatttgctgtctggtgagtgccggttcctcagagatggttccttgctgctacatcctcacaagcaaaaggtgtgcacaggggctccctggaccctcttttataaggcacttatcattgatgagggtggggccctcatgacctaatcaccatcatctctgagcgctgcgctgtcctgtgcaggacccatgtcccatatgtggctgttgaaatttattttaatgttaaatgaactaaaatgagatgaaattaaaaattcaggtcctctgcagcatgcaccacattttaagcactctcaacacttgtggcttccatgatgggcagtgccacgtacatcatcttcattctcgtagaatattctagcgcatggtgcagcgccagggatgaggcagcctccccagcaatttgcaccagccccagcctgcccttgacagggctctggccattctcgtccctcgcacggacacatctcatcctctccgaaggcacctgctcctccctccaggctgagccatcagagtccctcccacggggccccagtgcttcagttccccacttccagtggctcccgtcagcatccacttcacaggtctccacccgggcaaggctcctcactcatctcccagctctggccttggcctccacatcttcctgagtgacaccatgcggggaacttggtgggtattttagggtacagatgaggaaactgaggcctcaggaagacagctgaggtgtttttgggtgaggtggaccagggaccgctttgtggcaccagcaactccagctcctcatcatgggggccagggcaaattcctttctttaggggattctgccttctttttcccacagtgcagtgccactgggggagatctcatggctggtctcacccgttgagacccattgagatccattgagactccatttctgcaaagctctccagacccttcgcccatggccttgggaaaactgtgaatgttaaagggccaagagtgtcaccgcagaaaccatgtggctccccgcagcagggccaaggcgtctgttactttattttgtgttgtttttctataaagtgatagatatatatggtaaaaatataaagaatacagtaggatgtaaggcaaaaatcagcttctctcgcccctcaactctccaggcctctgggtcttctctggctgctcccagagaagtgccgtggctctaagaggtcaccagtgttgcctctgaatccttctggaaagtctacataaaacttttgtgcacggcttttgaaatacacatacacacacacagacacaacattcccattctgtgtatgctcccgcacaccttgatatttctattaacagtgtatcacagcagctgctgtctatcagcctacaaatgtcttccaagcagaacccatctcagggcctttgtgtgtgctgtttcccacgcctggcatgctctttccttagagagccctgtgcctatggctgcttcccttattccactccggcctttgcaccagtatttctaaaccatgacctttctttctaagaccagtgttaggttcacagcaaaactgagaggaaggtacaggaatattccatagacccccgtcccaacatacatagctccacacattatcaacatcccccaccagagcagtacatctgttacaactgatgcacctacatggacgcaggaagatcacccacagtccctggtttacattagggtgcattcttcgtgatgtacattcactcattctttagaccaattcattcatttttttaaagacaaaatgactaaattttcagaccgatttataatgacacctacccctcattatagtatcatacagatactgccctacaaatcctctgtgctctgcctagtcattcctctcttccttctctgcaacccctggcatccactcatctttttattgtctccataattttgcctttttcaagaacagcgtagagttggaatcacacagtgtgtggccttttcagattggtttctttcactgagcaatatgcatttacatttcctccatataatttcttggctttatagttcatttttttttgtactgaataatattccaatgtctggatctaccatagtttgtttgtctactcacctgctgaaggacatcttggttgcttccaaattttgacaattatgaataaagttgctataagaatccatgtacaggtttttgtgtagacatgagttttcgacttctttgtgtaaataccaaggaaggcaatgtctggatcgtgtggtaagagaatttttagttttgtaagaaaccacaaagctgtcttccaaagtagctgcaccattttgcattctcagcagcagtgaatgtgaatgagagttcctgttgctccacattctcgtcagcatttggtattgtcagtgttctggactttggccattctgatgggtgtgcagtggtctctcattgtggtttcagtttgcatttctctaatggcataatgtttggagcatcttctcatgtactacttagcatctgtaggttattttgatgggtgatctattcaggcttttggcccattttcaaatcaaattgttcattctcttgttgttgagtttcaagagttctctgtatattttggataacagtccttttttaggtgtcttttacaaatattttctcccagtcttcagcttctcttttcaatctcttgacagtgtctgtacaaagtagacttttttttttaatgaagtccagtatatcaattatttctttcaaggatgatgccataatattgcatctaaaatgtcctcacaaaacctaaggttttctagacttttctcctgtgttatcttctaggagttttacagttttatattttacatttagttctatgatatattttgaattaatttttgtgaagggtgtaaggcttatgtctagattcagttgcttttttgcatgtggatatccacttgtttgagaacatttgttgaaaagactttcttttctccattatattgtcttggatcctttgtcaaaaatcagttgactatatttatgtggatcaattcctgagctccctattcaattccactgatttatttggctgtttttctgccagtatcacactgtcttgattaatgtagctttatagtaagtcttaaagtcgggaatgccagtcttccaactttgttcttctccttcaacagcgtgttggggatgctaggccttttgcctctccatataaaccttagattcagtttgtgaatagtcacaactgattttgactgagattgcattgaatttacgggtcaaatagagaagaactgacatcttgacaatatccatgaacatggattctctctccatttatttggttctttgatttctttcatcagagttttgtcattttcctcaaatcttatacatattttgttaggtgtatacctaggtattttatttttgggggtgacttgctcattgctggtttatagaaagagattaacttctgtgtgttatccttgtatcttgcaaccttgctataataatttattagtttcaggaggctttttggtcgagtttttttttttttattttctacatagattttcatgtcatttgtgaacaaagacagttttatttcttccttcctaatctaggtactttttatttttccttttcctgtcttatggcattagttgaacttgaacaatgttgaacagacacacaatgttgaaaacctgtctgagttttgtcagattgtgtctttcaaggagtcggttcatttcatctaggtcatcaaatttgtggacatagaattgttcagagtattctgtcattatccttttaatgttcatgggatctgcaatgtgtgttccctctttcacttctgctattagtaacttgtgtcctctcacttattttcttagttaagctggctacagacttaacaattttattgatgtttttcaaagtaccagcttttggtttcattgattttctttattgattttctattttgaatttcattgagttatgctctaattttttattaattttgtatctgcttgctttggatttaatttgctcttctttttctagtttactaaggtagaaccttagataactgattttagatctttcttcttttctaggatataccttcagtgttataaatttcactctaaacattgttctcacagcacccacgaattttgataagttgtgttttatttttgtttagtccaaaatattttaaaatttcactcgagatttcttctttgacctatgtggcacatgaggtgtgttattcaatctccacattttgagattttccagttatctttttgttactaatttctagtttaatttcactgtggcctgagagcagatattgtataatttcttttaaatttgttaatgtgccgggcgtggtggctcacacctgtaataccagcactttgggaggccgagacgggtggatcacgaggtcaggagttcgagaccagcctgtccaatatggtgaaaccccatctctactaaaaaatacaaaacttagcccggcatggtggtgcacgcctgtagtcccggcgaatcgggcggttgaggcaggagaatggcttgaacctgggaggcagaggttgcagtgagccgagattgcgccactgcactccagcctctcaaaataaaaacaaaaatagtaaataaataaataatttgttaatgtgaattttgtgtcccagaatgtggtctatcctggtgaatatttcatgtgagcttgagaagaatgggtattctactgttgttggaggaagtggtttatagatgtctgttacatccagttgattgatggtgctgttgagttcaactctgtcgttactgattttctgcttgatgggtctgttcgtttctgatagacgggtattgcggtcaccaactttaatcatgcattcatccatttttttctttgaagttctgtcaatttttacctcatgtattttgacgtctgtcattaggtgtgtacgcgttaaggattattatgtctttttggagaattgactcctttatcgttatgtaatgccctttgttgtccctggtagcttctcttgctctgaagtctgctctgcctttcttctttacttttatttttttactcttaattgtaagatacctgttgaaaagtgcacataccataaacgttcatcttgatgaattttcaccaagtgaacacacctctgtaggcagaacgcagttcaagaagcagaatataacctggatcccaaagccgcctcgtgtcctctcttaacaaaacccctcctccatgggtagctattctctgcagtctaacatcatcaagtagtgttgtctggtttttatttttctttgttttcttttttcggacagagctcactctgttgcccaggctggagtgcagtggcatgatcttggatcactgcaacctccacctcctagattcaagcgattctcctggctcagtctcccaagtaaattactacaggcacacagcatcatgcctggctaatttttgtgtgtgtatatttttagtagagacaggctttcaccatgttgaccaggctggtcttgaacttcggacctcaagagatctgtccaccttggcctcccagagtgctgggtttataggcatgagccaccatgcctggccctggtactgaaccttctgtaaatggaataagatagaacacagtcttctttaacagaatattgtgatacctacccaggtttttgtctggttaatttcactgttgtatggtatttcattttgtgaatgtagctcaatttaatgcctgctcaaattcttaggttaaaaatttcaaaaacattttattgtctgataactatctttgatttggatgagttattctgcgtgtaacacctctggacattggcatgcatagcttgtgtgtctgctcagcaaattcctctgtgtccttccaagctctgctcagcagggcggtggtgtatttttgcatctgttttgtgtactgctggattgccagtgcctggtgcatagcaggtactcaacaaatataggtcacgtgcaggcaccagtgaaaggccatttcctggagcttccctgagcttcccagcctggccagtggcttcatacactactacctctccatgctgtgatggtgttggacacggcttaccccctcaccatgcagactgggccaagccatcccgtgcctgacagcacacaggacagggcctggcatggagtcagtgtttggtgcatgtttgttgagcaaatgtctgctttgtaagccggggttgctggtagagattttggtgggttggggaggccagagggatgagctggagctggtattatggaaagaatgtaggagcccttttctgtcctgttggtaacccttgttagataccctgtctgagcctcaacttcattgtttgtaagaaagaggatgattattccaacctcacaagattataaatcaatgcatgtgaggtccttggtaagctctaggctctataaaagtgctgtcagcattaatcttgttacctcctcctcttcctttcatacttcctcctcctttatcatcatcatcaagtcagtgacttttcgggggacccaacaaaagcatgaggttcctgcctgtgtgagttggggtatatatgatgcaataacagcctgagctctggagctgaggacatgggatccagtcctggctttgcaggtttgtgacctggggcaagtacttaagaactttgcctctcattttcctcattggctaaatgggaaaatcacagttctacctgatttgggtagtttcagccttagccatggcaatcattgtaaagtttttagaacaatggctggcacatggtaagagctaagtgttaagtaaatgaaaaccctactatcagaggcctatgccagcaggatgtttggtccctttataagagatcaggagggagacaggtgcaaggtctttctctgctgttagcgtttcatcctcctgtgtgttgctgcagggtcacaggctggctgctgctgttccaggccccacaggcactccagagcaggaagcaggaatgcagtcaggactgcaaactgcacctgcaatggtgacaaatgctttttctgtaagtggctctctctgtctatcagcaatctttcccagaggccccagaagcctgttcctctcctttcattagctagagtcggagcatgcagtatctgtcactgtgtggggggacccaggatggaggaaaagtcacctggaggtctatagctttgtgctgacaacatacaagatgggtcagtggcccatgacacaagagtgcaggggccagtggggctgctttctgccttccctgtcgaaagcctccctgccccgggttgtgtttctctgctctgggttctgtcttctatctctgctgcctcatagataggcccctctcccagtcacctggatgtgctgggggcacggaaggagaatatcaaagggcaggtggtctctctcaaggaactttttgttctgctaatggtgaaagcgtattgagggcttctgtgtgctgtgtcaaatgcccacaccctgtaaggtaggttatcttcttctcacttacacacggaggctcagcggggccacacagtcagaaaatgttgggacctgatcttgtgcctgggtctgtggctcctgccctagacagcttgagtggacttgaccccaaggagggctaggcatatctccaggaagccatgggatgcccacaccacattttttcagggcgactctagctaccagtgcctttcagggcagaggccatgaatggtgaaatcagggatttggttctggaagagctgggtgtgttgtttttaaaaagccttggttggcattgcattgagcaccactctgggtagtctctggtcacagctctaggtagagagtccctcagggatgtggtcaaaggtgcaggaagtgaagttcaaggctacgtcgtcaagccaggtccaaggaccattcccacccgccactacttcaggtgttgtttttccaggtgaccagcagagggcgcggctgcccacctgacgaacctggcctgtgtcagagtggtggttttgccttcatctttccttgggtcctggaactcccacactggtgttttgccttcttgtttctctttagatggttccctatgagtttagcctgagatcgtggcttgagcagttcttcttaagcatttgaagtttgctgaatgagttatttttacattaagcatgaagaagagttccctggagccccagagaagaaactagattgtcctgggggactgaggcagcagagggagcatgagcccctcagtcccacaaagcccggagccagcttggccgtggggaggctgagccttcactcctggagcagggcagttgcctggctaggctccgccgtgcacattcattcatttattcatcaatggatatgtatgtactgggagactacgacctcccaggcacattcttgggtgaacaaacacaacaaaaatccccgtgcctgtgaagccgacattgccaccatccaggtccttggcccatcagctccccagggaacttcaaggctcccagggccttaggagagcagttggtagcataagaagacggcggaattgagctaaccgtctaagtgcccgcaagaagtagcctcaggccagtggttggtttcagtttacaaccccattgtgatgggcagcagactcttccacatcaccccaaaggctgcttgtcaaacggggctcctcctctttgctgcctcctccctccctgatctgatcctccccacccaggagatagcatcacacccaccctgttgtcagtatcagatttgctggtaacctcaattctacccccctcataaatagttaactagaaaacaaaacaaaacaaaacaaaacaaaccctggaggtatccttgacttctctctctagtcccccgtagctcatccatcacaaacctgtgggagccaccttcagagaacaccgagtccagcctgctgggtgcctctgcctattcctgctgggccaggctgctgctaccactcaccaggatgatttccagcctcctggtccatcctgctgcttcctcccttgccccacatgtcccttctctgacagcagccagaaggatgctctggagacccaccactgcctcagtggctttccaccatccttggaacaaaatcaggctcttcctgaggtccatgagatgttgcatggtctgggtcatcccctctttgtggctgcagatccttgctctggcctctttgcagggacttcagggctccatgctgctcccacctcatggtcttcgctcaggctgttccctctgcccggggcgcccttcctcccttgcatgtccagttggcttccatttgcccttgcacttccagagcatcacttcttcaaaccaggctccctctctgctccagatgaggcatgctgcactctgtactcattgaaattaattgatcctttgattcatattagtcaatcttgtcttctgtgctagacctcaagctccacaaagccaatgtgcaatcatgtctcattcatggtggtattcctggcaaagtgactgtttgggcacagaatagattcttaggaaatattggatggttggatgcatccattggtctgtacctgctttaagaatgagaccaacttgggaggtgtgtgggggtggaattggtcttggggtaccattcctcaccactccctaatgagcaggggtgcctcatacatgcgctgtgtgttggaggggttctgccatccctgagccacctttgcagtgatgtgctccctggctgcccctgggcagaggaaactgcctttgcctttgcggttttgtgagttttgaaagggacttgggcaatttggactgactctgtcccatctttgtggttcttcagggagcagtgttgggttatcggggctgccctgagtcaggaaatggctttgggttttcggatcaaggagatcaaggggcagaaggggggtccttcgatgagcttctatctgatctagaatctgggtggagacagggagggtttcagtgttgattatgcccaccagggcaagaggcagaacccaatcctccaaattcaaagctcagcctagtgcctctacatgctttttttttttttttaaagctttattgaaagaatttacatatcattaagttcacgcatttaaagtataaaattcagtggtttttagtatatttacagagttatgaaaccatcaccataatctaattttagaacattaagaacatttctagaactcaaaaaagaaacggtacccattagcagtcagcccctctcttctcccactccccatcctcggcgtccacagatctgctttctgattggatggacattgcatataactgggttcatgtggcacgtggccttctgccactggcttcttttacttgcataatgttttccaggttcatctgcatgtgattgtggcacatgtcagtacgtccctccttttcatggctgcatattatcctacagttaggatggaccacattttatttacccatttatcagtccatggacatttaggttgttcgtaattttttggccattatgaagctttgttcattccaatagggtttctgcaatggccttccaaatccaccccttgccagggatcttgttcaggagggacaattggtgactttcacaaaaacctgttgtgggccctcaaggctggaaaccctcctccaaacaggtgcctttcacacaccttggggaccagatcctcacagggctcaagccagtcatggtctggagatgaccgactttgaagtccaaagtctctccggcaggcaatttacccggagaccttattatcttctattggtcagtagaggtgggattgctaactttttttaaatttaaaactatttttagtatggaacatctcaaagccaaagaataatataaggaaaagctccagctctacctacctttaacaaaccacagtgctttgctaaaatatatacttctaagaaataaaacttggttgcatctcatcttctgcttccccactccatgtgggctcctgagctcaaatgccaagtcttatccttttatatgtttttaaccctcatccatacacagtttggtggagtaggtgaatgggtgctgctgtgtagaccatctgaagggactagggataatttttggtggtgcacggacaaggcaggaacattggcttagatagaaagttccttccattctttgtccttatggtaacattaaggaggatgtctctattcggtgcctgcctggctgaactcctctctcacccttgggccctttttaaccacacaggagacagctcaggccaagagtggactcaggtattgagttagtgccgtggtcccccccaccaatgccagccagcgaggctgtgctccatcagtcctattgaaggcttcctttaacatgcatgtcggcccggtgtggaggtgcacactgtactcccaagtactaggaaggctgaggtgggatgattgtttgagcccaggagtttgaggctgtagtgcactatgattgcccccgtgaatagccactgcactccagcctggaaaacagagcaaaactctttcaaaaaaaaaaaaaaaagagagagagagagaaaagaaaaaatatgtttaagtgcaaagagttgatttaaagacaaatcttaagggatggaaggataggttttaaatagggaaggctaaaaatcatagggatggttggcaaatgacagacagctggagacctctggtgtgatctttctcctcccccccacctatagccagtctctgggctctatcccttcctgcccatccccaccatttctgcacctgccgtggctgggtcagctgcaggcttccttccaatggaactgaactgtctcaggtgttcactcacccagactcggaaggggcccaaggcatggttgggggcaaggattcagaaaccttcccatggggccagtactcagtgtgtcaggacagcccctggggacttggagtgggaggtgttgaagacccacttggagagaccctgggccaagagcattggctgtggcccagctcttccacgtgctggcttgtaacctgggcaagagtgctcacctcttgaagttgccttcatctcaaaagtggagaccacagtagctctcacctaccagggcagttgtaggaaggaatgaggtccccatgcaaaatgctcagtccaaggctggcaggccacttcaccatccagccagcacatttttatgtggataaaacgtatctattcctagcagtttcccaccagtttcctctttgtttcctgatcttaattgccaactgtaattaaatgattatttgggcatcttattagtgtgttggtgaccattctcggcttcaccctccccctttcccggaagactcaaggagttggggcgtctctgtgtttgtgcactgctaggtccctaatgcctggtgtggtgcctggcacacactcgactctgcacacagtctgaatgaatgaatgagtcctttctttagaggtgactgatgctgctgaaataactgctgctaagagcccaaagctctgtgtggagtgaacatccactttattccccctccccaccaccaccccgctcagttctgtccttggcgcttaaccgggatttcgtccacactgccagcgctcacactgcactcccaggccctgctgtaggtgctaatctgatgggggcagccttagggagggctctgtccccagcaggaggacccttggtgagcgactctccccgcttgcccccaccccttccagcacctgcaaagggggcttagagcggggctgccccatggggttgagaaattgaaatgggggtgtcctcccccaggtgtctctgtggtccttgaatcctggtgtctgttgaaatgcctcctcctctgggcaccttccaggaccaggccaggtgacaccaccattccacccccgtctctacccctttcctggactttcttccttccctgccctggctggggaagcagcggctgcctgcctgtgttcaccccacaccaccgctggggttgtgagaatcgctccttagcaccctggaggacacctctgtgagtggcagccctggggggtgtcgcctcccttgcctggcccctcaggttcctaagggcgtctgaggaaaagcctcattggaaagcgcccgtgccctcctccctctcccccgcccccccgccccccggcagggaggagggttcggagcgagggttcggagggtccggggtgccctagcaggcccaggccaggtggttgcggggaggaagcctcaggtcgctcccctccggtgccggggtgggcgcgtcgggacccactggcctcccagtcccaggagaggaaggaccagggaaaccagctgtctgcagctgctggggaaattaggggctctcagggttccctttcctccgggaggggaggaaacgggactaggaagctttcctgtttctagagcacggcttggtggggtgggcggctcctaacccggggtccagcccctcctcccccaccccggcgcgcggtccaggtatgtgcgacccctcccagtggccacgcgccttctcacgcccctctcccgtgacgtcatgctcctctcgcgcggcatgatgggagaatcctaatgttttccaacagatgctccaagaacagctttcagattaaagcaattgcaagagcaaagattcttccttttcccttttttcctgggggggtggggggtggggtggggggagggagcgcccccagacattccaggacatcaccccctgccccaagcacgcaataaacactgacaagaaaaagtttttatttcctggttcaacttttttttttttccctggaatatagactgaagaatgggaataaacacgaataaataacaaagcgaggccgcgcacgccgggatgcgcctggctgcagccggcgaggctattgtctccccgccctgaagccagccccggcgtctttctccagctcgtttcctttcccggccttttttttttttttttttttttaattttcttttttaaaaagacgccccctccagccccctcgccggtgaccttggccgcctcggatgctctgattccacgcggctcgctctaacttgcccccgcgccggccgggcccatggccgcgtcggaggacgggagcggctgcctcgtgtcgcggggccgctcgcagagtgaccccagcgtcctcaccgactcctcggccacctcctccgcggacgccggggagaacccaggtaacgggctgggcgggggcggcgggcgggtcggggaggcccgaggcaggtggcgctgagagcaggaccccgcgaggctccgcgccccgcctgcattcggggagccgcggcaggaacccgcgctcggccccgcggttcctatccccagtctcgcagggctggggcgcctcggagccctttgtccataaaagagctgatttcctgggtagagccgggcgctgcagcttcccctcctctccggctggtgagctctgccgtcccctcgaaggaggcttcctttcctcgggtgctgaccggctgggggaagagaggcagacccgtggccgcctccgcccagcgccggttctgggccattccctccctccccactgccgggccccagctccggacgtccccgcttgggcatctgctcctggaaggcagcgctccgcagctgaggccaccgcgctgagggcttccaccaggcgcctgactccagcggggcctggcgcacctgggcgcgctagcccccggacaggtgtgctgggcagagccgccggcagggagacgaagggcgtgcgccaggacagagcccggtttcgtgacagcgtgtggactccgtccactcttccacccccatggcagcgttgattgtttaggtgataaaccggtcacaaaggcgtctatagggcttgattgattactttccagagaggaagaaaggcctaataaagcggggggggaggtgggggggggggtgggctgtgtgcgcctgtcaccatggagacgcaggaagcaaagtgatcattaaaacctctctccaccagaaggcaattttcacttcacagggagaagtctgggcttctgaaatgtagggttcaaaaaaagaatcaaagctggtgttttggtatcaagccacaggactcagttttgtatcttagagaagcacaattccttcgtagattctgttttgataacaagttgcttcgcctgcctttgaagacttattctctctaaatgcaacgaccccagatggggacttgatgatgttaaatggtgggcatcagaatccctggggcccgggtgaaggctggctttgtggggagggattcctgcactggaacacaccagagcttcccgataaactgcctagaggactcattacaggcagctgtgtgggcactggatccctcccccccccatttgaaaatttaaacaataaacccgggcaagtattggaagatttctttgttaagactattgacactgtgtcacttggtcaaactaaggtaccggcctgaataaatctctgacttttctttatctgggagggcaggttaatttccttagagtttcaagcagaggctgccatggccgacccttaaggttttaattaatccttttactaggaatgggggattcagccttcagcactccatgatggattgcctttctctgggttggagaggcgcatccacaactgttccaatcatggaagttgagtggcttctcatgagaatccttctaagctccctttgtctccctggcagtaagaggaagcaaacttgaaatggaaattatggaggacttggctttttggctgtatgtgagtttatgcctctgtgggtgggagcggagggttgggcaggtggtgccggtccatgagagaaggaggaggaagggctgggatgcctgtgattaagttatgcgtgggagggcacaggcttgagctctcctctggtgcaactggtctaaatgggacccagagaacaggtgtcagaggtgaaaagtctaaaatatgtgcaattctgtgagcagtagaaccttactaaaaagcaccaagcaattaagtatttatggattgtgtgaagcagattgtgtttctgttctggcagaaagagaatcagaatcatcaagttggagggaacttgggaacttgatggaggaagggcgggctcagggagtattttctgtaagcaccttgcctggctggcctggtgtgtgcctgcatacttcttttgatggtggactcagttcttcctgatgtagtgcatacttgtctttgggcagatctgtttaagaattctttttccaatggttccaaagggtctggtacccatcagtcctgatgggatcttctcctgctgggtgttactcagggctttcagagagcctggggttttaggtattgaaacaacctcagtcacttcttggaaagtctaggcccttcacctgctcttcctagatagcctcccttatttgtccacctgctgctctaatgtgagactcctgaaaattgaacctgaagctccagctgtggaataacctcacacagagttaagaagcagagctgtctcctcccatctaaattctataatttaatgaaagagtccaaggttgcgttcaccctttcccctgcaaaggcatttttaatgcatcagtatttgcaaagactcaaagcattcttcaaaaggtgagctatgttttgacacctctttctcccattttccagaggttacccctgctgggaattgaggggcatcctttggacttttcctaatgttttatatacttgtgttgcttggaaaatggcatatgggaatgtgctggactcatggctcttccatgagtggttctgctccacactgggtctcggagatcttgcctcattgcaatatccatctccctttcccttttaacacccacacaggatgccaagaaacaatttttcagtttagccattggatatttgtattgtttccagtttttacccactacagacaacacagctgtaattacctgggcacaaactgccttgtactcacctgagaatttcctctagggtgggtgtgtgccagctcttgggatgttgaggccacaggggacccacatattttattttaatgatattgcactctcctagaaaatgtacgaattcacactttccgtaatctatgagagtgccctttctccaaacccttgccaacacctgagatcatcaatctatttttctctagcatgaagggtgacaaatggtttcttgttgtgttaatttgcagttccctgattgctagtgagcatgagtgtctttttgtggccttattagttcattaaatctcccatggccgggtctgtggccatggactgtgtggcggggatgaaatatttcccctaggcctgaccttcccgccactttcaccactgcttcgttaatgggcccgtctgtatctacacaatgtgcctctctataaatccgcactctacacccgtgagcatggttaggtgttcttccaaaatagaaatttaatcaaaggtaaggaagcatcccctgatctttcctccttcagaggagctcatggtcacaaggggttttgcttccttttcttccatctgctctcaggctctgggactaggcttctgcccgctccacatcctggggccagcccctggcatcggccccagcacgatggtggcctccttcttgtcgggtcccaggctgcctcctgggccttcctcaacatgatcccatcactgctcctcaccagccatcccctgtcccttggctgtcgctgccttgctctgtcctggctccatgcctctccagctcctttctccaactctctggctctgagctccagacctctgtgttctgcccggtccttccagtccttcagacctgttccccaccccagggaactctgatctcatttctgatttgctcctggcactcttcaacacctggggttcttgtcagtttcattctctgtggactgtcccttctagactgggagcctcttgaggacagggggcttgaccatcacctgaagtgctgcacccctgagctcagcacagagctcagatgcaggagactttcagtaagcatttgtaggacgaatgggcacaagccccaggcgctggtgtctcaacctatgtggcggtgcctggccaggcaactggccactcctgccagctggatggggccagagagtgcttggagggagagcaaagaggagccagcagctgcatccttctgcagggccgggtccaggtctgctttactgcctggagagggagaccctctcagagcatcctctcctgtcatgagctacagacggatgcacagacacattccccaggccctgggctcagggcatcccatgctggccccttcctcttttatgccactctgccagcagacaggtgtgggcttgtgctgatggccacttccttcatcacctgtgcaccctcatcacccacacaccgtcaacaccaggctctgttcttgacacctccctctcccaaggtcacaggtctgccagacacgggcctcctggagcccaccccacttgtttcaggtctcccacccccacccccaccctcacccccaccagggtttagctcctaccttccctttcctggacaacctcaacactgagtcttggttctcttcctcttaccggttttcctgcagaacaggaagtttccaaaatgcaaatgtggtctagtctctcctttgcctcaaaccctctaatgctgcccccttcctgggcgtgggagagggcggaggcaagagcctcttttgtctgtaccatggctctttctagcttccttcctcgaatgttctcttattctggagtcctgggttctgaggatctccctctggctccttgtagagtgtctacatggcttaattagtagtagaactatgcagtaattaccttgtcagcttcttcagggttattaaaaacataaaagctagatgcttaaaaaatactgagtttaagaactcagagcttttttttgattatgaaagcattgcctgttcattatagaaaatggatgctttaaaattccttttcctagctgggcatggtggtcacacctgtaatcccagcagtttgagaggcctaggtgggcagattgcttgagcccaggagtttgagaccagcctaggcaacacagtgaaaccctgtctctataaaaaatacaaaaagttagctggttgtgatggtgtgctcctgtcgtcccagctacttggggggctgagccgggaggatcgcttgagctggggaagcagaggttgcatggagctgacatcatgcctctgcactccaacctgcgtgacagaggtagaccctgtctccaaagaaacaaaattcctgttctctgcccccttctcaccctaacaccacacagaagccaatgacaatggacccctttgtctttaggatctgccaggtacctggcgaagctgtcagcattggaacaacagacatgaggaagtcaggcccaggggcaccgtccagcctcacctgccttcctcatggtcacaggaacctgttttcagtacctcacttggtactcctggagatgatctcatttgtttattagacaaacttgtttatggtctgtccaatacagtagccactaactacatgtggcaatttgaatctgaataaaataaaataaattaagattctgtttcctcagttgtagccacatttcaagtgtgcgggagccccatgcagctgtggctgccatactggatagtgcagatctagaacattccttccttgcagacagctttgttggacggtgctgcttggattgtaagctccctgagggcagggccttgcctgtggtccttttggctgtgtcaccagtgctagcactgtgctaacacttggtagttccccaatgaatgctgacagaatggatgtgccagagtgactggtgtggtcttgagctctcctgcgggaagggaccctcagcctccctagtctcatcatctcatcctctgaaagggagggtacccagcagagataatttcctatccacacagaactcatttatttcaatttagtgagctttcccagagcacctgcaatgcagcacacttggcccttgccagaagggcctctttggacaagagaacaatgagatgcaaagagattctttccctggggctaaataaatgtgtccaagtcctggctcagccatggataagctgtgtgactttgggcaagtcactttacctctctgaatctcagtttcctttaatgtaaaatggtaggcattattgtccttaagttcagaatgagtgaggataactgagctgttgtctttaacaatgagtaaattttgagacacagctttaggaggcagacacctccccaaacattctccaatccccttgaggtaattccatcttctgttaacaaagtcatggtggcagtgaccacagtgatgtatacagcagggagcgggaggaggcgcagcctgcaggtggaccccagcccttctgtgtgcctggctgagctggtcagcctctctgagttctgtgaaatgtgagttagagcaggactgatctggctaggggccaggcaggagtcatgggaccgtgtccctcagtgacgcagaacagcttcaggcaccagggccattctcagcaaatggtggaggaaggaggaggaggaggaggatgtggttcctgctctgattctggattttgggcccctggctctaaaaggctcctcccctacactttcccactctcaccttttgtggaggctgtgtctcccctacccctgcctccctctccggccccaggtccacccagcctcggatgttgttccccggctcccttcctggctccccagcttgtgaatggaaatctcctagggtcccccaccttcacaagttattccctctggtctggtaattttgggatagcacactggttgtcttgaaatgcgatttgaatgtgtattttgcggggattgttttactctgatgagtttgtttcctttgcaagtatatcttcagggaaggtgctttttaggggagggtggctgtctggaatgacacaggtgagccttgttaatgctagtcctgtcgcatggccaaagcgtgccggaggggacggtgcaggtagtgggtgtgtcctgggccctccccagagctttagccagggcagcatatatgggaggatatgaaatgtcacaggaacagaggcaaaaagaaaaagtttgaaaaaaactagtatattagtttgagaccttttcttattgaatttgagagctgggttctattccatgcactagaaaactctttaacacagggcaccaaactgcagcgtctgcagggccgggacttccgctgtgggagggtcagggtgtgtgcctgctggggcggagctgcttcttgccctgtggaaatgtgggcccaggttggtgagaccatcttcatcttttttttttttttttccaggacagtgtctcactctgtcgcccaggctggagtgcagtgacgccatctcggctcactgtgacctctgcctgcctggttcaagcaattcttgcctgctgggttcaagcaattctcctgcctcagcctcccgagtggctgggactacaggtgcgcgccaccatgcccaactaattttttctgcatttagtagagatggggattcactatgctgaccaggctggtcttgaactcttgaccttgtgatccgcccactttggcctcccaaagtgctgggattacaggcgtaagccaccgcgcctggctgaccatcctgttttaagagtgacactgggaatccagatttttatatgacatgttgtgttaggattttgtgttgctataaagaaatacctgagactgggtaatttataaagaaaagaggtttaattggctcatgcttctgagggctgtgcgggaagcgtggtgccagcatctgctcctggtcaggcctcaggaggcttccaattatggcagaaggcaaagggggagccagcacatcacacagtgagagtggaagcaagagagggatgaggaagggaggtgccaggcttttttaaacaaccagatcttttatgaactatcagaacgagaactccctcagcaccaagccattcatgaggaatccgcccccatgattcaaacacctcccacccagccccacctccaacattagggattccatttcaacatgagatttggaggggacaaatattcaaaccctatcggatatgatttttaaatattgacaagtttatctattagggattgggttgactttatgtaatagaaaacctaaataacactggcttaaagaagataaaggttttccttccaccagaagtccagacagcatgatggcgtccctgtcgtagggtgggacgttcagtgaatttcatactgaattctggttgcaacatggttgcttcacctccagcaacaagtacattttctaggcaggacaaagagggtagggagaggcacaggggtgtccacctgccgagtttgacattgccttcttgggagcactgcccagtgacacccacttatacctccttggtcttaggacatcaaaaggctactcccagctgccagggagcctgggaagtgtagctttttctttttgtttgtttgtttgtttgcttaagataggtgtattgctactctaacaagagcaggttccgcggaaggggagggtgagaatgactatcaggtagtgaactacagtctctgccatatcaactttataaaagcacaatgtgatcaaaacaaaacatgtctgggagctgcatgtggcctgtagttgccctttcaaacctcagatagaaagaatctcatgggaagactgaagcagtttttatgttttgtgccattactaagaaattaaaggttggactaagatatgtgatccaagcctaaacattatgtccattcaaattttatttaacaatatccagggaacaagataggcagggtcactgttcctcacagagccaatcatctggtcagcgatcaacggctggagtgaaaatgtgcttattgtcaactcttgttataaaaggagccatcatacttccttttattgaatagtcctctaaacccttgaggtagggccagaaagctagcgaggctgagtaaccggcccatggtcacatttatataaaggggaagcttaaagaggatcttgaatccaagtgagtctgaggcctggcccatccctatctgcaccacccagcttctgcctccctcatcctgcaacttactggaaagcggtcctctgtcctttacatggaatagatatgtgtgtttcacccccattcctggctccagccatctagctgacagacgtatacatacctgtagtcacaaaagcacacagaggcagatgtactctttcatttcccagttcatttaaccagaatggccactgggacaagatttatgtattgaaagtcaggcaaggcgatggcagagaatcagctgtctgtagagttgttgaaggtcccgtctttaatgggctgggactcgtgttcctgtttgttaaagcaagtcggttggatgggtagcttggcaacgcaccttatctaatggtcacgacatctgtagactttgacgttgattagttggcagccacgaaatggatcagccctgcactgagaagacgggagctgtggctatacgacctaagaagtgtgtttattatacatactatgctcctgtttgtaatacaacccttttaaaaagtcaccattggtcttgcaatactcttcctaatgagttgtattgttatggcattactttttggttcaattatctcttgaaagtttgtatccatatatagaaaaaattgttgccttattgtaatcactagctctggagtttcaatgaagtcaggaagatatgccaaaaatgatctttctgcttccctttggcaggaaggcattgtcttaggcagcgttactcctggggtgactctgcgtttcttgagtcacgtgagtcaaatggttgctgactttggcacgtttattggccgggttttttgtgcaaagcttctgagatctgatgacctccacggtgtcaggactgtcttgtcacctgtttttcggggatctgcctggcccctaccccacattctttattttcctgttattctctatatacaaccagagatacaggttttccatcaagagggggcctatagaagtgttctttccaatcaagcttatttacataaaaaagaacatgacttgaaaatagtaataatgtagtggtggtaatacacagaaatatgcgaagaaaccatgaaggtagtgcttggaagacacaggcatgccaaaaaccacaaagctggtgtacaggtttcagtgaaatggggaaatgctgttataaattttcatcttggtcttgtggcccggccatgattacttacctatttgctgacgcattaagcactacagtgtgcatggagcatggtgtgagggtatgcaaaggggcatcgtgcatccgggaagctcatggtctggctaggggcataacattttgacaagtaaaatgacagggcacatatgtaataagtgccaggcctctcaaacttgtccccttctgtgctgtatcccattcattctctgccaggtatcacaggcttctgcaaaagcattctccagacctccgtggccctacagcattgagctttcagtccttgggtttctgaaggttggcagggtcgaaggtccaggctggctcttctccgtgcatctcttatccttcttggacctgcagtctaaaccagccatgttagtcttgtgtagtggtgaagatacatgggacctcttagggcctaggctggaaaccttcacttatgctgattctgttagcctattggccaacttcaggtcaaagagagggaaatacacttgacccctttggttgggggagcaggaaagtcatatgtagatacaggagaggtggagaattggggccagtcttgtaatccacacattaggcttatttccctatgtagtctgtgggctcctggagtcagaatcaccttggaatctcctgccacctctgataaggtgatgccttgacattggatgccaacagacaaggtctgtggggtgcttgcagatgtgtggtctctggtgtcagactgcctgggttcactgtgtggctttggaagatctacctaacatctctgatccacagttttcccatctgcagaatgaggattactttacttatattaatacccccttagacgagcagttatgatgctgagatgagatgaattctgtaaagcgtttagcacagttcctgggacacaggaagatcctggtcaccatgagctagcattcgcctcctcctatcactgtggagaagttttcaccaaaggccatgtcttggtggataagagcaggaggttctgatctggtgcagttttgaggctcccagatgcccttgtcttcctttgggcctcaagatgcaggagggagggctttcctggtctgagctgctgggtgaaatcaggcatccctctagaacttcctcccttcaccctgtactgccctggagctggttcaggagactgctggcatgcaccgggaagctccgctcaaggcgttgccccctgatttcctagtgggggagctggcttgaggcagtcagaatactgagttgggtaaaagacccagggtcagaggctgagtctcattccagctgggacgtgaggctgtggctgcgctgagctgaccaccagcccctgggttccttagggttgcctctgggctcaggaaggaaactgcatgtagacactgagctaagggagcactagctgtttgctttggttagttctttcccctaatccttgcaagtagctggttctgctttgatgtgaaataacaaaagatttagggagaatttataatttagctcatttttttttaatgggaagggtgagttttggagcacatttaataccatgccatgtggggtaagctcagagcgttgcctgcactctcattcacctgggctggctttccccgctcgcttccccgttgggagtctaatacagcctgccttttccttaagatcattacttcaaacagtgttgacattttaatgtgattattttcctgtaatatttttccagcccttttctacttggggagtatatttgcatcctttttctttagggatttgtgttgttccagctccatcctggtctgtagaatagagctatgctcatagtaggtgcatggtaaatattgattgactcttgggtacgtgatagtgacgtctagcacccctcctcatacctattcccatgttcccataaaaaaattaaaatcgagggagaaaaacccaaaaaaaacaacaataaacaaagagttccatgatggcttcaggttaaatagtctcaccctgttggaaattcctggagcaaatgagcaagccagtgggcaggagcccgagtgtgagttctcaggaatatacatcactgaaagtgagcccacacatttgttaatgattggtctctgtgtggtgttaaaaaattaactaataacaatttattccagaggatattagtgtagagcagctattttcttataggaaaagagggattccagtcatttttttttttctgttttgttgaactgatgtttgcatcttgcctggtgaaatctttagcaaggaggaggtggaagttgttcactttagcacccaggggctcagctaacatttcgtggggctgacattctgggtgcctgtgctaggtgtggaaggagaattaagcggcttctgtccacaattgagagtctgagtagaaaaaagaggcatagctcacggcacgtgtcatttctcccttcgtccctccttccatccctccctctgtccttcttctttctccttcccttccagcaaatttagtgcctatgataatgtcaggggtgaggctgggcttggggaatagcgcagcaaaccgacctgttgcctcatcctcgtggtagatcgtctggtgagtgatgggcttggatcacatcagctcataggcgaatgccccatccagctgtggggaggctgccctggagccctgcgggcttgtggaggggttggcatatctggggatctgagggaagggtccaggggagggcacttgagttagagccaaaaggtggcttcgaattaactagcccagcaggaaagggaaaggtatgctaggccgagagattggcagtgcaaaggccaggtggtgggggcagcttcggctggagccagaggcaagagagaagcaggagtatggcgggatggggctgcaggggagctgggagccagacggttggggcctcctggactggggaggagcttgtctgccatgagggaaccatgggatgtctgaagagagggatgtgagtgtgtgtgtgcgtgagtgtgtgtgacagagaccaagagacagtgtgatcgggcacatttccaagccgtcactctggctggccaccccgggtggaaatgggtcccaggaaggcagcagagtgagaccagggaagagggtgtggcagccacagatggtggggcctgggctggggtttgcagagctcattcagaaaaggggctgggactacattgcccggaggaagatctgtgcaggagaggaggctcaatctcagcttggaagggaagggcaggagagggaagggaagggtatgtgccatgaggcacctacgtggtgtctgggcaccccatggtgcagccaaaggctcctcccaggatcctcatgcaggagccctgaaggctgtgcaagaggtgctgtctcaccctgagcagggccgagagcctgagaggtgctgtctcaccctgagcagggccgagagcctgagaggtgctgtctcaccctgagcagggccgagagcctgagaggtgctgtctcaccctgagcagggctgagagcctggaactgtttagagagagtctggggcagtgcaggatactcggagagattgcctggggtgccctaggatggactgtgttttcttctttatacatgagaagctggaaaatgggagttggacgtggattccgtgggcaaaggttcttttcctggcacagtggagcagggatgctggcaggggtggatgctcactacctcctgtgtgcttttcctactgtgagcaaatgtggaagggagaattgctatatgaagaccctccatgacccatatcctgtatagccccctcccctgagtgtggcaggaaccagtgactgtgacaggtttcgcctgcatgcctaggctatcttatatgcacaggagactttaagaaagtataagccttggtggccctgccctaatcagggaagccctaaaggggacaaaattcttcctggagattgagactggaagcacaggatggaagcgggggatgctggtttgaagatggaggggactatgtggaagggaatgtgagtgacctctaggagctgagagtggcccctgctgatggtcaacagagagatagggatcttagtgccatagctgcagggatctgactcttgctaacaccctgagtgagcacggaagtagagtttccccttgagggaagatgagaaggcaccccactgctacactgatttcagcctttcggaccccgagcagatgagaaggcacctgggctgacacaccgatttcagcctttgagaccccaagcagaggacccagtcctgccatgtcctgacttctgacttacggaactaggagctaataagtgggtgttatttgaagccagtaagcttatggttttgtgttatgcagcaatagaaaactaatacggggagggaagtttattgcttccatattacaggggaaagcctcaggttcagagaggtgaagggatcgtcctggtcacctggctaccctggcggagctgagaagcaaagctgtgtggccagactctgatgctcctgctgtgtgctgcctcggtttcctgatctgcgaaatgggctggtcatggcattgtcctgaggccgcaggaggagtggcctggaggctgtgccagctgtgaaagtgtcagggcccttgtgactgttttcaccctccctgttggcacacaggacctggaggggtgcccctccgaggccctccctggcttctcacactcaccctaaacccggtgtgtttccatggttactggtggctttactagtgtgactctcaagctggccccatagccactcctttttatgtgtatttctaatttcctttagagcatttttaaacttttcgctttgaaatattttagacatctaaaaatgtcacaaaatagtaaaaaaataactcctgcgtacctttcacctatattccccaaataacatcccacttaactacagtaagtcatcaaaaagaagaaattagctttggtacaatacaattaactcatctaccaaccttatctgaattgagtccatttttctgctaacatgcttttctatcctgtgatccacccaggatcccacgtggcacgcggccagcatgtctccttagcgtccgccaatgtggaacagttccttagtgtcttcatagcctgatgcctttgaagagtgctttcagttattttgtagactgtccctaaatgaggggttgtctgatgtttccttctttttaaatcgagtatatgcgtttttggcacaaatcccccataagcgatgtcgctggagatccctaggtcagttggaccaatcctggtgatgttgactgtggttgctcagccaggtgcctctgctctaaagttaacactttcttcctctttgtaattcgtcagcgttttgtgggaaaccttgagactgtcagacatcgtttctcatcacaccctttcccaccctgggaatcctcgcctgccagttgtcaccatggtgcgtgttcaggggtggctgtctttccgtcatttctcttaaatgtattagtgagttccattactcactaataagggaaagcttcccccacgctcccatgtatttattcacctgtttacttacactagtgtggacgcctgcatgtatgtttatcctgtggagtagagtccactgctgtcatcttcttgttgctggaactgtcccagacgtggccactgggagctccttcgagtcggtgtctgtgccagtggagtgctcccatcattgtctgagctctttcttgctttctggcagcataagacgctccaggcccccagggcctcgcctctgctgaggtgcttgctgtgcaggatttgggaaggtgctctcaggggctgtgggctcccatgcctgcttccgcctcatccttgcagacccctgtgcaggtaggttatttgtaggtgagcaccccagtgcacatagactgatgtagccgggttccccagggagcaggtggcagagttggggcttgcccagactcctgctcttgccctgtggaaggacctatgagtcggaccccacacagggattaggtggggccatgctgggcagcccatgtcagcctggcacatcttggggactgtccacagtgtcagggctgggagcatggtcttggcacatgtaacatgccccgtttctctctttcttctggggttcaggcatatttctggtccatgataagatctttgcctccttcctgtctttcttgccctcgtggatggcccagaatcctttgtagatttcccacagtggcctttcccaggcaggcactggctggcagtggcagtctagacttcctgcctgcctcagtggccttccctgaaggagctgtacaaaagtgacagggagcacaggccactggcccctggggaggtgtggggcatggtgagccacgtccaccacatactgtgtgccaagctggaaaagagtttgggggtgcagaggacaaaggaagggaggtcacctctacagaatcacatggcacttaatttgtctttcctcttccctacccactcccctcctttcttcccagagacaagaggcagctcctgggagaaggcacagcctctgagactcacaagcagatcttttaaggtcaactttgccatctgtcttttaggcaataaccttcactacagctttttctgcttatttttgtcgaaagtcattgggagaatgagtcattgcgtgtgtatgcctgtgtgtttgtgcatatatatatgtgtgtgtatgtgcatgtacaagtatgtgtttgtgtgtgcaggtgtgcacgtgtgggtacttcccctgatttttttttttttgtgacataacttcccctcatttttttgaaaggctgaaagggactcagggtcaaggccatggtgcatccctcctgcagggagctggagctgggtgcctggaagctggcctttgggtcaggcttcagcctcagccgtactgactgtgcctggccaacctctgtcagtcccttcatcaggccatgctttaaggtcctcctctataaactgggggcaatgctagttcctactcctggggtgggtatgagttccagatgaggcacgtgacctttgcaggattttaacattacagtgacataactgtaatttacctactggtaaatgctctgttcatgtcagttagtagaatagaaagtgctggccctgctgacacagcagccatctcctggtttgcgatggacactatctcaggaggaggctgccgtgtgcctgctgcgaggggtgctccctgtttgctagggaggcccagagactgccccggcacctcgctgcacacagagaggccgtgtgtgtctcttgacccttcagctccacactgggaatgagggagaccaggggttagagatgcctcgggacctgagccgggcaccagctcccatctgtccatctgtcctgggctgctgggggagccggctctggccaggactgatgattcctggcacccaccaggagatgcacatcctgcttgaaagctgtgaactgctatccagagtgtctgggcttatcctgttggagcaaaacccctgggctaatatgtaatcccattgtgaaatgtatttcaaggagggcttctacaaggattctaattttacagcagctttaaccaaaaaaaaaaaaaaaaaaaacccaaatcttcagcaaacactcagaaccatggttcctgtatgatgtatagctttcaaaaacactcccccaccccttggaaatataggcagggaagggaaaataaatgtttttttgtgggaggcaggagcattattgaaaaaaactcaacaggctttttaaaactggaaaagtagaacgcgcgcatgttgaaaaattccagggcggctggagacaggatggggtggggcaggtatgtcggctccgcatggatcaggcttggtccagcccgtgttatgaccttccagctgtctgcttctcctctttggcctcagtttcctcatctataaaatgggaactatagtattgtacgcaccatgcagctgttgtgggggttaaatgatatgatctgtcacattcctgttacatgtatgtattcaacaaacatcgactgtctttttcattagtgaaaaccaggtctctctggctgtgcacccgtctctcgtcccacgacagctgctgatggctttcttgtgtacgctctcaggaaatttctatgcattcttttcttcttcgtttgtttgtaatatgaagggaaacacgctagcccctgttctgtgcctggcttttccctcttaaaactgcatctgtgggatgtagatatgaagtttgaaggatacgtgggaatggaccagatgaaggtggggtggggatggtgaccactgtccctggcagaggaacagcggatgtggtggccatgtggtgggaggggcaccgtgtgagcatgggctgaacggctggtgcgtggggatggggaggtggcttgggcctgccacgcgggacagggaagaccaggttgagggtttttgtctgtatcctatggagtgatggagacctgctgacacttatggagcagagggtgacccactgatctgggactcggaaaggtcaccccacttctgctttggtgcccatgggcgttgtgtagagaaggtgtcctgttttggtttcccaagagaggaaatggacctgctggcaggagaagtgggggagagtggttgggagctgctggtgtgtcgcctctcgatttggagggtggggacataagagtgggaaatggctggggcagtgtctctagagggtggctttcttcgatgtgagcctggaagttggtgaaaattgcccctcttttggtgctctcatgggtgtttggatattttgatccccaggtcatctttcaagccaagtacagcatgcaccaacccctccgtggctgcatcctacagcccctgatccactggtggactgctccacacctgctccctgttggggtctctgtcctcctgggtgatcttctagagcaggagtctcaagctttagggtatatgagactcgccgggggtcttgtctatgcagcatgctgggtcccttcccagagctcctgacttgacgcatctgccatgaagccagtatgaacatgcatttttagcaagatctcaggtgccgctgatgctgctgatctgaggacaccctgctctggagactagaaacatctctggcctggtctccctcccatgctgctcctgtgtagcctgcaggagacacctcctggcagccgggtgtgcaggctggtccagcgcagccacctcagtccctaccggagtggtctctggcaactcgggtaccattctctgggcctacccaaggaacatattacaggggctggagctgacctgctggagccccctaactcagtctgatggaaagaagacttaaaaaaaaacttgtgatgttaatttaaattttacagaaaaattgtgaagctagtacaaagactttatgtaaacctgcaccctggttccctttcactcttatagtagatttgtatcactaatgaaccactcttgaaacattattattaactcaagttcatactttattccaacatccttagtatttttctaatgccctttttccatcccaggatgccatccagatcccgcatgacatctggacatcatgtaccttcaggctgtcttgctgtgacgccttttctgactttgcttgttcttagtgaccttagcagttttgaggagcacctgtagggtgttctgtagaatgtccttcaatccagaacttctttttaaattcctcttctgcttgcggggcatcttgagtcatggaaatagattctcatttgttttctttgtaaattctgcctagagccagggtctgcagagatctctctggaatctgatagctagaggcctcagttgaccctgaggcaggccccattcctgttagagaaggtgcgtggaactggtgtggttgggaggagtggttgagaatggtctctgtgggcacggggtttgcccggcaggcagctgcccagtacggctgcctgtgtggctgatgtcatgttctcatcccatctgatgcactctccgcaagtcactttcagaaactggaagatcccacttaattctgctctggaatatatttagaaatctattcatggccctctcccaaagctgatgttaaaattaagagatatcatttgtaggatgtcatggctgtgcaggaggaacatgctgatgtctccctggccgcctttggtttcttctcttgcttagggatttgcccaactcccattgcccatctgagcccagctttccccctctgagcccagttttcctcctctcaccccaatgtcagagtgggcacatcctccctgcggaggcatgcaggcttttcctctgcatgcaccgtctctgtcttgcgtgacagcccggggctgtttctcacccttgttacgctggggttcttggctgagagctcctgggcaggggctgactttgagatgaggcttctctgttcgtttctggctggttctagatctgggtggcatttggagggtgcaccgcttgtatctgtgaccgaatacctcagggtttgtggtgagggacgtggagatttctgtgctgcaagagatcttagtgcttctattgtgctggggagaggccagcccatcttggggtaccagggctggaccaaactttagagggggtctgacccaggtgttcagagccagaaatattatttgcaatcctctgcagggaatttaaaaatgaaaccattctgaactctccctccagaattcatggtcgtcagccattcaacaaatatttactggacacctgttttaagcctgtcaccgttttttgagtatgcatatagctatatatggcaggttgcagtgacgactcatgtctctgccttcatggaatgagtagtctcgtgggatgaggggaaacagacagcatagaaatagatgtatgatgggactctaggtggttatagatgcctggagtgatgataaagtgaggctggaggaatgagactggcagggaggagagcccaactgtctgtgatagatggtcagagaggacctcagagcagggcatctgtgcagagaccaggcaaagtgagggagctggtcatgtgactaccctcgagaagagcactagggcagcaggaacagcaggtgcaatggccctgcagcaggcatgtgcttgggtgtggtaggaacaaggagaccagtgaggctgagtgagtgatggaaaggggcaagtttttgatgcccacaatgccaagaggtggccaggggaggatcccagggaggtgccgaggcctgggggaagacttgggctttattttcagagctgcccgttgaagatttgaatggctgcagagtgagatgagattgtgctggaggattcgaaggtcatttagtcagagatgctggtggtttggagcaggttgttcacagcagatgttctttgtgcctgcatcacaattccttggaccagctctgccttggtcttcagctgtggcttcaatcaaccagcatgttgggtgatgagcgctgtattggagcaggtggctacactttcaggaatgctgcaagctggctgcagtgggaagtatttacaccatggcaattggcaaatgtacatatcagctcccttataccacccaaacactttccagcacagcacagccatgagcccagtgctgtggatattctcccaagcatcaaagtgcagccaggacatgaggggagctaatgtctgaaggacaatcctcagctgacgaaatgggagtaaacatcccaggcatgcatcctttaggtgggtgcttcttggagctttcagagaatgcaaccttgctgcctacagctgtgaccctggaaatgcacgtgtgtgggtttgcccttcctccctccctcactctcattgctcccttgcttctgcttcctgagatacctcccaaataagctaccttcacctaagcccgcctgcagctctgcttttaggagaatccaattaagatggtggtagagctagatgtggtgtgagagggatcagatggctgggatgagacagaagagtcctggatgactccaagcgttccagcctgagcagctggaaggatggagaggttctggcggcaatggggaggaaccattgagatgagcaggatgggggttgggcaaatcaatgctctgttcagctgtggacaggttctgtttgagagacctatcagatccccaggtggaaattgtacctggagttagggagaggtgtgtggttggatagagatatctgggactggacaacactgattaggtcaggtgcccacctgcatctgtgattcagttgtgccctcctgcttaggaagcgtctgtgtatctatgtatgtatctatcatccatctatttatcatttatctctcttttttatttatctctcaatatatctatcatctataaatatatgtatattctagcatctagtcatcaatcatttatctatttttatttatgtatcaatatatctataatctatttttcaatatatctataatctgtcatccatctgctaatcgatcatctaccattatctatcaatctgtgtatctatcgtctctctctctgtccatccatccatccatctatccaggcagtgcttgcttccttctgccccctccttagcccatccctgcccaggaaaattctcgtccctgctcaaatgccttcagtgacaggaaactcaccaacctcttaaggcttcggcatggaagtttccaactcatgtggccactccagaatgctgtcctccagggactgtgtttctctctcatgtcctcctcccaagatttatttacactcctcacttgccaggagagagtacttgggagctccgagccatgcgtgttccctggcagggtcgcctgtgtgctggggaagaatgggcccagtcatggggtggagacgccccccagctgcagccctggctcccgagcagaggcggctttgtgcttctcggggacaagggttgccattgaggcaggccagggatgctgtgcaagctagcgatggctgcaggctgaaatcgggcatttcacagagagcaagcactgcactgtccccgcagcctgcacgtgaatggaggctttggccctcggagtgcagccgtgcatggggccacgtgcaggcatttctggctcctggctcccagggagagaggcgagccctgttctctccccgagttctgtttgacaaaattcacaaaaacacaaagaaacaaaaagtacgggagaggatcagttcattctcctgactcctggttggtctcaagacctcccctgttgcctgtgctctggaagattccccatagtacctactaggtgggccagagaaggatggatttgtgggaccctggaaggctgggaagaggactgagaagccacagccctgcgctgggaagagccacggaggttagatcttgttttttgtttgtttttaatacaattgttcacactttctaaacttttttgaaataattttagactcacgtgggggttgcagagcttccctcaatgacagcatccacctttccatggttcactggttggcaccaggaggtggacattggtacagtgaggttaactaaaccaactaaaccagaggccttagcgaattccaccaggttttgcaagcacttttgctgttttttcagtgaataattgaatgaaattttatcacacctatagcttcacgacaaccaggtgagacttgacttttaaataatgaggcgccaggccccttggctcctgaagtggcatgggcgacgtgtgtggatgctgactggatgcccacctgcttccttttctctacgttgtgcccccaccatgctccagtggcaggggcagcctcctcctggcccccaggcctctgcttctctggtgcctgtggaggctcaagcctttaccccacctcccttcttcccaggaaggccctggctgcctgagaaggcccagccttccccttctccctccgctgttctggctgagctcatctcctgtggctgccctagcatgtgctgcagactgggggattccacagcagaaacctactctctcgcagtgctggaggctggaggtctgagatcaaggtgccagcagggcgggttccttctgagggctgtgagggcaggacccgtcccaggactctctctgtggctgtgagtggccgccttctccctggttctcttcacatgatcatcctgcccttccagggtatgagctccatgcctgtccccagaagatctggaggcttccatcttctgctccttatcagacaatggagcggaataaacacggttgcctctctggaattggagcttagtgctcatgaaataaaattctcttaatctcacaattgtcctcaatacagttgcagtgggtggcaccgaatgagtgtcgtgcttgtcaagacagccactgtggccttccgtcttcccactgactgatggcaagtcactagaaggaagcacccaactccccgtgatggcattaaatgacacccgtgggtgtggctgtagaccaggggttctaggcagccaagggggttccatgcagccaaaggaaagaagaaactttcctgcagaatgcatgaatatagggccaggtcctaaagcccagcccacgggcaagtgtgtcctggtggttgccactttccagtcaactgattagtgtcaatcatgacactgatttcctggcaatgtgtgagatgattttaggtggtaaatgaactattaattttataaagaacgttcatatcaggtatatgtctgtttaatttttcttttttcttttttttgagatggagtctcactctgtcccccaggctggagtgcagtggtatggtcttggctcactgcaacctctgcctcccaggttcaagtgattctcctgcctcagcctcccgagtagctgggattacaggtgcccaccaccacacctggctaatttttatatttttagtagagacagggtttcaccctgttggctaggctggtcttaaactcctaacctcaggtgatccgcccgcctaggcctcccaaagtgctgggattacaggcttgagccaccgttcccagcctgtttaatttttcattagaaaaatattgcatttccattaaagtagacgtcaagttttcattttaaactttcttaagaaaacattatattcattttagaccaagtggttctattagagcaacatccataagagtggtgacgtgtgagtgaagttggggagacaccgggtggtgcagttacccagcaccatctagaggaagtaccactggggtgggcggttacctggcaccatctagaggaagtgccactgggtgggggtcccttcacagaggcagggtccagtcccggccaccctcaaggagcttgtactgtcgaagtggggagggggacatgagaaatgttgactcaggggcagagggttcttaggcttatcaaggaagctctaggattctcggtgttctaggggattcgaggaggaaagttacacctgatgggtagacaggggtggttggagggatttggtaaaacgttcatgaagaaggggtgggtctgtggggtttctggagttgaagtgaccaccaccagggatgctggcatgtggagctagcttcatggctgttagctgtcattgtggaatggaagttaaagtgtgcgttgagcagggctgaaagaggcatagacctcccatactgggagagaagccatgctcagggaagaatgcccagaggctaaaagtcagggtcagatgcccatcttaggggcccttggttgccataattatcaaggcaaggtccttggataaagtctggtccggtgcctctgaaacttctatgtgcatacatgtcactgggagtctggttaaaatgtggattctgacgcttgggtagggcctgaaactctgcatttttaatgagctcctgggggatgctgctcctcagatgccccgctcttctgtcccctagcccccagcaacagcaaacacttagtgcctgcctttctgcagggacaggggagggaggtttgtttgcagtgacagtttttgggtagctatggagggaggagagaggtaggactttgtcttggtccagtttacaggggccttgacagaggcaggaggggtgggcaggagttgccaacttttatattttggtcaactagggatgtttaaaaacaacaatgaagaaaaacccgaacatccttggtttcacaacagtataataataacactattaacaccagtatttcccaaaagaaatggaatttcaaatccaaagagtcaggaaggccatatactccaacagaagacagtcttttcaaggacacagagccagcccccaaaacacctcactgcattgtcctcatttttcaaaggacttgggaaacatcaccccaggctggcatggatgactgggctgaggcttgggggctgcggctgtatgaacgggaatgcctgtggtcctcagagctgaggtctgtgttcccagaagcccctgtagagtggcatctggccccggcctgtggtagcctctgtcctttcccaggagagaggttgccagggcctgagcaaacactgacctggagtgtccctgcttctgaacctgcctccctatcgtcctcaccttgtggtgtacgggacgtgtggggactgtatcatctgggctgtggctggcggcctctcgtctaatgctaccacatgcccttcataggccatgatgagccatggcagtgctgactgtgttctaccactgctccaggttcctgagatgctcacatcctgggatgtgctggggttgagcaccaaagctaggggaggtcctagtagcccactcctgttcctcagtccccttgcgtctggctgggaaaaggtgcacctcctccgtctctgtccacgtggaattgaccatcatcctgcacagtctctgcccctggtaattggttctcagatgggctcatgactcaggcttcacgaatgagaatctgttctaggacttcagttgaagcgcttggaaagagttgttttccctccacaagaagtcacagagctggtcggctgtgggcttggagtgctggtggccattttccccaacccagctggagcctgagaatggaactagcccaaaggaaagctgagcaaagacaattttgaaggttgatttcccgatggcattatttgcatccctggatccagcgtgtgtgaagctggcgcacccccgggcttctcagttaaacacttcctccctttcaggcttcagcagctttgattgggcttctgccatttctgattattacagggacttagaggaaggaaatggctttgcccagatcacagggctcatgaaagtgcccaggctggaatgcaaatgcccacctacttcccctcacatcactctccctcacctgctttaagtgcatgcccagtcccagggagatcttcccatcactctttggggattctgcctcactgaaagctcttgaagctgcttcaaagtggagtatcatggtgtttcccgggagggtggttgccgggtgctgagaaagactggcctgcagtgctcttgcttttgcacttccgtcccccaccttgatcctggggtgcacgggggcaggaaggagaggagtgtgggagttgatggggagatgagaggagacatctacccatggcctctgcttctgggaggacctgtcacactcccagtgacacagcgtgtgctagagattaggcttttctcgtgaaagtagggttttgaaatataaatcattctataaagacatatgcatacgtgtgtttattgcagcactattaacaatagcaaagacatggaaacaacccaaatgcccatcaatgatagattggataaagaaaacgtggtacatatacaccatggaatactatgcagccataaaaaggaatgagatcatgtcctttgtggggacacggatgaaggtggaagccatcatcctcagcaaactaacacaggaacagaaaaccaaataccacatgctctcacttataagtgggagttgaacattgagaacacatggtcacagagaggggaacaacccacaccagggcctgttgagtggtgggggtgaggggagggatcttagaggacaggtcaataggtgcagcaagccaccatggcacatgtatacctatgtaacaaacctgcacgttctgcatatgtatcccgcttttcttttgtttttgtttttagaagaaataaaagaaaatagaagctcacttgcctggatactttaatattgcctgggtttttgtgttgtggagggctctgtaagtcatggaaaaggtattctcaggagctgctaatgacatatttaattttaataatgagtcacccatgcccacaatttattacctcctgtggctctggactctggttctttgagtggtataatagggcggaggttaatggataacacaattaattatttaggaggttcttacaaagccaaagactttgtaacagattaactaataggttcctaacttcattatcattttgatttttccaaagaatattttctcccaaaccactcaactgtataacattactgggaaatgtctaatttttacacgattcctctgctcagtttaaatactaatgttctgcttactccgtcactgttcagcgcccagctttcggtcttcaccttattgcctgggagatagatataatggattcagatgttatgagccctggaagggtttgtaacataaggcagtattttaatgctttaggggctggaaatatttaaggcaatattttaattctcatgagggacgaagtgttgtggttgcaagtgcagcctctgaaatcaggcggagctgggtgtgaatcccagcctctgcacttaggttggttacatcacctctccaactccgttccctccttcataaaatgggcacactagtagtattaacctggttgcattgcagtgaagattcaatgagaaaatgcaggtaaaacacttaatgtggtgtccagcacagagtaacaggttaggagtgttggccgtgaacggtggtgatggtcatctaatcacagcatggaatgaggaggagcaagccctcaccctggcctgctgctcctttgttgatgaaatgcctgtggttgttttcacaccgcagcaacagaattgagcattttcccagaaaaatttcccggtctaaactgtttactctctggcccttcatagaaaaagaatcgctgctccctgccctcaaggcagcctcctgtgcttttatcttctcgggtctcctttcagaggcctcattataggtgagcgccatccagcagaacgtcctgtgatgatggaaatggtctaggtctgcgccatgccgcccgggattgcgccgctggccgcagatggttgctgaacactcgaaatgtggctcatgcaacctcagaatggaatttttaaattttacttagctgtaattgatttaaatttaaatagccacctgtggctaatggcaaccacatcgggcagtgcagtgacaccacaccggctcagagtagagaaccagtcacctccattctagcatcctttctgagagtgccgggtggagggtgctggctttggctgaaataaaggaaagggagaaggctgctccttgcattttctttttctgttcttttttctttctttctttctctctctttctttctttctttctttctttctttctttctttctttctttctttttctttctttctttctttcctttctttctttctttctttctttctctttctttctttccttccttccttccttctttctttctttctttttttttttttttgagatagagttttgctcttgttgcccaggctggagtgcaatggcgcaatctcggctcactgcaacctccacctcccaggtacaagcaattcttttgtctcagcatcccaatagttgggattacgggcgtgcaccaccacactcggctaatttttttgtatttattagagacggggtttcaccatgttagtcaggctggtcgtgaactcctgacctcaggtgatccatctgcctcagcctcccaaagtgctgggattacaggcatgtgccatcgtgcccggcctgctccttgctttttattatgtttttgctgattcaaagcatctgtaaatataaaaattgaacttactcttttgtgtgaactatttggtaaacattcacaagcatgaagaaggaagttaagatgtcttaatcccatgctgtagagataaaggattttgggcagtacatttgctgtcactttcaaatatttgtatggcgcgtaagaggggagtcataatgtctgcatggggtgtgcccccacttttctgctgggacagggactacacaaagcttcatattatcctgattaatggctgcagggtgctcggtgtgcagtggcctctctgggcaggtctccgggctgcacacagttggggactgttttaagctgctcagtgatgagtgtccttgctgtgaagtatttctgtgtttttcatgtttgtccagagtggccacgaggtcctcctaagagactttgatcaatgtatgtttctacagaaaatgttagaagctgctgctccttcacattagctaatgctggatcttgcccatctttcttccttgtgccaatctgctggcgaaaaattgcttgtctatattttcatcacttttatgtatttatttttttaaaaaagacatgttcccagaagtcactgcttggaaatatctctggtcatttctcttgcttcttttagtttctgggtgaggccagtggttataagccagttcctgagtctttggacagtttaatgggggcatggatcaggtcgcagatagcagactttgatagcactttgattcaatgagggcctactatgagctttgcaggttttatctcattcaatattcataaccacctgaggagctgggtgctatttatccccattttacaggtgaagaaactgagaactctctcaagtcctggtggatgagggacatagtctggatttgaacagagcatgtggccacctgagctcacactcctggtcagcacaccatgggaggcatggggaggggaaggggtgtgggagatggccaggaagacctggtctggatcggggctctgcttactggctgtgaggctctggacaaagttatgtgacctctcagagcctaaatttccccagctctcaaatggatatcaggatatttaccttgaggttgttgtaaatagaaatggagatgtgtatgaaggccctggcataattcctatacttcactgatgcttgataaatgatggctgttttctgtactattagcaatgattattaatacagtgatgaaaaatacagagcaaagatgataaacagaaagtgtctagaagatagttgctacctgagagttagctattgtttattctgttaatgtgttacagtgtaggtatttctacattcagtaacatcataagcaaagaagactttgcttgccaagggccctattgaaagccctcgatgggtacaggctgttatctcaccaacacagactctgatccaaggtgaccaggagaattttagaatgatctaggcaaggaaattgccgtgcttccaaagcaacctgctcctcaggctccctgtggggctgtctgccccagcttgccacacctctgcaggtttgtggctttgtttcctgtatggggtctgaaggtgagcagtacctttgtttcctgtatggggtctgttctgtgttcagaagcaggactcagggctgctggagctggagctggagcctctgagtcctcagggttctccacagctctcctgaccagctctgctagagcgatgtctctggcagatgccttttccctgttgccctgtggtctggcctttctgctgtaggttaaagaaatcacagtgtgggcaggtggcctagtctgtaagtgtgtcctctagtgacctttgttttacctctagccatgcttgctgtttgtcctttcttgggattacatagttggccaggccaaaacatcttagctcacatgaaatccaagttcacagctggtaaaaatgccacagattaaatgctccatagaaattcatgtctataatggatgcatttctcctgggaattcactccttaaataggatgaccttgtcattgactcctgtccctaccctcaaccctaacgtgaacaaatatgaaatgatccttaaccaaccaacatgctagaataaagacacaaagcattaaaaaaaaaaaaaaaaccaacaaacaatgaggagggaggagtaattcttttggcaaaacttgattccctattgtggttgatgtggctgcattctttttgctcgttgagaagttgctagaagacagggtcagtggtggttctatgagggtggctaccatttttcttgagggactgcttttatctgccaagcacatagttctttacatactttatcttcctgaagcctcatgagagctctaagagattcccattattattatccccattttgagcatgaggaaactaaagctcagggaagtatgggaatagaaaactacatggccagggtctgaatccaggctgttttgctgctggccccaaggtcttagccccagtgcatactattaaatgctgcctgagttccttgacacctgcaccactacccctccttccaccaaccaggtggggttcactggtataagctgtcttagcatgttgaaagtgctcttgtagtacttagaaacactgtcatttaactgctatttaggttcttagtagttgtagctatgttagatggatgggccaagccatagccttgtgaggacagggacagtatccagtttgttatccatcccttatctatgccttatacacagtagagtctccataagtgctgggtggatggatgggtgggttggtggtggatggatggatggatggatgggcaggtgggtgggtggatgaatggatgatggatgatggctaagtagatatatgagtggataggtagatgggtggatggatggatggatggatggatagattgattggtagatgggtggatggattgatggatgattgctaggtagatatatgagtggataggtgggtgggtgggtgcgtgagtggatggatggatggagattgatagatggataggtggatggattggagaatgggtggatgggtgggtgaatggattgacggatgatggctaggtagatataccagtggataggtgggtggagggatgggtgggtggatggatggatggataaatggggatggatagatggatggatggatgggtagatgcacggatggataaatggagatggatagatggatggatggacgaatggatgggtagatggatggatgggttgatgatggctaggtagatatatgagtggataggtgggtgggtgggtgagtggatgggtggatggatggagattgatagatggataggaggatggattggagaatgggtggatgggtgggtgaatggattgatggatgacggctaggtagacataccagtggataggtgggtgggtggatgggtggggtggatggacagatggataaatggagatggatagatggatggatggatggatggatggatggatggatggatgggtagacggatgtatgggttgatgatggctaggtagatatatgagtgggtaggtgggtgggtgggtctgtggatggatggatgagtgggtagaaatccaggcagctggaaggacagtggtggaaggacaggtatttggaaggacagtcatttgaagaggaaacaaagacatagtatttgaggggggaattatctgcacagcccccaatttgctgacattagctcctggagaaaggagcacctgcaggatgagcatttcccacctgtctgttcttttctcttggccaagaggacctcacagcaatgctctggttacagtcaggggaaggctgtactgaccacacaaagttccaagaggggacaagcatggtgtgacctccagccaacttgactctctcatcttctccccacgttcctaccttggacctcttctgggctggccgattgaaagagaatattcataaagctgactttgaggagtgttttgggaggcaggcacaaagattattggtattgagtcccagttctataacttactagctgtgtggctttgggcaagttaatccctctctctgagcttcagttcccatcctgatgccaaccttgggtactgctgagggaggaggggagaagggggatggatgcacatgaatggaaggcagtagcagttgttaattccccttatctgactttccattttactaccttcatttcttttctcttagactcttggaagagatgtactgtgctgggatataaatttttgaaacctgttctctttcctcttccatgttctccgtgataatgcaggaaaaaaactcgcaaacctggccatgatgcccctaggccgacagaggctttcctagttccaattctggcattgtaagagagagctctatggaatagcaaaaaacaggcacacttcatcctgtgcatgctggggttgaggctgtgaggtgtgcaacaggacagtagagcatagcagatgggttgatgagctgtgatctggattcagacctacttgtctcagaccctgggtcagcccgtcagcagctgagcaatattgggaaagattcttaaccttggatggttggtaggatcaagtacagtcagtgtagaaatgcttagctcaccacatggactcaggacatgtcaactctccctgctttggctataattactatcctactgtcaaggaactttctctctagttgggctaggtcatgtgcgcagaagggttggaggacaaggtgttgaagaaagatttctccaaagatcctggttggatgtgagctggatagagcaaggctggagagtgcagatgcccctggggccaggcggtcttcaaccagtcttggtgagaaatagtagctcgactcagctttggggtgcagagacactggggaggggcggggactgtagcaacctaaagtgctcctgccctgcctgcagaggatgatctgcacagccctgctcattatgatgacatgggcatgtgcgtgactgtcagctctttggttttcaagagaatttggaagtctaggtttccatgcatcaaaccagtagtagagaaggcaaccatggggagaacctaagtcttgtttctagagagatcatagggttgtaaattttaccttgcatctcagagaagggcagtgctattttagattagggaggttgcaaaggtgatgaactccaagaacactgacaaataccattatcattgcaaaagaatcttaaatgtgtctttgaaaagcaagcatttggcttctaagttgtaaaaatggaccaaaaatgaagcagtagagtagggactcataaccaagtttatgccattattgttacaggtttcttttactgtgtttctctctatatatatgcacatctatataaatatagatacatagatatatggggagaagatatagatagagataatgtatgcatatatatacatattatatttgtctgggttctccagaggaacaccatcaataggatatagagatttatctattgcctatctattcatctatttatctatctaccaatccatccatccatccacctctgttcatctatccatccattatcgtatctatcatctatccattcatccatccatgtatgtatgcatgtatgtatgtctctctctctctatcattttcatccattcatccattgtctgtctatctgtctatctagatgtattagaaggaattggcctatgtgttgtggagtctaaaaagtcccagcagtcagcaagctgaagacctgagagagccaatggtgtagttctagtgcgagtttgaaggcctgagaaacaggagagctaatggtgtaaatttcagtctgagtctgcagaagactgatgattcagctcgaagacagatagagagaattctttcttattccgtcttcctgctctattcagtccctcaatggattggatgaggcccactcatgctagggaaggccatctgctttacccagcctattgattcaaatgtcagtctcatccagaaactccctcatgggcacccaaaataatgtttcaccaaatgtgtgggcaccctcaggcccagtcaagttgacacattaaaggaaccatcccatgcatatctatagattgtgtgtgtatgtacatttgtgtatatataatatataattatcctgttaaggatgtctcacagccttgaggcagagattaattgtgacctggtggtttccaatgtttctgtatatacaaataaattatgcagcaatgataccctagtctcattttattaattgctcttctattagtctgtttaaagtcaattaaacctcccaaggcccctcacggaggaacctctcacaaaatcagtctctgtcacttaggaatcctgagtggatgtcacatggctgtcctagctcctggggagggtgcagacaacatctctgttggaactcctgggtctgtgggtgatcattggcttgcattttgtagtggcatggcccgtggaggtccggatgtagagaaggcagcctttctgcagagcgttagaatttgggaagaagtggtcaggattagagaggaaaaaaaagacttagacatggacaaggatgccaccccagcttacccttcctctagtttcctggacttttgcagggttcggtggataattagttatttgcttgcttggttggtatctgttcacttttatttcttttagactttttttttttctgattagaacaaaaattatatttattattgaaaattcagaatacataggagattatcaagaacatcaaaagcattcacaaatccccccacccccaccccagagataacccctgtggctacttttgtgtgtgttcctccagtacttttcctatagaaacatttttcccgtgtcgggattgttcagcctatatcctttattaaattaatacatcagaagcttttctccacactgcttaggacacttgggaccaaatgctccagaataggaatttgccaccatttattttcccattctgctttcattggaaactgagtctggcttgaggcttttgtttgcttctttcttgctatagtaattgggatggacttaaggctgcctgcctttttgtgtacatctctgattatttctttaggctaaattcctagaagctggaacccggggcagaaggaatgaagattggaaacccttggtgcatgacagcaacttgctgtcctgccaacattggggcgtttgcctacagaaagagctctctggttgaatcaaagaattttaagaatttaattcttcttcttgttttttgtttgtttgtttgtttgtttttgagacagagtctcactctgtcgcccaggctggagtgcagtggcacgatcttggctcactgcaagcaccacctcccaggttcacaccattctcctgcctcagcttcctgagtagctgggactacaggtgcccgccaccatgcccagctaattttttgtatttttagtagagacggggtttcaccatgttagccaggatggtctcgatctcatgaccttgtgatccgcccgcctcggcctcccaaagtgctgggattacaggcgtgagccactgcgccggcctaattcttcttttaaaagttggggatcagagtaaggtgagaaggtatcctgcacagcatcaatgcacacagcgcacattaaatgagtgctattccacttcatttgtagtattttttttcccatttgtaggaactacttttgtgcctgacttccttgttcctttaaatgagccttaaggaagtagtgttgggggaattcaacacacacagagcagttggtctttattatgattttaagcatcttgttttcatgtgagcaccccaactttgccttttgctaaattttgcaacaagttttgagtaattctgcacaaaacagtgcccttgctccaggaggagaacagacatttgctcgttcttcacaggataattagactctaaaattagaagtcaaacactgcatgttaaaatgcatctggataaaatcccagtgggagaattaatccttcttggcagtgcaggggaacttgggtgcacgcctgatggagcggcgagaagctgagagggagtgaggcagcccctctgtgtggagtgttcagggcaaatgcacgggtgctggtgacgcagtccctttacttgtctaaaagtattggattctaagtgaaaaggggggtggggatagaaggccttctgcctcgcctcctgtagtcacagtttggatatcctgtgaaagtagcacttaggcaggcattcggtcctgcttggcgttgtttggtggacttgttagagaacactactgactgtgtttgaggaaggaggtggagcagagggctcagggcttaagcggcatctcctcaagggcagcaagagacctggaacgttccagagtaacccctgcctgcatccgtcggacttgccaatacacactgagaaactgctaaaggttatggatgcaatggaggcttctggtatagtggggaggaaaagcctccattatgaagtcaaaggccattgcgtgcctgcagtgtgcgacaagagctagtggttgcagcaccctgatgggcagaagcttccctcacagagctatggtgatggagaaggcagctgcaaatcaagtcattaccagcaaggttataaaattatttgattgcatttcgaagtgaaaaacagttttgaattaacttctatttgttgtgatataaacaacagatataaaaagatataaaaggaaataaacagtgaccatgacattggttgttcagtttcaacactatcttcgggttccctggtccttgtcctccctcattcgcctcccccaccactgaattgtagactccaacagggggcgggagctgagtttgtttttgctcccagctgggactccagggtctagcactggcctggtgcttagcagcctgtagcaagtatgtgttgaatgggcaaatgtatcctttggcggtacgagacagaagctggtggtcctgtgctgcctgtggccagagcacttccagcatacggggccaggacacatttgccctggtgtcccaggttgctccaggcacaggctgcacctcctgggggctctccctgcaccagcctggtggttctctgtcgcttctcctgcaccctgcgccttccctttgtgtcacatccctacctcatcgctactcatttgttggccagtgttttttttagaggatctctttttataaaatttcagtttttattttaggttctggaggtacatgtgcaggtttgttaccagggcacatcgcctgatgctgaggctggggcttctgttcattctgtcacccagatagtaaacatagggcctgacagcacgtttttcagcccttgtccccctccttcgctccctccctttctctttcggagtcccctgtgtctgttgttctgtatgtttgtgtgtactcaagatttagctcccactcatgagtgagaataggcagtatttggttttctatttctgcgttaattcactcaggatagtggcctccagctgcatccatgttgctgcaaaggatatgattttgttcttttttatgttagcagatctttttttttttttttttttttacccactctctgattctccatgcatcatgagtcccccaaaggcagggctgggttaacctccctgggcccagagaacaggtgctcagtatttttagaatgaacaaaagttctcttgtggaatcatgagggaggtggagggaggaaggaaggagggaagacctctgccctggctctttctcctgcctgaaacagcctccctcagatcccagcctgtggcgcctttctcgtcacgtgtgtgtccgccccacactgccctccctggcctcggaggctaaagcgctggcccctgccagcctggacctctcctcgtcctgcttgatttgattctgagcgtgctcatcaccatctggacatatgttattcacgcacaattaaatgttgcttatattgcatataaaacataaatttatataatgatatacatgtacatatgtgtgtgtggcgtgtgtgtgtgtgcatatccctgtcgacaccaccagaatatgttttaatgaaaccgtcatgttttaatgaaaacagaaagccttctgtttcatgtcgtgacgctggaatgaaaacagtctctcccagcatctagctcagtgcctggcacatcatgaaagcttaataaatacggctagaattaatgaatgagtttctttcccctcccctgtcctgtatttttaataaggctgttgagcctggggcctctgccctctgctggtcactatcatcacacagcctcactcaggaggcccctggccccgttctgcctggagtgttggcaggtggcaagggttgtaagctcctgcccagtcccgtgggcagttctaggatcttacccccagcccctgcgattctgaggggacgtgtcagtcattcagcctccagccagtccctggggatgtctgagggaggaagtaaggctcaagtcccctgaagtgggcagctcctgtcatccacagctgctgcttgttagtgggagccctggggccctgggtaaatgtcctgccagagctgggctcactctggcctcctttgtatacctgggggcaaggtttagctattcagcaagggctgttttaaaaaattgggttggttctggatattataatacctttttataaaagaccacgaagaaaactacattttcttggtgacttttacaataggagcaagttaaattttctttcttcactgagttgtcattgttgccttttttttaaaatcagtttttccctgtcaaaagaaagtaccttaccatgtgatctactgaaatataggagttacactgaacgaagtgaaaatgaagcttgtttgtcagtccttcctgctgactttctcaatctgggcccagtgtaccctgggaggcacagccagagcccagggagtgaatccgattgttcagtagatgcagttccccagttcaggccctgcaactaccagtccaggcctggaggggagcatgcatcccccaggaacatgactcggagctggaatctgactaggcataggagttaattgggcctgaggcagggagggtgctgggaagaacattctagggagagcagacagcatgtatgcatgcacacatgttctgtggcagaagactgtgtgagtgtttggggaggtatgagtgactctgaaagggtttttcccagtggagcacaaagatgcccgtgttgtgggaggaagcccaaggtgggaccaggcagggctcattaaagggatttttgtctttaaatgaagagcaccaggaaagcctctgaggattttaaacatggtggttgcagtcgggcagatcagcttggcaaagatttgatgactagggtattagtctgttctcatgctgctaatacagacatatctaggactgggtaatttataaaggaaagaagtttaatggactccacagttccacatggctggggaggcctcacaatcatggcggaaggcaaaggagaagcaaaggcatgtcttacatggcagcaggcaagagagagcttgtgcagggaaactcccatttataaaaccatccaatatcgtgagacttactaccatgaaaacagtaggggggaaccacccacatgattcaattatctccatctggccccacccttgacatgtggagattattacaattcaaggtgagatttgggtggggacacagccaaaccatatcaactagcatggagaggccagtgtggagtttagggtaccaggtggaaggccccctgaggttggggagggtggtgcagggcagcaggtggcagccaggcccttggaggtccattggcaggactgagcagcagggtgttggagtgacatgcaggtgggggtacagtcctcttcattcttattcacatcttttctgttgatccctttccatctctttccccactagtttcctgtgttcttttgatccacaagctccacatttcctgaaagaaatgaatgccattattatcacatacagccacacacacaccctgtacaaactcatctcccacaacgcccaactccctaacatggttgcctaaatcagaattaagctccctggattcaggtcccagtcccacccttaatgtgcttgtgaatctcaatgaggtgcttggcctttcttggctgggtttcctcatctgtgaaatgggggattttgcactgttttatttttctactttttgccagccttgcaactttccataggactttgcttcatctagactgttggtgtaggaaaacatccttttggttaatggatagatgttataggctaggtgccttccctccaggaggttcctcatcttattagtgaagattctgtagttgcatatggctttagttgctgttgagaaacctacccagactggcttcaccatcaaaggtatttattgactgacaccgttttgtgattagtccagggggagtttggcttcaggcccattgaccacagggtctaattatactgttcaccattgcttctcgtccctctcactgcctggttctctgctggcctgctgtgaggccacatttccttctcctctgttcccccaggctccagccattttgaggaaggaggtgagtttctctttcctattagtgaagaataccaaagctgtaggaatcatatcttactggcctggaggtggtcagcttctttaaaatcacatggcctgattgggcaaggggtaggtcccttgagggaaatcaaggtgctgaaccagaaaaggtggtgatggcaattgggtaggaaaaaataagtccatctcagagtctttaaaaaacatctttaaaatctcctcgtgatttcttaatcagcaagagggtggcttaatctgtttatcccagaggccagggatggagggtcagggaggggttgaccttctggggctgatgatagcatttgtttttcttcccagtccaggcttacgctgaccttggtacttaaggcagggcctgtcctttcctctgctcagcaacatccatcactgccatgtccttttggcactaattaaagaggacacacttggattaggaaaatgatggattgggttgatgtgatttgatgtgaggtggagtgaataagtgacaagctcgcccttagagaaaccacctcggagtagccacaggcagcctgtgtcccccataggagggactgggacagcttggcaaccacctaccccagaacacctgctaggaggagagagtcctgttgttccggcttgggaatgtctgtgtttacatgatgaggctgggaatataggcatcgaagcatcagtttcctttgctccatctagatcagcgttgttgatggatgagtatggtaaagagttggatgattttcccccagagtttccatgctggacaattgtttatttacttgagctaattactgaaatttttttccatgacttggcctaatataaaaaaagacactaatgagagtgaggttttatggtaagcaaattgaaaagcaaatagcaaataactcatctatgaaatagttataagaaaagttattatggtaatggttagggcaaaacaactctatttaattcttgatgcttatggagattccagccaagatatgtgtattttccttaaaaagatttctttaaagcatgtgtcttaatttaatcctgttatacacaggcacatctattaatgaagtaaattcaacaaagagttaattataaatagcagcaacatgttttctttctttaaatattgtatatatttcatgttgtaactcgggggataaattatactaggtggattttgtggtaatataaaggacggttggaattttattgagtatttacttttatttggttttgaagaagagcttctccatacctcagactatcaaaaatcattctgttagagtcacagaaattccaattaagagcttagatgccaatacagactgattattttgaagacttttttcagttcatgactcagttaatattcagtggtgtattttctgtagtttaaaagtatcactgataagttgggagtatgccttccatatgagatacaaattgtccctaaccactcaatcaatgtttactttacatgttaaaaataagaaactaagacctcataatgtggttttaaaggttcctgttttttgccctgaaggtccaaaggtaaatttggcacatttgtcaaaatatagatgaataatttatagatgtgcatccattttatttttataagtatggaaatagatataaagggatttgctggaagaatttcttttggcaaatgagcaaaaaatttaactataaagaatgaaatactaggctctagatataaaataatattcacaatgcaatacaaaatgtgcaggcatttttggtcatattttctatgacaggtttcttagaaatctgtgtttctactatgaaacacatgaaacaaagaaatatttatacatcagcagaactataaattcaaaaattcagagaaaattccaaatgggtgtgatgttgatacttgcatttttctctaaaattaataaggtatgtgtgtatatatctgcatatacctatgattcatgtaaagggttgcagatacaaagattctaagttcataggtataagaataaatatatgaagctgtatcctgtcttttgcattatattgattgttctcgttggggggagggcgttaattttaaaaagtcaagtgaaagtaaattttcccatcaaaggaaggcactattgctttcaaacatcatcatattcaatacaaattaaaacaatgaactactgtatctacccatcagactagcaaaaatcaaagcatataacaatggcaagtgttgccaaaggatggagacctgctgatgttagtgtaaatgggtgtgaccgctttggagagcaatatgacctatcccgttgagctggggacactatgactcagcaatgcttctccaggccttttccctggagaaaatcacatttgtaagtggcaagagaattatccaggaatgttttccaatgcgttgatagcaaaaaaaaaaaaaaaaaaaaagtctcaggggttgggggtggtgggacagaccgttgatagtggaatgagaaatcgtaaacaagaaggatctacccagaagttgccctagttgttacctctgcagtgtggcagggttgggggctatgatagggcttctgaggtgactgtggaggcttacatttgatctataatgttttgtttttttcttgtgtcttttaacaaaaagaaaacctgatttaagcaagatgtcaagatgttaatctttgttaattctggctgttgaatgcatgaatgttgtgtgtgtgtgtgttgaaactgttaaaaaaaaatcatctttgggttgaccatggtggtgtacacctgtaatcccagcactttaggaggccaaggtgggagaatcatttgaatcaggagttcgaggctgcagtgagctatgattgcaccactgcccttcagcctgggtgagagtgagactttgtctaaagtaaaaaatgtaaatgaataaatacatcctcccattacattacattttctaaagtagcgtaacttttcatgtcagaaactagaataaattaagtcactgaatcatgtagtaaattatgaactattgcctctatagttggttgccaaaatggcctgccagtgtctattaatcaatataaaatataaaaatagaacatttaaaaattaaagcatcatgttatattgccattaccagctagccatatgaaccttatggaaggaaatctggctatatttagcaaaattacataaatagtccccctttggaccagtaatcccacttctaggaatctatcccaaaatatcttggcaaatggtaaaatagcacacaggcaatggtatttgttttgccattattcattatagcaaagtgttggaaacaatgcacatatcacgaagagtggactggctggataaataatggcatagccagacaaaggggtatcggaagacaataaaagaaatgagcgtgttctctctactcacatggaagtcatctccaggatatatcatagtattcattagtcagagttttccagagaaacccaaccaacaggatctttttggtaggtaggtaggtaggtaggtaggtaggtaggtaggtaggtaggtaggtagatagacggatagatatggagatacatacagatataaaaggagatttattatgaggaattgactcaagtgattatgaaggctgagaagttctacaatctgctgtctgcaagatggagctccaggaaagctgatggtgtaattctagtctgagtctgaaggcctgagaaccaggggaactggtaatgtaacttccagtctaagggcaggagaaggtccctatgctagctcaagcaggcagacaggaaggaaaaaaggctgacttcctcctttatctacctttttgttctattcaggcctctatcaggtcggatgttgctcactcacatgagggaaggcatgtgctttactgagttcaccaattcaaatgctagtctctgatagatgtggtggctcacacctgtaatcccagcactttggggtgggggcacctagcagggaggatcacttgaggccaggagttccagactagcctgggaaacataacaagaccccatctctgaaaaacaaaagtaaaaaattagctgggcatggtggcacacacttgtctgtagtgccagctactcaggaggctgaggcaggaggatccattgagccctaaagttcaaggctgtagtgaggtatgattgcactttgtgccactgcactccagcctgggcaacagagtgagaccttatctcttaaaataaaaaatgctaatctcatcaaaattagcattaatctactctataatttccattagattcttttaaataattagataatttctgtctctttattgacattatctgtcatcataccttctctttcctctttaagagtgtacattttttcatcgagattagcattttttaagatctggaaatacccttgtagacacgtccacaatccataatatcatttaatctggaaacctgtggccagattgacacataaaattaacatcacaatcattgagtgaaaaaaaaatcgggatatttttatagaatactgcctttcatgtaaaaaagagatgtgttcacgtgtgcattttcatgtgtgtgtgtacttagattgtttaaaataaatgctgggagtaaaaagcgagcactaacggttgcctatagtggaggaagtaacagaggggagggcagaaatagaagtgagacttctatgagtgtactttgttatatgattctgaattttaaagtgtgtaaatatttttacatattcaaaaaattaaaagggaaaatattcttataattgaagacagatggaaataattgaacctaactatatatcaagttggtagcttaacccgagaaagtaattttttttttttttttgagatggagtcttgctctggcacccaggctggagtgcagtggcaccatctctgctcactgcaaccttcgcctcccgggttcaagcgattttcctgtctcagccttctaagtagctgggattagaggtgcttgccaccatgcctggttaatttttgtaattttaatagagacggggtttcactatgttggtcaggctggtctcgaactcctgatcctgtgatccacctgccttggcctcccaaaagtgctaggattacaggcgtgagccactgcactcggctgtgagaaagtaatttctttaagtaacactaaaacccagtattttaactgtatatccatagtggggtggaatttaaggatgctagcatatgtaaataaaaagaatcatatatttcatgattagtgttattattagctgtaatatggatgttattattttgaaattataggactaacttggagaaagcaattaagcaatatgttaatgttgttatgaatcaagattcttattatgaaagaaaagagataaggtataatattttttaaagttatctgaaatcctaaaatcttacatttaaattagaaatattaatattcatgatattctttgctcttaaaatatctatttcataactctgtctactgaaaaagcctaaaagcagtgaaaaccctatagcaacgaacgctttctacacccagattttgtgtactaaataccattccccactaaaacgaagcagagttccttggagaagtgactgcttcctggtctaggatactttattatgccagaaagcaaataagctatcaaaggttaatgagatgattgcaaaagaattgaatgattttctgctggctaagaggaattgcttaatacatttccaacaggataatgactagaattgattgaaacacatcagaattataaaaatctgtgccttcagatggtacttcaaaaaataattggtcaccgttgtatattgctagaacaccagctctctattctgaaagttgctaaaaaaggaataagaaacaagcttttattctgccttcctgttttatttatatttcagggtaaccaaatagctgatgattgaacgtcttctttatagaaaaattttaattaataaatgcaaaaggaaagaatgagaaaattaccatttgacaacccaaatgaaataacaggtgtaggcaattattatcaataggtgttaacagcattaggtaactatcaatggggaattttataatggataaatcaggctgatataacctgaatgtactgatctcattttacctctctaaaggtaggacaaccagaagttatatgcctcctaatatgtaattggaaatataaaccactgcctctaaaggattctttcctaaaaaattaagcctgaatgtgaccaagcttttaaattttactaccagttttcaggaaatatggaggctaaaggaacgtgttaacaaattgaccagcttctcaaataaaatatggaaaagtcacatcactccagaaattttcccagtttactcttcgagccaattcctccttagctcacagagacaattactttccatagatctgtcaccatagattatcacataagtgcagtcatacagttggcatttgtgtgtgtgtgtctggattccttcactgaacataatattttagaaattcattcagtgtgtgtatgtgtgtgtgtgtatgtgttggtttctttgttttattgagtacttcattgcatgaatatcccataatttgtccagtctctcgttgcatatttgtgttttttccattttctggctgatgtaaataaagcttctgtgaggattcttgtacaagtccttttgcggatctatgtttttattttaattgtgtaaattataaaagtgaaattgctggaacatagggtaggtttatgtttaaaaagaacttccaaatagttctaagtggcatgagttctagttgcttcacacctttttcaaaagtgagtgttatctttcatttaattttcccagtcaggctgatatgaaatggtatctcattatggtttttaaatttttttatatatagctttattgagatacaattcacatactatacacttcacacttttgaaatgtaaactttaattgttttaaatatctttccagagttgtgcaactatcatcacaattggtagtctttggctttctaggagtttgtccatttcatctgagttactaatttattggcatgcagttatttatagtattcccttataatttatttctgtgatattggtagtgttggccccttttacactcttgattttagtaatttgagtcttctctctctcttctttatcagtctagctaaagatttataagtttattgatccttcaaagaaccaactctttattttattgattttctctgttgtttttctattctctatttcattaatttctgccctagcctttaattccttccttctgaatgttccaggcttagtttgttcttctttttctactcttttcgagtggaggatttggcttttattttgagatttttcttttaaatataggaatttagagctataggcttctatttaagcatttctgtgactctgtttcataaattttgcttcattgtttcttcattttcattcatctcaaagtactttctaatctcactcatgatttattctttgactcattggttatttagggccatattgtttaatttccatatgtttgtgaatcccctaagtttctttctgttattgctttctaatttcattccattgtggtcagaaattatactttttatgatttcaattattttgaatttattgtggtttgttttatggcccagcctatgatctgtcctggagaatgtcccatgtgcatttgagaatgtgtattctgctgtttctgggtaaagtgttctatagatgtctgtcatatggtatatagttcatttatactgttgttcatcttttcttttttctccttaatcttctgcccacttattctattcatgagtgaaagtgggatattgaagtctccgatttttattattgagttattttccctttaactctatcaatatttgcttcatatattttgggggtcttatattaggtacatatatatttatcatttttatgcctccctgatggattgactctttcatcactgtttcaccatcatctctctatatctatatctctagttttagagtagctttatctgatattggaatagccactctagcttttgtatgattgctgtttgcatgctatatctttttccattctttacttcaaactgtttgtatctttgaatctaaagtgttttctcttgtagctagcatatagtagtatcagatttttattcagtctgacagtctttacttttgttggattgtctaatccattcacatttattgttataatggatatagttagatttgcatctaccattttatttttcattttctatatctctcatgccttttttgttcctctatttttcctttactgctttatttggccttaaatgagtatttttagtgtaacattttaatttctttaatcattttttaaaaatttattttcttagtggttgctgtggggattaccatatacatcttaacttatcagaattcttcagattcatactaacttaatttcagttagatatagaaacattactcctgaatagcatgattttttcttctacctcatttttgcgctataattttatacatattacatctatatgctacaaactttacaatacattgttacaattaattattactttatatgaatttatgtctttcaaggaagctgagaaaataaagagcaagtgctcatttacagagtctgttatcttaaccttttaatttaccatttccggttctcttcatttgttcttgtggattcaagttactgtcttgtgtcattttcttactccaattcatctttgctcccatatacttcctttgcgttattgtcaaacattttacatttctgtatgttataggcacaatgatagaagtgtgttgtgtgtgtgtgtgtgtgtgtgtgtgtttgtgtgttattttatgcaattgtttattaaatcagtgaacagaataaagcagaggaaatatgcattcaggctgtctttcataattacatcattacctttactggagctccttgttttgtgtgtgtgtaaatttgaattactgtttggtgtcacttgatttcagcctcaaaactttcctagcttttcttatatggcagatcttttagcaatacattatcctattttatttatctatgaatgtcttgaattcactttcatttttgaaagatacttttgctgggcataacattcttggttaacagttgttttattttctccttcagcactttgaatatatttcatcccactgccttttggactccattacttctgatagaagtctgctgttaatcctattgaggcatccttgcagtgactagtcagttttctcttgctattttcatgatttttctctttgttgtttctcaacattttgatttttatgtgcttgggtgcaggtctctttgcatttatactatttagaatttgttgagtacctgggatgtatagattagggttttttcgcactaaatttggtaggctttagccattatttctttgaaaaaaatttctgcttctttttcactcttctcttattctggtactcccattatacatatgttggtccacttaatggtgtctacaatttactaagcctatgttcattttacttcattctttccctctgctcttcagattgaataatctctgactgtcttcaagttcaatgattcttttttctaccaattcaacaaagccactgttgatcccctctagtgaattttgaactttaattattataattttctactgtataatttacattagattattttaaataatttctatctctttattgacattatctatttgccaacataccttctctttcctctttaacagtgtacatatttataatattttggacatatttataatagttactttgaaatctttctaagtctgacacctgggccctttcataggcagcttcttttgaatgcttttttttaaatgtatttgttgcactttcctgtgtttttatacatactagatttttttcaaagctggacgttttagtagataatatattttagcaactctggatacttgttttcttttcctctgagcttgccattgttgtttgtttatgtgttttgtgacaggaataggctattttagtgtttatttctacccacagtgtggagcctttggtgttacttttctgacgctgcagccttgggagtgtgcacagtcaccttgagatgatagtagttttagcatgtgtctctttgacttctctcttctgcctccttccttaatctccctgttaatctgtctgcctctgttggtatcataccaagctattaggctccactaactgccaaattattgctccattatttttgacaatgtccagggcgcatgcattcctctacaacctgatccagttaaatttgaacccctttgcaaaggtattttttgaggtcagtctttgaggtttgaccaagagggctcttcttagctgtcttgctctgatcctctctgataaactatctggcctacaatttagcttgttgccatcatggagctgtcagccttctatacctgttttcatgcttacttgtcttttttttttttttttctctgcctattctgtcattaagaccatctaatgaatgttttaaatgataatatatttttcattatagcatttccatttggatatctattgcagtttccatgtggttcattttaaaaatctcttcatacatgtttacctttcacacactatttttaaaaactgctatcacgattatttcaaagttgtgtgataatttcaatagctgggctatttatgaatcttcttctattgtctgtttcctctttttgatcacaaatcaaatgttcttgcttcttcaggcatcatagtttatactacatgtcaggcattctgtgtcaaataacagcacattctttttctttccacttatcagagttggaacactgagtcagtcgtacctgtagatcagctgggtctgggactttttttttttttttttttttttgagacagtctcgctctgtcaccaggctggagtccagttgtgcaatctcagctgactgcaacctctgcctcctggattcaagtgattctcctgcctcagcctcccaagtagctgggactacaggcacgcaccaccatgcccagctactttttgtatttttagtagagacagggtttcaccatattggctaggatgatctggatctcttgacctcatgatttgcctgcctcagcctcccaaagtgctgggattacaggtgtgagccaccgcaactggccgggtctggagctttttgtagctttagtttcattccatgtattaccagcttcgagtgcttagagggaagggtcaggatttttcccttaccatagcttaggctctgagcactgagtggtttctttgtactttatatctgcagtactagctttctgaaccttggagtgctttgaccatgccacagcccggccagcagatgcaggggtcacagagagctacgtttgttttctagtcccactggagtgctccctctgccctgctactcagactttgtagggcatctgtcctgccctcagtaaagacttgcaatgccctggagaggtttctcccagctgtcttccctgcccccagccttcaataattgaatgtccggagttcccaggatagatttctcttgagtttcctccttagccccccactttcagaggacactgccttttacttaggtgaggccccacatatctctggggttcttgcaggtttcttgctttacctccaggaagacctgtacaaaacagtatccagtggttaaaaactcactctgggctgggcgcagtggctcacgcctgtaatcccagcactttgggaggctgaggtgggcagatcacgaggtcagaagatcgagatcatcctggctaacatggtgaaaccccgtctctactaaaaatacaaaaaattagccgggcatggtggcggatgcctgtagtcccagctactctggaggctgaggcaggagaatggcgtgaatccgggaggcggagcttgcagtgagccgagattgcgccactgcactccagcctgggggacagcgagactccgtctcaaaaaacaaacaaacaaacaaaaaactcactctgtggcttgggcttcttcacattctaatctgtcatctggccaccagaatttcattaaagtatcagcaagtttctccttcctccaatctatggcaattccctgttattgcactactgtcaggggtgaaagcagtcagctggcaaatgccttaaatagtgttttctatcacttcatctccataatctggatttcatacaaaagttagtcatatataaacactgagtatctacagcaagaacatcattctcttggagagccagaaagtgagttgttttatgaaacatttctaatttagtcaattttccaaaaatagggaaattatacaatagtcattgcctttgcctatgaaaagtagaaagaagggaaatcaggagaccattgcttcatctgtgggaaacactttctatttgtccttacatatattctttgtttttccataattctgagggataaggaagagaatgtggcagcctgaatgtctgtttgactgtatctcttcacactgtgattctcattttcctaatgtctgtttcagaattttaaagtgggcagtggattatgccagtttctagatcctcctattaccttccagggaaaggaaaattggattcgattctaggggcatgattagcagaagggcacgcccgggtaccgtgactttgttctgaattaaggaagtttgagtaagagaaagcactttttcctgctggactgggctgcttgttgatggctgtgccgttaggagtgtggagcaggatggtgtttcagacagaggtcctgagcaggagagagcaggatgtatggaccaacgacaggcccatgagtctggaaggtggggaaggggggagcatgcacgttgctaatggagagagcacgtctcagaggctgcatcctggcggctttgtggtcatttgttataacagccctaggagactcacatactctccttcaccctctcacagccattccctgtgagaaccagacagagtggctgagttcatcctgatactcaatggacaatggacaggaccccctttttaggacttggttcttcagccccatggcacaatgtgtaccagcaaatgggtttggccaggtcctcttaaacaagcttcaaaattgtccaacttggacttccacagggcttctttctgtggccagagatgccaatacatgtgattttctgcatgcatgtggtcttggctccttggactccaggttggccacgcagcgacagacctgcctctcggtgggagttctcaggaagtcaaatcagatggaaacctgatctgtgtgcacgactggcttcggcagttaggtggtgtgaaaaatgaaatttctactggcttctcttgtccacagggtgaccgctagtggcagggctgcttgctgcggctcctaatctccttgtgggatgccttgggttggatcagtttctcttggcccctgtgaaaggaactcgcggtggaatattgtattcggtgctgcacaggagaccccatttagagacaggaaacttgtgcttgaagggcactctttgtgcagctacagacgattcattcattccttcatttattctgtcaccccaaatctgtctgcatctactgtgttccaggcaccgcacagggcactaggattctggtggtgaacaagaggccggtctcaccctcaaaggcatgtagtcttgagagacacagacactagacaaggaatgacacatgggtgtatgtgaagatgcttaggatatggtgggggcatttagcagggagatttgacccagcttggggtggggtgggggacacagaggcggattctatgaggaagcagcctttaccctgagacctgcagtgggggagcattccctagatgaggaatgagaggtggagaggaatgtggagcaggatggtgtttcagacaggggtcctgagcaggagagagcaggatgtatggaccaacgaaaggcccatgagtctggaaggtggggaagggggaagcatgcacgttgctaatggagacagcacgtctcagaggctgcatcctggtggctttgtagctttgtgaagaaagtgggattttatccttaaaacgaaagggaagaagttggagctgttaagtagggagtgacatgatttgattgcttttttaagagagccctctggaggaaaaggggctggagggggcagggggtacagggcacggtggccgtttctgcaatcgctgaggcaggaggtgctgggggccagtcctgggctggaaatggggagtgggtgagggaactggactaacccagagtgttgcatgaggtgacattcatgccacatggtgacggacttcacagggagggtgaaggagagtatgtgagtctcctagggctgctataacaaatgaccacaaactggggggctttaaaccatggagatgtgttccctcgcagttcacggctctgcaggccagaggtctgaagtcaaggcatcagtagggctgaaacctgcccttgaaagtttctggggcaggatgcccctgggcctctctagcgtctgggggctgcaagccctgcttggctgcagccgtgtcaccgcagcctctgggcgccttcacgtggcctttactgtgcatgtctctgcacatcctctcctcctcttagaatgacacagtcattgggtttaggacccaccataggctagcatggtctcattttaacgaatgacatctgcaaaaatcctacttctaggcaaggttctgggtagacatgaatcttggcaggggaactattcaacctgctacagagagggaggcggatttgctaaggatggctccggctggctgtagcaactgggtggagacgtggaggacagaccgacgccagcagaaggacatcagggccactgaaccagaaacacacatggacgtgtgagtaagtgaggtgaccagacctagtgaggcccccagttcttttcaggttttttgtttgtttttaacaaatgagactgaaaatgtttcggttcactcttacttagtgaaagccgttcttgtgaagctgacatgtagtccagcgacagtgactcaggttagtaagggtgtgtgcttttcatggcgtgtcgacaccaagccctcacgcagagcaggctgactgacgatgccgcgtgcaggaggttccctggctctggggccggctgacctgggctgtcacctcagtgctgctgctttcgagctgtgtggccttgaggagggttctgggcttctctgagctgaagttatttccttgtgcaacggagatgaaaacacttgggaacaaggctgtggaaagacttatagcatggttgcacgtgcttggcaaagaaccagtctgtttagcttgcttgtttattttactgaaggcattatgtataacgattatattgtatattctaccaaacataccaacaagagtgtccaagatgttgatgcatattgaaacgtccatgttactctttagcataatttattgacaactgcttgttttcttgtgattctccctttttcctaaacacttatgagagaaaagccacacttaactgtaagttcttacttattaaggatagtctttatttagtagactgggaaagtggtggtagatggataagtaattaacaaatggataagaaaaatagtaggcttccccacaggaaggagataaggctgtgaacaatccacaaaaggagtgagtgtaaggactttttaattttgagagatattggatacatagttgttatctttctgttttcaaattcccccagcaacccacctccatggccatatccttgttccttgcatcaagcagaatggctcttcctccaaagtgaaccttgggcagcctactctggttacagtcctgcctgccaccgcctccttgtgaccttgtcctcccgccctcctggaggctcctccagggctgcttctcgtagccgtttcctggtgtggcttcagccacttgctgaccctgtctgggtccccaggatcatgcttggcttcactccccattggaccacagccttgaccttctcctacacctcccttcccaactccagacatccccctcctgatcccgggagccagtgcctcactgctggcagaaatcacataaccaagcttcaatacattttccacagccttggcaaaggccaaagggctgcttgccaatccttttgtgtatctcagtgtggcaaagttgttaagaccgtggttcaagtctcacctccacccctcactggaggcaccatacgtcttctgccaacctgccagatgccgcctttcacaagtcagcccctgaaatctgacattgtctgtgaagccttctgtctgattcatcagacgaaagtgaatacccgtgcggtatccattgcgggctgggtgcaggattctcctggacctttctgtgatctcaaccctctcgctggaattaggcacttgctcttgtctccttccctaatagtatactatgcttactttgcacctgatttatttggttttattttataatcaaatcaaataatttattccaagtagtctaaattgaagttttattttcaaaactacaggcataagcagtctttcagtagaatacccactgtagaaaaacttccttaacggttccccttgtgttgcagattttcaaggcttcaccattttcagtgtgattactaatatagcaggaaatccttcaagtatgtggctctctctctacctaggattctttctccaggacagattctcagacacgaatgtctgcagttaaatgccctgtgcttcttgagaaatgatgcagaattgccatttggaagggtcgtgctgacttgtgatgccaccaaagatactcaaaggtgtttgatttcactgcacctctgtgagaattgggaaatgggacagaacatcatctggggatacttaaagaacccgaaggtccttagcaccttgctcaagccaagtaaaatgaatttttcatattacgattttttttttccagcagattttaagctatctacttgggggcagaaataagaaaaagcagatggtaggggcaatgaggttgtggtggagttcgagggagtgattgaatcttgggtgctggttggaaatactgcccatgggggtctgggttgaattggatggaaacaacacttggagaagcctgcagaggggctgagaggggagggagagcctgtgtggactggaggctcaggagatgaagggcgagaggattgggtgcacgctgggactcagaggcttacattcttatgtgtggggagtacagaacccgccacaagctaactctatgttggccatgtttatggttatcagaagtggggttggcgttgaggacatcaaagcttcatgatgccaggggactgcaagagtcccctccgtgggcattgggcaacccaggagatggctaaggagactgaagccagctgctgggcactagtggtttgagtgaggaggaagagaccagagaggactggggcccaggggctgggacttagtggtggagggggctgtgaaggtctgtccagcttccatctgcctgttgtgcatgccttgcagggaggcatggcggcctgagctctctcctcacttggactttctgtggctgaggcagaaataaacagagatggacatcaatatgctggtgtgtgaaggcaccccatggggttagctccaggcagacctaggcattgtgtcctgccatctcctccctgcgccacatctcctgttcagctctatgcaagccacggccccacatgccctgtgagtctgccctctcccaccctgcctaaaccaggccactggtctattttacagaaagatagggttggacatagcatcaggggtcacttgaaagtcacagggctggaatgtcaggtggattcagggcctggggccaccattctgtgacagctgagctgtgggcacattgagctgtgggcaggtggagcagaaggagctcaatttcagaggaagagagagacagagacagaggtagagagagagagacaaagagagacagagacagagagacagggagagagagaaaggaagagaaagatggagagagacagagacagaggaagaaagagagagagagacaaagacagagagatagagaaacagggagagagagagagatagaaagagagtgacatttagagagacagagagagggagagagacctgatttccacatgcagactgaagcaggggcgggagcccactcccggagaggaaggggacatgcagggcaggctcgcggtccaggtcctgagatccagagaagtcccatcacgccccttctgatcaaactggtctgagtgggcttctggtccttacacggtgtaatctttaaaacagtaactgttattattatcacatgaaactgcagcacttccctttcattacctttgagggtcgtttattgaccaacagagagacccatgcttggggagcaacgtccaaggtgcccagcagaggcacagcagtgctgacagtcctgacaagtaacgtgggacacagaccacctggagatctcagcctggaggtgcctcagttgctcagggtgatgagattctattttaagttcccaggttgtcatttaaacctctctcttctgtcttgggatgggctaatggtgagatgaggtgatcgcagggcatgaggcaggggaggttgaggtaataacatcagaagtaaaagtaaaaaatcaaccaaccctctagcccagtgggcgtggctggcccaatgagctgtggggctcccacaataggagtataagcagcaggccctgccacctgggctgctttgccacagggcatttgctccagtgtactctgcctcccaactagcccgtctcattgtctcatttattgacttctcccacttgccttttcatgcatgtgacttgaagacccttggtctaagctgtgaatcctgaacacatgaggccttgtgatagatgcccctaaacatcacaggaaacaaagcagggacaccctcgccatgtaaattcagcttttctgattacaagacagaagggatttttctgactttcccctgtctccagaaattcatgcagaatcctgatttcatcacaactcaccagattttccttccaggccagcctgcctctggggcttaggttttagaccagagcgggtggaaatacagaggtggctccattgccaaggaagtcctgaaaggcttcctgtcctgcttcctttctcttgtgctgtggatggcctttctgtctaagcagatgtgtgtcacgagaaggggcaggtgtgtgtgatggccattcaggcactgctcatgcttccgagttaaaacctcctacttaatcactggctggaaataagcagtgaattctgcagggcgagccacaagggcagtgctaggaaagtcgctgtccttcctagaaccacagttgcttttgttagttttgtaaaggtgagtgtatacacctgtaccgaggcagaggtgggcatgtacacctgtacacagatagaggtgggcacatacacctgtacggacttagaggtgggcacatacacctgtatggggttagagatggacacgtatgcctgtacgggcttagaggtgggcacatacacctgtacggggttagaggtgggcacgtacgcctgtacagggttagaggtggacatgtatgcctgtacatggttagaggtgggcacatactcctgtatggggttagaggtgggcacgtacacctgtacggggttagaggtggacatatacgcctgtacatggttagaggtgggcacgtacgcctgtatgggcttagaggtgggcacgtacacccgtacggggttagaggtggacatgtacacctgtacataggctccaggctcttcctcctgcaacagtgagctgcctcgtttgggtcattggcctttctcacagtttgcaggggttgtgcagatacagctccttgctcagatgtcatttcaatttgtttcctgggaacaaagctctccaccatttaagatacatctcttttctctatgggaccctttgtccatattaggccaggtcctctcaaagctccttccagttaggcagttcaggaaatgacatgtgccttagatgacaattcaacagaacaattcaatgcctaagtttttaaaaaattattacttacttatgagccagagtttctttcttgttgcctaggctggagtgcaatggcatgatctcggctcactgcaactccgcctcctgggttcaagaggttctcctgcctcagcctcccaagtagctggaactacaggtgcccgtcaccacacacagctaatttttttattttattttattttattttattttattttattttattttattttgtatttttagtagagacagggtttcaccatgtcggccaggctggtcttgaactcctgaccttaaatgatcctcccaccttggcctcccaaagtgttgggattacaggtgtgaaccactgcgcccggcccaaagcctaagttttagtataagactgatgtgtcttcagatgctgcctctgccatttgcatgctgtgtgacttcagcctggcagctcaacctatctgagcctcagtttctgcagctgtaaaatggggaccagaactgtctctactccctagggttggagggagagccctcagtgtgacccccggtgtggagtagggagggtttcagcactgaggagttttctcagcattccctgtctcaagactgtgttaactactgaagatggggtcaattactgacccctggggacttaaaataatcagtgccgcttttcctcattgcctaatttattatactcaagaagtggcctccaaatgaggaaaacctgatccatggccaagctgccttgaaagttttctttcaattcttttggtaacagctgtattgagagataattcacatatcgtgcagctcacccattggcagtgtactgttcaatggttttgagtatgtgagcagtgttttgcaaccatcattgtggtgaaatttagaatattttcttctcctctaaagagaaccctgtgtccattaggaatcacttccattttcctttcccccggcccctggccacctgtaacccgctttctgtttctttagatttgcctattctggacacttcatagaaatggaatcacatgacatgtggcggttatgactggcttccttcatttggcatcatgttttcgaagctcatccgtgttgtagcatgtgtcagccctccattcctttttatgacagaatgatattccactgtctggatacatcacactttgtttccccattcatcaattgagggacgtttgtgttgtttctattaattgttttaacctaaattgcctttcacaacgttcttgttttgatgtaactgtctgcttatcaattgtagagttcattaattcatctctctatgtgcccagtgaatatttattgagtgcccagtaagtcttgggtgctgtgcaaggcattttgatgaatctgtgaactaggcaggtaagactcttgccatcacggaaggtcccattctagtgggggccatttaggtgctgctctttcttctgatctttagtggatgaccaacaacaaatagctattaatacacaccatgatgtcggtgatgacgaatgtggtgggaaatggagctgcctacagggaagaaggagtgatgggtgctgtttcagatgtgggcactgggaagatgtctctctgggcagggcaatgggtgcagagccatggatttcactggtctgggtcaagttcagaaatgggtggactatgatgaacctctgaagacctggagatggggccaccttttgaggcagaaacctctcttttgtcctgtgagaagtctgacttggcctcacagggtgcagtcgtcccctgccctggacaagctcatgtgaatggccagagtgtggacacacatccaccaacctgcattctcaattacgtggaagcctccatgttctctctgcatttgaccttctctggagggtaaatgaggacaggcatctgccgggggtggggggggggggcaggcacttttactgtttccatcctgcaaggtccggggagaccccaggcttttctgtcgttaaggtgtcctagagggagcattcaagcttatgtttgttggacctgtgacagcacgtggtgcttgtgtttacagcctgctccatgttccatcttctactgcacttggctatttacaggtccatagacccagatggtgctgtggtttctgtctccagaacgcctccccagtccggcacttattcccactctcactgccatctcctgggcgttgctcaccagcaccttaaatgttcttgccacttctcctctgcaatctcgtactttctgctcccagaccaagggctagaggcatgctttctgtgctcatgtgcgcatgctttctcagcaaccttgtgaggctgccccaccccctccacagctcctccctggtccaatgggagagagcatttggtttcagagagaaccatgtggttctccttctgtttattctgagcttttttttcttcatttagcatcaattcctgtcatggaaaatcacaggagccaactgaagggggatttccagaatatttggccttccttgggccttggtgaagtggcttccttggcctgggcaagtggggctgtgagcatctgtacattcacaagaaggctgggggtgcggctccatgctgggtgagcctcctctctccttgccggggaagggctagagtaagagtcggtttctccaaagtgatgatgcattctttctcttatgggtctggcttggaagccacagaattcaaaggcagtgctgggaggtggcttagccctcctctgctttagttggtggaaaggaaaggtagaaacctgaggtcaaaaacaggtggcccgtgggcctaggtcagcctgcagacttggttggtttgaacacagtgtttgtgtgtttcattgaaccaacatttaaatgtagggagatttcacaccaatatctggattttctttctggcttggcttgaaatactcagagctcgggtactgctggctattgccaggctagagggttcatgaggatggaattgtccagctgtgatattggctgtctccggggcctgcaccatgcctggtagatgaggtccatccacttaatgaaggaacggactggccatggctcttgccaggctgcgtggctgctgcctgctccaggcaggacctgccttctccagttaggccaagtccttgactacccacgtggagaatccacacctggttcacctcacctacttacctgtgtatccagcctggcctctctaggacatctgcatctggtccttgggagcaaccgtaggcatgaggaatgtgctgaaagggatcctcctttattctgaaatgtggcccatcaggcctcagctagagattcttccctaaggaagtctggagtcccgtggctgtaaccacagctttcagaagcggttctcaaatgtgggcagtttgggcaccgtctggaggcattttcagttgtcgcagctgggaggcatggtgccactggcatctcatgggcagaggccagggatactgctaagtacccccacagtgcccaggacggcccccgccacagagcatcatttagcttcaaatgtcagtattgctgaggctgcgcatccctgcgttggagtcacagtgccctgagtccctgtcccaatgctgcacttgcccttgaccttcctgcctcctcgaacctcagtttcccatctctaaagtggagtgatcctcacatgcacctctctcagctagatggagaggaaacgccatggcctgcatgtagaatcacactcagtggtcggggttgcagctctgatatttggggaggccctagccatgggggctaggatctgggctgtggaatccacctgtgtgactatgggtgggtcgtatgtcctcctgagcctcagtttcctcatctgggcatcaagagaggaatagggcagcctctaaggatgtgaggattaaatggtttaatgtctgcactcggcacatggaacctgataaacgtgcgtgagcagcgccatcctgactcagcggtgtggttctggggtctcctgagacaccactgtgtgcccgacacccagcttgcggcctccttccctccaccatctctctcctcatccacgagtcaggttaatcctcccccttgaccccacacaccgcagcaaagttttaggaagttgcctgtggttgccctttggtgtatggactccagggtggctcctgtggaggtgggaagagccttgggggcttccaggcaagagaggtgagtggggcttagcctaggctgtggtggtggggttggtgaagagggaaggaattggagagaggccctggacacagagcccagaggagttgcctgcaggttggatgtgtctgttacggtgagctgcaagcaatctgagggcaggagggtacctcatctccctcagcgtctctctagtgtgtgaggctgtgtagtttgtggatttgaatagacttggagcttttggggcatcttcctgggacaacctcaatttatttggcatcttctcagagtttatctgtgggcatggcaggagtgaccccagactgggttcagccctctcttcctggctgagcctctttgggtcttagtctgctcatctgtagaatgggaatagaatccttcactctgtggcctgttgttttaagttttcaataagacctggtattggaagcccccatcaaagtgaggagctcatgaagcacaggcgttgggcaccagatgcaggatctcttcctgatggccgagcaatgtggcgctaagcggggtgtctgcggttcgccccgcccaggtcagcagcacgacaaggggcaggccttggattctcttagacctgctcacagcctgggcttctggggccctgaatgtggccagtgctcaggtggttgggagctggcctggcagcacctggggctcccaaacacaagggaagacaggcagctgggatggtgaccctggggaccctgctatcctgtggaggccccaggattccgacttgtacccgggcttgcttggtgctgtcttgggactgtctctgggctgggacagtgagctcttggatgggccctcggctgtcagtgcctcagagctgcagaaggtcagagccaggcctggggtggaccaagtggtatctacacccctcccaaatgtgtccgaactgggtagttttgtgcagctcactctgcctctctgagccttggtttcctcacctgacctgcacagtggaagaggagaagagcctgacaggaaggccggatcaagctggtagggtttcagtgcaggccctggcagagcagccccgaagcttgggaaggccaggaaatcccgcgctggtctccagacctgcctgcccgaggagtcgagcttctgatgaaattcagctgagatttcggttttttgtgctctgtaccctgacaaggggcaggaatcgggagccagcctcggctgtcagtgtcctgggctggttccctcccacctcccgcttaaaggtgtcattagcaagggcaagacgtcttctaacaggtggaaacaacttgtcaagacagcctgtggctgctgcgtttagagacccagagaccctgaatgtggactaacgcccccagaatgttcagaattaatgtgctgccccaggcagtgctggggcggggggcatggctctgactcctgcccttgggtttgccccactctgccctcttccccttctcctgttccttccccttctcctgttcctccttctcctgttccttccccttctcctgtccccccttctcctgttccttccccttctcctgtcctctcttctcctgttcccccttgttctcgttccccttctcctgttcccccttctcctgtccccgcttcttctgtctccccttctgttccctccttctcctattccccgcttctcctgttccccccttctcctgtccccgcttctcctgttccccccttctcctgtccccgcttctcctgttcctctcccttctcctgttccccacttctcctcttcccaccttctcctgttcctgccttctcctgtccccccttctcctgttccccctcctcctgttccccccttctctggttccctccttctcctgttccccctccttctgtttccccccttctcctcttcccaccttctcctgtcccccacttctcctgtttctgccttctcctgccttctcctgttgccccttctcctgtcccccgcttctcctgtctctgccttctcctgccttctcctatccccccttctactgtccccccacttctcctgttcctcccccttctcctgttcctccccttctgttcccccctctcctgttcccccttctcctgttcctccccattctcctccctgttcctcccccttctcctccctgttcctccttttccccctctcttttcctccccttcctattcttttccctcttcccttccccctcctcccctccacttacccctctccctccctattcttttccctcttcccttccccctcctcccctccacttacccctctccctccctgtccttctccctcttcccagctaattgtattgaggctgtaccttgtgataggaactttgggtagctctcttagctcatatcacaccatccctggggaagggtaccccattgtacaggtgggtacacagaagaggggagagatgcccccactacaatgtgctgggagcagaatttggacctggatctgagtccagctcctccatcccctgcaggaaggatctgggctcttggggtgtcagggggcaactacctcttcatagcaaagcttcattcgttaagttcctggttctgggctattgtccctgtctccgaggatcagagaggtgaagtcccctgcctgggttcagatggttatggagtaggggtcctggttcagacccatggctgtctttcttgccagcagcacttctttctttggggtgatttttcccccaggggacactgcagtgcctggagacattctggttgttataactggggtggagggtgcttctggcctctggcatgtagctgtcagggatgcggctaaacctcctgcaatgcacagcacagcccccaccacagagaattgtgtggtcccaaatgtcaccagtgctgaggctgagaaaccctgcaccaggcccctccccagctgaccctatgttcctgcaactaagccagcagtagacatacctgcagcagcaggtgttggtgctacaggtgaccctaggtcctcgacctccccatctgtctgccacctgggcctgggcctgggcccggaataaaaggtgcaccaagggtccctggcttcagcattttttgttttcaggttgcatatcagactccttcttgcctcctgaggtcccttgggacttggctccaggcagcctccctgatctaagacttcagcagccgcctcaggactctgcatggccaaggtcccctctgccccaggtcaccaaggtcattgtggtagggaaggagaagagagggccctaagaaaaactccagtcccactagttcctggaacttgcctaaggccaggagaagttgctgccatcgtgggttctgtatatgggattcaggactttggttcaggtggtttctgccaggctctggccagatgccagcctaggcagtgtcctggcagtgctgagtgacacgtctcgggcacagagaggagtgggcgcctggccctgagcagaggggaggcttgttgggggccagcacttgatccactgagccggaccctcagaccctgggttgccctcctcacccccacccccacctcatctctgcttcctgcaacatctatatttaaaaatgttgacagataataatggtgttcagccccaaaatgcagacaggagcttcctgacaattgcagtgctgcgccgggttggaggttttctcagggagcggagcgagtccccaggagcaagtgagagtgccagggctgtgagggctctttgccaatcttgacctttcagggagatttgagagaaagactccagaagcccgcggggagagcaggggttctggggaagataaagcccttcatccaggatccctctgtgaccataaggtgagttgctttgccccacatctctggtgaggcagagggcagggactctgcttagggagcaggcttcttaaaggcaaagggtttgcaaattctagcagcagcagggccctaagagaatggctttttttttttgttcttgaatcggatgactgcatttggagtctggggtgaggggtgggggctgcccctcttggagccacagatgggtcatttttatgtatcaagggagtcagaccaggatcagccctgggtttctggcacagagtccagaaagagtcacgaaggtcttttgtttgcatgtgaatggtattttaacctattacttctgggctaaaaataaaaattcccctcagatgcctttttgtctgtagattgtaagatcgtttccaggaaataatagattgtcattgatgtgcgttttgactgcatggtgtcctattcttaagccaggttttataaaaattcaaagtagaggaggtttcccacagtggagattgaagccttcatttagtgtcaggaacatatgctccactatcaggagtcattgtccttccgggatctccaccactgaaccctgggtgggagtgtgggagtgggtgagggagaaggcacacttggcttttgtgtggttttacatttggtatcatttgtggacttttggttctgaaaaatggtttgcaagtgaagttggatgtctggagttggggcccaagaaggcgatggagaagtgaattctaattcacagttaatatgggtcatggttaagttcttggaagcaacattggtttccaaaggtgcctgctgcgtttttaagctgcaaggttttatgtttttttgacccagtggaaaatggcgattcaggatcccaaggacttcaggagaggttgtctgaatgctaaaaccccttccctgaaatgcttgctttctttttagaggacaggaaatatgggaaattaacagtccttttgtggagtgtggtttgcgtgttgttctttgaggaggaattacggaattatgtgcgtgtataatgatggtaaccacatacacaatcgaagaataacaagtcagaaaaatccatggtgaggttcattcagaaataatcaagagtgtattgtttaattaaggagaggatcagaggaatgcagtcccagagccaccatttcggttgtcacctaggtgcaactctcagcagaaggaagcattcccaataagatgttctgaaaacgtactgccgttgaatctcacaactttcaccccacaagctgcaataagaggccagtatgaaaatgcgctctttcttccccatacattttcttctgttcctgagccgagcccataggtagcttggcagtttgcaattctctgtctacacggaatagatatagatttttttttcctgtatgttttgggtattaactctttggttgccaagctgttgagccctgagtctatattatacaccttcagcccgtggcttacagggcttcaacacatcgttgttatataatgcagtagttttgcttgtggggtgactgttcatatcgtggatgctcagaaaattctatttttaaagtataaaataccactcttcagagcagcctgctcactcctgcctccctgggagccacacgctttgcaccgtggagttgttggcatgaaggcacatgacatatggatgggagtgcgttcctcctgtctagggcctcttaggacccgaggaatggctggaggcagtttctctccagtcctgaggttgatgatccgaagctcttggtgctgagcctgtgctgctatttttagcttcctttcttccctgcatcttgacataattcgacatgtcgcagctgaatctcatctacttgcagagcttaccgtgttttgtaatctgtgttttgtggggcagaaatagtccttgccagagcatattatatcattattattcagggggaaagttatgatactatcaattaactttagaagatgcaaaacacaattgatcctttgattttctttctactgctaatttcctggctgggagcacctggagggtaggcactcctcctccttctgccggaccagaaggcagcaagcagtggttctcacatcttgggaacctgtatcagaagcacctggaggggctgttacaaaggcaattgcagccccactggcagagtttctgagttagcaggtctgggtggggtgggggggcaagtaatttgcatctctcacaagttcccaggtgatgctgacgccggtccagcactgcactttgaatcacagatggagatcacggcagagggttggtaaatatttagggggtggacgatgcctacatgcagagagccaatttaagaaatatacagatggtggagcaggagattttcagttgttgtgtatcctgtccacgcggttgaagatggacttgattgaaaaagaaattaaagttgaaataaaattagctgactgagaggatggctcctgacagtgtccaatgctgtgatgttatttagggaggatgaagcatcacgactcagacaacttactttgagatggccaacagcacacacagacataaatgaagtgcgtgtacatgcacacacacgaaactcagcaaaatattaactgctgaaacaataggtgttcatattattctaatttcatactatttctatttctaatacttttcttcataacaaacattgtattaacatggcaaacacaataatagggcttaggacagcttttcttgtgtgtgtgcttaatagtaaatcaaggtcacccacatgttcacagctgtgttgctctgggtggcatgggcatcggtactgtattagtccatttttacactgctgataaagacgtacccaagactgggtaatttataaagaaaaagaggcttaatggactcacattaagcctctggggagccctcacaataatggcagaaggtgaaaggcatgtcttacgtggcagcagacaagagataatgaggaccaagtgaaaggggtttccccttataaaaccgtcagatctcatgagacttattcactaccacaagaacagtatgggggagactgcccccatgattcagttacctcctgctgggtccctcccgcaacacgtggaaactataggagctacaattcaagaagagatttgggtggggacacagccaaactgtatcaggcacacgcatcgctttagggagttctcatttccttccattcaacctgatcctttatctgcttgttctttcctcctttcccttccattctctttcactccctcctccctggcttccctctcttctgctctccctccctccttccttcttcctgtccccatctcctgtcttctggtgactctgggtcaaaggaccctggtccagaagggttccgtgtggggatgtgttgtgctgaacccctgttaacctcagtagggaaggtaccaggttcaagaggccaaagaagagacctggagccagcaaacaagacatacagttttattatggacttacatgcagggaagagagtccagtggtggcaggttgaagagaactgtcttaacatacagaaacggtccagtggtggcaggctggacaggagaactgccttaatgttcagaaacggtccagtggtggcaggctggacaacatatccaccttcctacagtctggtggtggcagactgggcaagaaaaccacaactgcaaccgcctgcgaacatcatgcagtttacgcagcattttcatttagcaccctcctcctaacagccctcacctggcaaccttcatgtaacccaagcttgtccaacccaaggcctgtgggacgcatgcagcccaggatggctttgaatgcggcgcaacacaaatttgtaaactttcttaaagtgttatgagatttttttttttagctcatcaactatcattagtgttagcgtattttatgtatggcccaagacaattcttctttttctaatgtggcccaaggaagccaaaagattggacacccctgatagtaacccaaaactcagggcctcaatcccctgtacagcccgtgttccacaggacaggccggaggctcagatgttgtggtagataggaacagatctctgggtgggccactcccggattccctagtttggaacacacattcaggtgcacctgtcatacagggtcattctaagggtatgcttaaaatattgatgtcaggtgtgtttaccctgcaggatgctgtggcatctgcccaggaaaaagttgaattatgccagttattgttttcccagggttttcaggctgcctccttgttttttaaataaagttttattagaacacactcacacccatttacttacacacttctctggctgctttccagcagcatagctgaggcagagaccatagatccacacaactgaaaatatttacttctggcctgttgcagaaaaaatttgcccatgctgatttgtttctgtgggctggctgtcttggagattccacacgtacacacatgtgcacatgtgcatacatactcatactaaggacatgcagcaagacgttaagggttgtggagtctagagtacatgtgattgttcattgtaccattttttttttctactttttcacgtgtccaaaaaatttgtaaaacattttgatgactgtggcagtgaccaccccagggtctctagaggaatgccacaggggtccatcccaggttctgagtcttcaacatttgcctcacccacttggcaggttaatcaaatgggtagatgacacaaatcaataaaagcattaacaaagtgtcccatatattcaagagccaaacagatatctcaacagactgttagggaggctgagtcaacaaggagaagtttaatgttcataagcttcaggtatccagctcagatttacaaagatctttgcccaggtcctgcaaggagcagactttgataggaatcaggcctctgggccaggcatggcggctcacccctgtaatctcagctctttgggaggccgaggtgggtggatcacctgaggtcgggagtttgagaccagcctgaccaacatggtgaaaccctgtctctactaaaaacacaaaattagctgggagtggtggcacatgcctttaatcccagctactcaggaggctgaggcaggagaatcatttgaacccagggggtggaggttgcggtgagcagagatcgtgccattgcaccccagactgggcaacaagagcgaaactctatctcaaaaaaaaaaaaagaaagaaagaaagaaaaaaataatcaggcctcttggctggacgcggtggctcatgcctgtaatcccagcattttgggaggccgaggcaggtggatcacttgaggccaggagttcgaggccagcctggccaacatggcaaaaccccgtctctactaaaaatacaaaaattagctgggtgtggtggcgtgcacctgtagtcccagctactcggcaggctgaggcaggagaatcgctccaacccaggaggcagaggttgcagtgagccaagatcatggtgctgcactccagcctgggcaacagagtgagactctgtctcaaaaacaaaaacaaacaaaacaaaaaaaagggaaagaaatctggcctcttaatggaaccaaagtctgcggggtccctagagtgtgtgcaaactgttccagtcactgggacatcagtgtgcaaagcctcctggagcttgtgtgctagtgggagaggacaatgaacggcacctataaccagtaggggatcgtcctgcatgttagtaataagtgttgtgggaaatgaacaggagaagtagggggaggtaagagaaggtataaatgtggtaggctgtagacatttgagtattacatggagtgtcaggattggcatcattacggaggtgacatttgagcaaagccgtgaaggcggtgaggaagtgagccatgtggatatctgaggcaagagcctttggggcaaagggaaccttcagtgaagacgccccgaataagagccggcctggtgggttccaggaacagggaggaggagcccgtggtggctggagtcacatgagattgctggggagggagacgggagagaagcagggacattgtagggaggggcctctgccagcacttgggcttttgctctgagtgtgacgggtcgggggggacattggagggtttgagatttaattatgattcatcaaataacttgagaacaggctagtgtccaggtggactgaccagcctagcagtcattgctgcaatccaggcgggagatgatgctaactggccacagtgaggttgtggacgtggacacttctagaaggtagaatgatgcagttggctgagggagcagatggggaaacagggacagtggagtttcaagggaggactctcaggttctgtcgtgagtaacagaaggatagagcgttggtcctggcctatgaggggaaggccgtggtggagcaggtttcagggagagagcagttcaattttggctacagtgaatttggagcatctatttgacatccgtgcaaagatgacaaattggcaattggctgcacaactctgtgcttgggagagaggtttgggctgaagctgtgcattcgggaggccgcagctgagcagaagctgaatgtgagctaacgcgctctctccctgacttagtcatttgtctgccacctgtagtctaatttgccaaatactttcttttaaaccaggtcttttttttttttttcaaatttaaactcattttaaaaggatatctatgttgcacttttaagtagaaatccaatattgcttgcctttgataaaaggtaaccataaaataaaacaatgacaacaaaacaacatttagttcaagttaggcatagtctctcactaaggattttgagccagagggtcttatgtattatccaaacacagagatcaacaagtgtcagatgccagggtcgtcataataccaaactaagactctcctcttgaagttcttggaagattggagggaaattggcaagaaattagcttctgttgctttgtcctgggtccacgaatcccttaaagtccccttttaccctgttatgtgcctggcccttggggagatgctgagctgagcagccgttatagtgggtagaagaaggaagcttggggtccagcttgaccctctgctagaggttgggtttgccttaggactatgtattttctgaaaggcaaactgcaatttgcaagaacgcagagaggggcaatggctgtttattctagaacagacttgggggatgagaaccttggaaagaaagggtgggatttttcctgcatggttctaggatgtggccctgcagccagctgggaaggataaaaggatacaagtgggttggtttcacttccctctgggcacaggctttctctctgagaattctcactggggctcatatcttttaaattaagtagtctgctcctgaataatatctttctttggggctgtttctttttcagtttatatattggggtccctttttgacattataggctttcctcaaatgcctggtgagccaggatcgaccttgttcattgcagaatgaagcagcaaagagctggtgtgtgctcacggtgtgtttcagctggtgggttttgtttcaggttgcccaggcctggaggtggccttggtgctgaggggcctttgcagaaccttctctttgtggctggtctggagacaggcaaggatgctcctgtactttttgcctggagatgggagttgtccatgttatctgcaatccaccctaggctgatggtgagggagggagtctgctgtcataggaagcatgtaaacagactcaggcttctctcagcatgagaagggattttggatctctgaggtccttcctactgtggatttgcagtttccctccacaacctcacccgcaggaatccggaagcgcctgatgccttccctgggctgggagcccctagagaggaggatctgctgagctgttatgacatcgtgcccacaactgtgcaggcatttgggagatgctctgaaaatgcccgatgaagggttgtgaggatgaaagaatctgctgctgaacacaaactgctgggctccaggctactgagcccaacttattccatggcccagcatgtcccacggctcagcatgtcctgtggctcagcacgtcccttggcttcccatggctcagcacgtcccgtggctcagctctcactcctttgcttctgcaggtcccttggtctggcgtgtcctccccactcttcctgagttctctgaattctacttgtggctccagggccccctctttcatgaaaccttgactcaccacctccacctctttccccacctcacccaccactgtcctgctcttggggccctgcacccacctcctgctgggcccctgcttctgccctgcagtgctgtggcccccttcctgcccagcagctgggaaggcatcctgaagtgcatatcagatcttgccctgtccctgcctcccattgcctctggaccacagcctctgagatcctgcctgccttcctcatcttgtcttccattcctggggaacagtggccacatagccaggtggctggcagcacggacttgggagaccctaccagcctgggtttgaaccctgtctctaccgcctgcttgctttgtgacctggttcctcattttcctcatctgtaagatggtggtgttgaaaggacccgtctggtagggttgttctgaaggttgagatattcaaatgctgagaacaccacccagcacaaggctggtgaatgctccaggagggttcactgcgccgttgccattttcctgttgatcctggagttccggccactctggcctctgctcacatagctggaactcgtcagaccatctcccacctcaaggtctttgcctctaccgtgctgtctcaggacactcgtcccctgccttaccattcggtcagcccattatccttcgggcctcaggttgaatgtcacttgctgagagcagccctctctgaccatccttttagagtggcttccccgcctcacattccccgttacagtctggcctgattgtatctgccagtgggttctgcttcccccaaccacaacttgcccatcatgagggggcagccttgcctgttgtcccctgcactgcatcaacactgcctggaccagaggccctcggtaactgccagttggctgaatgaatgcaggaatgaggcatgaacaatgcaaagatgctgaaccatgacatgagggactgtttcattcatgtggcatgggggtgggctaccccccccatacctaacttttccaatgtgacggttttccttctgaatttataaggtgcccaccttaaagacaggaattcagctcatatcttttaatagaccctgcaaggtatccagttcctaggacacagcattttgttggttattgaatgagactgaagggatgagaagagtggccaatagcatggagctggggcctaactgcccacgtgtggtcttggtccctagtatttattagccaagtgtccttggccaacttcattttatgccacaaaacctcagtctcctcatctatacaatgggaataataataataccttttctagagttggagggaggattaaatgagtcagttatgtttaaagtcctggaacagtgccaatgcccaccacatagtaatttccatgtaaatgtgagctgccatgatgatggtgatgatcatggttgtgatgatggtggtgatgattgtgatgttgatggtgatgatgatggtcgtgatgatgatggtgatgatgatggtcgtgatgattgtgatgatgatggtgatgatgatggtggtgatgatgatggttgtgatgattgtgatgatggtggtgatgatgatggtggtgatgatgatggtgatgatgatggtgatgatgatgattgtgatgatggtggtgatggtggtggttatgatgatggtggtgatgatggtgatgatgatggtgatgatgatggtgatgatgatggtgatgatgatggtggtgatgattgtgatgatgatggtgatggtggtggtgatgatgatggtgatgatggtgatgatgatggtggtgattgtgatgatggtggtgattgtgatgatggtggtggttgtgatggtgatgattgtgatgatggtggtgatgatggtggtgattgtgatgatgatggtgattgtgatgatggtgatgattgtgatgatggtggtgattgtgatgatggtggtgatgatgatggtggtgatgatgatggtggtgattgtgatgatggtggtgatgatgatcatggtgattgtgatgatggtggtgatagtggtggtgacggtgataatgatcatggtggtgacagtgatgatgacgatggtgattgtgatggtggtggtgatagtggtgatgacgatgatgatcatggcagtgatggtgatgatgacgatggtgattgtgatggtggtggtgatagtggtgatgatggtgatgatgatcatagtggtgttggtgatgataatggtggtggtgaatgtgacggtgtgatggtggtaatgagggtgatgttgttaccttgtagtagatttgaaaaagtggaatagagtggaattaaagaaaacactactgagttaataagaagaaaggtagggcgcaggaagtgtttgctaggaaatggaagagtccagcttattccagtatcagttgaatgcagcagactcatgaactttactgaaaccaaaatttaccgaagctgatgagaggatcatgatttcccagagtgtggactgaagcctccgggaggtgtcagagatgattttggagtagtgcttttcacaccctctgtaaaataggacccatttaaaaattttcaatctgttgcaaactgataatttcattaatgtgtagagaaacattttcacacttcacccctaagagaaggtttgtggactggtacctggaacagatacttatcttgtagctgccaccaagaaacactttccagatgggcaccgtagcaggacactgtgctaggacacgctttgagtagtgctgtttcagatgaaaatcacatcacatggggctttgaatttcacagaatcctgtggtcagctggttgctcccctgtgaattatctttcagttgtgtggttgtatatggaggagaaagttgtagtttgtggctcatgtgtcactgactggtgatgttggatgatttctcttttctaacaagcagagagcagcctcaggcacagaacccttgacgggcatggggtcttgccagaatggaattacactgacttgtttccattgcatttattttgtggccacttaatatttttggatgttgattctgattttcctattagagccaagatgtaaagtttctttaatagataatttaggtgcaaaaagtgagttgccttaaaacatagtgtacattatcatgcagctacgagtgaatatatgacaaaaatcatgaaagtggtacaagacaaatttgcagagaactctagtggaaggcaggatagaggagtgagaatagaccaaatggatgtttggggtcatttgggggccatgtaagcctctcccccttatccctggtggaacagcattaaggacatcctctccttcatcccaaacatctgctttatgggaaaccacaggactatattgttagtagtactgggaaagcctagtcggctttatcttttggattctgagaatgttgtcagtgatcatgtttctctcttcactggagttgctaggagttccagcatccaatttcagctccaacctccaatccttgcacagaaccctacagtacgtgttttgtgtattgaagccacagaagcatgtatttttcctcctcattctctccctgacctttttttgattttgttttttgtttttttttcttaactgcagttacatttttgtaagctgtgttacatcgttgtttggaacacagtgggggtaatgcataaatgctgaataaataaataatgatgaaactttttcctcaaactgtgagattggggccactccattgttagagttattttaatgtgatcaggacaaagaggccaagagtgttgtaggaagtaagctttgttctcgtgggcttgggctgggcaacgctgtggttgttgggaacgctaatttctgttatttggtggtgctcatatctcaggcctctgtttaagaaacaacatagattcctccaaggcacatatttgcatcctgtgtgggccgaggtgcctggcttcattctttctctagatacccacactatctcatgggtatttttaaatgcgtgtcttaagagccaacttctctgctgtgtgcaggcttttcatgatgccgggagagttgccacgtggatttgcaggcgctgagggcagaaacaaggaacaggcagcatcagctcaatgggtgggacccactgtcctttcagcccttggtggggcggccttggaggaagggtcattctccaagcagggcagaactcagttccaggttggccagaaggccaaatggactgtggggcaggtctgaggccaggtagtggggcgacccagaagcaggaagatggtgtgtcaaatgtagagtgagacagaaatggcaggggctgaggagttgttgagtcctgttttttcacacttgtgtggggatcttgaggagtttcgtagaggtgccgcagggtctgcctgttgaggagcaaaccaagctgaccgggttacaggtgccatccactgtcccctcccatctgattggtttggatactaggatgttgtgtggattctcctggagtccagacatagccagtgaaacaatattgaaccccctgcaatagtccagccccatcattccatttcataaaggaaactgaggccttgccagggatcccaaagtggtaatccctcttgtagagttccaggggagggcaccaacctctacctagctactgaagccagaaacctgggcattcacctgccctttccattttcctcctcatccccatccctgccacatccctgtatcctggcatctccagccttcagcacctctccaattcatctgcttctcattacccccagccacaccaggaaggtccaggcccccttgtctgtgcgctgggaggatacagatgcatcctgagccttccagcttcctctgttgggcccatctaattgggtttctgctgggcgatgggagtgatcatttgaaacttcaaatctcattatgacagtctatatcccttcctcaatgttcccatcttgtttcacatctttcagtggttgctcatggcttgtaaaatcaaaacaaaacaaaacaaaacacccaaattcctcaccaagccccctcctgcacctctggcctcatgatggcatgattctttgagtctggggacctgagcagatggtctgagctgtgctagaactctaacccacaccaccgcctaccatgcacaaacacagatgtttgctggctgactccagctcatcctctcatcttagcctcagcatcacttctgcaggaaggccccttccaatctcaccagggcccatcacgtcatcctgtctgatgccctttggcactctgggctaatcctttggggccctcagacgccgtccccactgtcttagttgtctggtttgctctctctcttcccctactggattgtcaacttcctgagagccaaggtcacatatagctttagcctgtgtcccaggccttcagcatggtgcttctttgggcacaggaggtgtgtgcagagtggaaggagaccttcatttggtggggagactgtattatagagaagtagtttcatgttccaaagaacaagcaggaaatatcttccttctcctcctctttctgctagtaaatcctccttcctcctcactggctggatgaagcatctcatggtggaatagtttcagatccagggttcccaggaaagggaaccacctccagttccccatcccctttcctttcctgggaggtctctggtgcttatgctactaataatgaacatttaactaatgagttgctacctgttcatattaccaaagcctccctgccaaaggccaccagagacattcctggggtcaaatcagattagatttatggagcttcctgcatcacagggtaacacagtattgagggccatgacaacatcccaatatacaggactgggagaggcttttttacagggcttgagtatgatctggatgattctagaagaaatgaaagaagcaagggccagctctatctgatactatcaagaaagaggcctcccactataggatatctcagtggtctttgttcaggaggttggaggaactagttgaggctgggtaagtgcaggatccctgcccgtggaggggacatcagtcacgtttgtagcttccatgtggcctcgggtgtcctggcggagaccttggctctcctgtcagaagcttcctctgattgtcaacagggatgattttattttactctttatgctttcatctttcatatttaaaactttgatcagtctagaatttcttttgatataaaatgtgagggacagagccaacctacttttctattttagattgccatcaattgtcccaactccatttattgaatgataatcgcttttctctgattttcttgcctcctttataaatatattagattctatacaattttgtgtctatttttggacttttcattttgtcccattgaattgtgtctatccttgcaacaaagccacattgttttaattattatcactatattatatgttttaataacagaagtccctttccctcataccttattcctcttgcagctttttctagttcttcttgtttattttttatataaattttatcttatttgctatatgtcttttaaatatctgataactttagcaggattttagttgtgtaagaattacagaattttaatcctggaaggatgctgaggaggtttctaactctctcattttctggagaggatatgattttatcaaagtgatgctgtgagtttatggcagtgagaaaccagggaatccccaaccctgaacccacctccagatccactcgccccaccaagcctccagcttttgaccctgcatatttttaggtacccagaaattacttaatatttagcttagtggactgccacgatttaaatttgaccttttaaatccaagcacctccttctgctatgttgcttttagaagaaaggacaaagctgaggaattcaacctttgtttccatttatctcttagccttccgagacaggacgcaatgtagccaacaccactcctttgtctccatggtcaaagtcggaaggaagttctttcagaggggttggcttcattgatcttgtggggaaaatcttacaagtacccagggcatggtgtttgataaggaagtgagtggtgtgaaatccaggctcaagaacaaaagccctacaagcctgtacccaacggggccactggcctagaatggtaataaatagaattgggtgacaaccttgaaggtcacccgtggttcagctctggaggtgtccttgtttgtactcactttgagtaaccatcaacttataaatagcctcaggccaattgcccagtgatgattttgactgtcgcttgccaggggcctgggcttgtggtttggttgtgagtctgtcatggtctctgtgacctcagaggaggaggaaggaagatgatgatggatgcttctagtgatgcaagcaacaaacatttttggacaatgtgcccaataccattctctgtactctgcatgagttaacccttcaggcttcaaacaacgctttgaggtaggtgaggagactgagcactaaaaaggtgaatgcggagccagtgtgagcacaaaaggcctggttccctgctagaccgtgcctcctcttggctggagctctatggaaagagttggaaccagggagccttggttaaaatatcagctccatcccttatgaccttgggcaacttacaaatctccaaatctgtattttcaccttttaactagaataatgtatgtcaattatagggtgttaggattaaatgagaaaatgtacataaaacttttggggcattgtctggcactgggtaagtactcaatgaaaaaaggtaatggttttttaacttgtttaatgtttctaagccttaggttttccacttataaaatgaaagcgtcattatatatggtgcgtggctgtcttctcttttggtttggttcggtttgaggatttgtcggggtcacattaccgtcatgaccacctgtgtgaccttgagcagattccttaacccctttatgttgcagttgcctccactctgaagtgggggtcctgatagtggctggctcagggttgtgtgataatcaaatgagagatgcttagagaataagcatcggcgtctggcacagacgtcctcatcctccaagatcctgtgacttgttgcatctatgtgcttgacttagcccacaatccgtccccatctcccttctcttctctttgttctgggaatctttaaaaacacttgttgagcttggggtcggtttgcagaatcatcacctacttttagggtagtctgtttcatttggggtaaacatttaggtttctaagacattgggacagtgatgtttgacttcacatctattcatgtgctctcactgagctctgaatatgatgtttccattcccccatctatcagagatgacacagaatcatttatatagactcaatagactcttaggggaggcaccagccctgtctgtagcttcactacttctgagactgaggtggtacctggtgtatcagttacctgtttctggcaacaaattattccagaatttagcttgtgattttgttgacaattaggctggacttagctgggtggttcttccaatcttggctgggcccctgcatgcatccgtattcaactgcaggctgggtataacactgtcagattttggtgtcagctgggataactgggatgactcaaccctcttctgtactcttcatcttggtcctgttcacatggtggaggcagagccccaggcaagagggaaatgtacaaagccccgttagtcctaggctcaaatcgggcccaccatctcttctgcaggcaattggcaacgtaagccccagtccagcccagattcaaaggaagggggcacacatcttctcttgatgggaagaacagagttcactgcagaggggcctagtctggggagatgaagaaatgtggccgtttttgcaatttgcctcactgaccacatagagggtgactggccctgtattttatgtcatatgtgactctatagaaatgtgtctcctagctgggctttgcagagatgcagactctatctgtctttctgttgtgggctttctaccttgtcatgaaaaggccagaaaattcctgaaatgagtgtccttttcagtccttcaggtgagaggctcctcagggatccacagaccattgttttggcttctgtctccctctgcttgtcacacagggatcacatacacaggtggaagtgaacttgtttgcttcccttcccaaactgtaagctctgtgaagacaggaatctccttgactcactattatatcattggcacctagtaggtcactgtaagtataaaatgaaagagggcaggaaggcaggaagggagtgaatgagttaggaagttaggcatctagataggaaggaaatgagagaaagcctcgatggaagaaggaaagaaagacactggaggtaaacagttgggaaagaaggaggtgaagagatataaggaatttaaattattcttcaacaagctaggtatggggcaaggcactggcctttctgaacctcattgactgcatctgtgtgatggagtaatagtagcacctacctggcttataatgaaataatacatagaagcttttagaatagggaccatcactgatggctgctctagttgttctagtttcagctgatgaaggcactaggatcctcagcatggaagacacagcagcagggacagggggaaatgctgtgggtccaaggagatagtgcaggtgctcagagggtcatggagagagagaagcagcccaatgattgccgggtgctatgccattcagtgcttcttctaggcatggctttgagcagcaattggccaggcttccagaaacttcagaacaagtggactgtgaactctctgcaaactagatgctgtgatatgcattttcataattcccccaaggatgtggacaggtggaaataaactcccagtcacacaaaaccccaccacccagagagcaatctggttgacatcctggctgagtttattaccataatttttcctacgggtacctgtgtaaatatagaaactgtagacaaaattggaattgtaccactgatatggtttggatttctgtccccatccaaatctcatgtcgaattgtaatccgtagtgttggaagaggggcctggtgggaggtgattggattctaggggtggatttccccttgctgttctcatgatagtgagtgtgttcttatgagatctgggtagcacctcctgcttcattctcttcctccttctccggctatgtcttgtgagatgtacctgcttcccctttgccttccgccgtgattataagtttcctgaggtctctacagtcgtgcttcctgtacagcctgtggaactgtgagtcaactaaaccttttttctttataaattacccagtctcaggtagttctttatagcaatccaagaatggactaatacaaccacttctgctgtatcttgggtttttaaaattcacattattttgtgagtattttctcactgcctgagaattttggggtcaggcatttttctcttcaccgcttagacactcaatttctgtttagaaaatggggagagtaagagtatctctctcctagaagttgtctattttttttttttatttgagatggagtctcactctgttgcccaggctggagtgcagaggcataatatcagctaactgcaatgtccacctctcgggttcaagcaattctcctgcctcagtctcctgagtagctgggactacaggctcacctcaccacatccagctaatttctgtatgtttactagatccagggtttctccatgttggccaggctggtctcaaactcctgacctcaagtgatccacccacctctgcctcccaaagtgctgggattacaaatgtgagccaccgcacccagactattttgttttgacctggggagagttaaatgagttaatatccttagcccagttccataacatccactgtaagcttttctatatgttcctttatttaggaagagtgaacatagtgccaagttttacttagagagcagtgctctgcatgctttggtgctagcacacaataaaattaaacggaggtcaaagcagagagcacttagggattcccaaagcgtccagaacaacagtagatggttataaaggacagcaatagtacaatgacgctgcctccaagacgaagtacagcattaattagtactgggcagtggatggccaggctctttcagggctttactgagagcctctgaagggtggcagtgatgaagagtggggccatgagtgaccatctcaggcccgtcgggaagatacttttcatgtggttgacccatggcagaaggaaggacctgtgtcatccctgagtgtctgagcatgttggggctgtgcttcgggacatggggtttttctccctggtctcgttgggatgctcttcacacctaagcagggtttgcacattcaaacatgggccgtttgtattccagccagcattgctgagaaggccggggagcagcttggtgcatactaaggagcagctcctgccctggctctgtccacaccaggctctctgggcagctgcccatggagaacacaagccagcaacctttgaggagagccaggccagcatttgaccatttgaggctgatggaccctgggtggcagggcctcggctctgcttttgggagaccttgaaggctgatgcatttcctccccagccccactcttactttacctggattgctgctgggactttgagacagtccacgctttcctattgtggaggctgtgccttgcctgggggatggagactgaatctattggtgatgatccagtaaagggtctcagagttcagcagagggtgctgggattcaccccaaatatttgggcagagggagagagacaggctgtgaaacagaatgaaataatgatgtgataggaagccctgcaagcattggcccctttaattctccctaggactctatgaggtaaggactgccccacttaccaggatatgaaacaaaggctcagaaggctcagaaggtggaaataaatctcccgggtttgaccaggagcccagcagcccttccccagagcctgttgacaaacagtgcaggcatgtgcctgtctcagggttatcttccgcctgctttcttctcagcatgcgattgcatcatattgtattgattgctactggaagactgaattcagaggcctcacagatctatatcatgactttacggaaatagaaaaagaaaaggtatttttcatggtggctcagacttacttcttatccccatccttgcaggcagaggcccctaacaaatgtcaaaggatgactgagggggctttggaagccaggagacttggctgtagatctcctctaccacttcttagccatgagaccattggtaactcatcgaaccttcctgaacctcaaatagctgctattgctatttgttacccatgagaccaaggaaatagtcttcatcatgaccaaggaatagtcatgttctagacagtgcacaagctaagaaaggagcagagattagaaggagaaaagaggaaaaaagaacaagcaggacatttttcacctaagagattgacaaaaaaatttaatttaatcaataaattacccagtcttgggtagttctttatggcaatccaagaatgaactaatgcaacaacttatgctgcatcctgtgttttattaactcacattattttgtgagcattttctcattgacaatatcaagtgttggcaaacacatgtggaaacagctcttacaagtctcagatataaattggtatggccatcttgcagacacagtttggcaatatcaagtaaaattggaaaaacaaatgctttgactgtccgtgactatttctaggtaaggaggcttggaccaggatgttcatcacaatatcaacattgtgtgtaattatgaaaaactgggaaaaaatcctaaatgaccattaacaggggactgaatacatcaaatgtggcatattcttacaatgggacacttggcaatagttaaaagtaatgaactaaatttctatgggaggaaaatgaagtggacagtataataccatgtttgtaaacctacccaccccaacaaaataatatcatatatagcatgtcaatgtgaaatgaaaaaaagactggatggagagagaggggcagggagatggagagacaaagacagagacagcaagcaagagaatgtgagagctgtaggtatcagactaaaaagacacataccaaatctctgataattgttccttctgggagtgttgaatgataaaaaaaaaaggatttcacctttatcaggaatgcttcattatatattataatagttatacatataaacacacaccagatgatagcttcaataccctccagttttgtgcatttgatatatgattccttgtgcttttaggttttcttaatgttactcaaagaaattggagaaataatttttaaaacaagagatttatttgaggagcttagagaaggggaaaagtttggatatctaatgatttttattttaaggtcaaggtatgatttgactttgctctgtaaagcaattttcttttctccgggagaatgtttgcagcaaacatttattaattagctaccatgttcatggcccacagaactctccatggtactagttctctaccaggcacacaaataaatcctcagctaagtaagtttatcttggatgactttttctctcagtttgataagaattcagcttgccatcctctggcctagctgagccacaggatgttgaaagaagatcaatgctgcctggtaagtacattcagaaacacaacttcccccagatattccagtgtttctgctgatgcccaaatccctaggtcatgtcagctatgaaaacatcagcaaatgtatggagtattaactggaaaggagtgttgttgcttcttactttttataagcccagaagattccaagaacagggaaaatatctaaaaccaagtcagaaaaggacgtaagtgcagagcccattggtgactgccgttatctgctttgaaaccccaggagttggcgatgttgtttgcaaggagacagctatgcttcctttcttgttttagtcttgggctgagacaaatatgacatttcctagatttggggcccagagctacagaaaacatggccccaaaccaaaaacttcaaattttaagtcattcatccttgaggaatatgctgatacctcatttaccccttgtgactcctaaaccctggacatacctttttatgctattaaaagaaggcttctagttttgtttactccagtctcctagatgttgtcattccccttgaatctcctgagaggctggagattatatttggtctggcaaatggttttctttctaccccctttctccttacatttattgtaaaaatattttaatagacaatacatgtatatggttacaaaattaagcagcatgaaaaggtgcacactgccatcatgaatactcttatcatcatcatcacctttattggatagtgaaaagtctgtggccgggcgcggtggctcacacctgtaatccaagcactttgggaggccgaggtgggtggatcatgaggtcaagagatcgagaccagcctggccaacatggtgaaaccccatctctactaaaaacacaaaaattagctggccatggtggcaggcacctgtaatcccagctactcaggaggctgaggcagaataatcatttgaacctgggaggtggaagttgcagtgagccaagatcgcgccactgcactccagcctggcaacagagcaaaactccgtcaaggaaaagaagatgagagaagagaagggaaaagttaagtttgcatactaaacttgctttctggttgaccagttctccttccctgaggcaaccactgttacaagtttctttttcatgatttcttgtggatttattcgtgttattcacgatatgtgtgtttgtcacatgaatgatggcaatctacacatactgttttgtaccttttcttactttgtaatatttcttggagatcatttcatggagatggatgttggtctttctcagttttttatgtgttgcctgataatctgtggaaaaggttcttctccactgccctgttggttgacactggggttgtttccaaacattcatcgatgaatcagtgctacctcgaataatcttttaaccatgtatgcatctttattttcaggtttgagtttatttgtaacatatgttctgatgactgcaactgcaagaccaaattatatgtgcattttaagtttgtctagatgtaaaacattggcctgcaaagatattatatcaacttataaaaagaaaaattaatggcagcactgtttgtcaatgccctcaccaaactaggtcattgacaattctaaaagatgggtctacaagggtagtgcttaaaaacatcatttttggtttaggttcaagccatgtttacacttgaaatggtatgatatcttacatggtatgagagtgagcaggtgggggcatatctggaaagagatcagtgtgctttggtagttgttgaagtgaagctgagtgatgagtgcatggtagttcacgtttccatgctctgtacttttgtaggtgcttactttttttgttttgtttttttgtttttgttttgagacaggggcttgctccatcatctaggcaggagtgcactggcacaattatggctctttgcagcctcgacctcctgggctcaagggatcctcccgcctcagcctcccaagtagctatgattacaggtgcaccacactatgtctggctaatttttaaaaaaattttttggcgacggggtctcactacattgcccaggctggtctcaaactcctgggctcatgtgatcctcctgcctcagcctcccaaaatgctgtaattacatgtgtgtaccattgcgtccagctctttttcctttttataacaggaatgtccaagccatatatgaaacagatccgacccacataataaaaatatggaccataaatcatcacgagttgttttctccttgtatttagcaaaagctcctcctgtgctcatggcaggctgagtgcctggcccgtgtcttcgtactctgcacagtatccttgtgaggctgagatcagtgtttttatttctgtctcacagatgagaaaacagtggtccagagagattaagtaggtagcagaaccagggaatgcagacttctcacaaagcaatacactgcttctgcctgaccatcactttgcctggctgctgcctctttggctaccatctgtctgccagtctctggggacactagttactctgacagtctagctaccagataggctccagtaagatgggaaagacctggatagaaataaaggcattctatgaacattacaccagcaactctttttaaaaaatagattttattttttagagctgttttaaatttacacaaaaatcttacaaaaagtgagttcccatatacctcctctccccttcccagtttctcctattattaacgtgttgcattgtgtgcacatttgttacaactgatcaacaaatgttgatgaattattaactcaagtccacagtttacatcagggcttacacttgctgtttacattctacgggttttgacaaatgcataatggaatgtattcaccattacagtatcatagaggatagtttcaccgaccccccaatcccctgtcctctgcttctgcagaacccctggcaaccacagatcttttggttgtcactatggttttgtcttttccaagatgtcatatagattgaatcatgcagtatgtggacttctcagactgtattctttgactaagcaagatgcctttaagtttcctccatgtctttcctgtctcgatagctcatttctttttattgttgcttaatagtccattgtcgggatgtaccccaatttgtttatccatttacctgtggaaggacatcttggcttcatcccattttttggcatatggtcatttttcagtattttccaaatggttagatttcatacgtgaatctcattgctcttagaaggtcattcagatgtgctcctgacctggacccaaatggcctggacccactgtcatcacctccctgtctggcctcttctcccactccatcttctttccccactctgcagaccctccagcctccttcctgttcttttgtgcaccatgttggatcctgcaccttcatccttttttcttctttttattcagaagactctcaccccaagtcttctcacatccagatctcagctgaaatgacacatcctctaagatgccctcctgacccccttactgaaagggttgcatgctgccaagcaaatgtccctcacagactgctctgggatttcctttactgcacttttcactctctgaagtggccttgcctgtttagctggccatcatctgtcccccacctctggaatgtcagcttcgcagagggagggaccacatctggcttatccctggctgtatcctagccctagaacagtgcctggggcctcacagaatatttgctggataagtaagtgatggattgattagtctgactactccagtgcttctcaagttgatggctttccatctacacatattgtattcatccgtgaaaagagagaagaaaccaggaaaagcacatctccaatgatgagggttatgtctctggcagcctgtattttggacctgggtgggatcatagtgtgtgttcttgtagcttttgcctgagtttcgtctacatggccctacttatggagtctaagatggagctgacagtgatgtatcattctaaacaagcgtgttgttgcaagaatccatttcaaagagatcctcttttaaatgctacttctctcccttcctcttcatctattctagcctttgaaaggtgtttatgttgattctgccattctccattcctgaggcacagataagcatcataaatatgttagttttgaacaggtcctgaaatttgccgacataattcccattttcttgtcagtacttccaagcatgaatagccttttttttcggtatggtgaattatctacagttagggatggtttaaaggtatttttatgaggacgtttagtcattgggatcacttgttcctgagtcatgcatttattttaagtctaagtcttttgaaaggtcatttagatttttcaaaaatagtagtcgtatcgttgtctcatattctttctccttgcccattttttgcttttaacaaaggaaattattttcaaggaaagcatcttcagataatgcacaaccagcccaggggaaacctagctttatagacacactagtgagatcgttgtgtaatttgatgggggaaggtttgtaaggtttgtgttctgtgtagaaaatggtgagattttaaaccaaagtttcattccagttatgaaaataagacatgtgcatgataaatattttcagatcagtgaaagaaataaaataatttttacccatagttcttctagatatcattaatattttggtgtatttccttggggtgtgtgtgtgtgagtgtgtgtgtgtgtaatttcatcagactggaaactctgagcagtcagagttcttgtctgtcgtcctcattgctctatagagagtactcctgagaagacactcagtgccaatttactgactgaatgaaagttaagtgtgtgtgtgtcacatatttcaaaacaaagtctagatagttctctatatttgattttgtgtccctccagcaatttctcatttttaaatttttctttgaaaacatgatttctaaatagtgggctgttatttcatgggatgaaaagttgtgttggaaagccccttcacactggaatctttgaaaccatcttcattcatttctttacaaaaaatctttagcagtgaaattcttgggttaaagggcctgaacactttaaagactttcatacatttttgctaagtaaccctccagagagaagggaacaagtggccttcccatcggcaaggaataaaatgacccatctttttatgttcccattaagagtggctttaagggttctcttgtaatgatgcatttttgttgtctacattagacttgttgtccctagtttcttagtagcattctgattttgctatggtatgttttcatgttcagaagtttgaaaaattgttaggtcaaatttagtatttttttctttaagacttcattaattgctcctatacttaagaaggtctccatcaccaagagaaagcaacctgctttctctcctggattattttcttctggctttcttgtaggttccttttctttccacttcagctcatgggaaatgcatttgaatgtgaggtgtagcttcctgatcattctgggtagcccagtcactcagcactctcctgagaatagtcttttttttttttttttttttttgccactgattggaaatgcacgtcttatagtattcccattttttacattatactaaattctctttctggactttttattttatttgtctggatctgccatgtcttcatgttaactgttttgataactacagctttattatatattctaatatccagccaaacacctcctttattatatttttttcaattttgagagccattctattatgtgtatgctacaagaagaatattatgagttatatcagatcagattataaaatacaatgagaattacataaaagttatacaatcattttggagaactgatatttttaccaaattgagtaatcccattcaaaagcctagtatgtctgtcctagtatttaagactttctcttttttttttttttttgagacagggtctcactctgtcgcccagactggagtgcagtggtgccatctgggctcactgcaacctccacctcctgggttcaagcaattctcctgcctcagccatccaagtagctgggattacaggtgtgcaccaccatacccagctaatttttgtatttttggtagacacgaggttttgccatgttgcccaggctggtctccaactcctgaacaaaaagtgatccgcccgcctcagcctcccaaagtgctggaattacaggcatgagccaccactcctggccagtatttgagaattttaaagtcaatataattctaagtttaaacgttatggtttcttcccagggagcacaacaatttattacgagttttatttctatgtgtttaatgttttgcattggttattgcagatgagatttttgttttcctgttaaactatctggtgattttgctaacactagaaaaaaatactaatttggattcattcattttgtaaccttaaaagagtgattcatcttactctcttagtatttatcttattacttattatttaatatttatgttaaataccctcttagtatttaaataaaatagttttcaagttggttctcttcagttctctgagtgtagattggttcatcagctgctcaaagggtgaacaatgaaaggggtgcttcctgtgaaatgttcccatggggctcatagtgcacctgagccgagacactcctggttcaagggcagttctgctgccctctgtctgtggagaaggcttgtctgttgaacctctcactgccatttcccttcctgcaggctgtgagcccaagaatgaagggctgctggatcactggtctttctgttttgctgtgagaggaattggtggtggccccctcatgcttggcctttgagcctgaggagggacgaggatctaccctgggtgtccagttactctttgagccaagtggtggatgaagactttgggggtgtggttgactcagaggccagagctgaagtgagcagaaagagcccacaccaccttccaaagcaccaattccaagtcagcaggtgaccttccagaagaattgtgcaataggctttaacttttattgtgcaaacaagtttctcacataattaactcaatggcctccagatgaaaacagtgacattaagaccccactggcttcctctgaattccctgacgaactcaaacttttcccatactggcctgtagtatctggatttctgcaaaagacaatagggttgattttggagtttcagactgtggaactctgtcctagttaatgagaagagtctgataaggccacccagagggcaagtgaggtctaggacgctgcataaacaaattaggaaatgacagagaggcaccaaaactgcagcacgtttcagctgtgtgttcctttctgtgtctctctgattcaatgtggccagtgttttctggagacttttgcaaaggtgggaatggggacacatggcactgtgaccccatctaggtggttgggcctggaggctactcatcaacccaccacccagagaacagaccatgcattcccagctcccaggagccagtgctgctcccggttcctgcctggatcacattagtgttcatggttgttaagcttgttcctataaagagagccctctccccaagagctggtaattggggaaagaagggctttttttctgctttgcttgttccaatcttgtgtttttgcttagaatatgaacacacatggtcacacacatacatgaaaagccagaacaaccagaggaccttctgtttgagcacccagactagacgcacagcagggaaaccatgcccagcctggttccctggggtctgggctcttggttctttcctttgcgattgaggaggaggcaacctgctttctctcctggatttaaaacaccctctacctctcaagtcctcacatcatctgtggaccttatcctcagtgcttctctagaaatgtcttattgttttctaactaaagagaatatgaaatttatttgcataaagaatcttttagtaatgagtacaggaaaaaaaatagtccgacttgagctggtgtaaatgaagagaggcattgattggttcaccgagctgaaaagctaagggcatcaggcaggtggctgcattcagtgatgtggaccacgccagcagggctctgctgtcttgtgcctggctctgtgtccatctgatttggcttcatcccccatcaggttctccccataagggaggaaatgactgtgtagagcccctgactcatattctcatagcttagcaatccttacttagtgatacggtttggaagtttgtccgctctaaatctcctgttgatttgtgatccccagtgttaaaggtggggcctagtggcttggggccctccccatggtgatgagttcctgacagctggtagctaaagagtctggggcctcccttcttctttctctctcttgctcccactctttttttttttttttttttttgaggcggagtctctctctgtctcccaggttggagtgcagtggcagtggcataatctcagctcactgcaacctctgcctcctgggttcaagtgattctcctgcttcagcctcccgagtggctgggactagggggcatgccaccaagcctggctaattttgtatttttagtagagacagggtttcactatgttgcccaggctggtcttgaactcctgagcaaaaaacgatcctcccacctcagcctcccaaagtgctgggattacaggcgtgagcccccttgcccagctcttgctccgactcttgccatcgaacgtgcctgctaccccttcaccttccaccatgagtggaacttcctgaggccctcaccagaagcagacatcagtgccgtatttcttgtacagtctgcagaaccatgagccaaataaacctcttttctttataaattacccattctcaagtgttcctttttaacaatgtgaaatggactaacctgggaaaacacatattttaaattttcctaacagttccagaaaaagtcctggaatggattctcattggcccagcctggtcacatgtccatcccctgaaccagtcatggtggccagtgaaatgtgatgctctgatttgattggccaggcctacctctgtctgtacagctgggtcactggggtgacagatgggagcatcagctccatccaagccaatggactgctgatggggacagggggagttcatcaggataagctgggcacgtgctactgtagtgatctgaacttttgaggggctcacaaccatggtgcctgtgtctctctaattcggcatgttgatcatgggatagcaaagggacgctgcttatggaagttctctgggcaccagctggaccgaggcaccacatccacatatcctccacaatcacagaggcaggaagggggaacatggagaaccgtgccctggctgggaaagcatccgcccagaaggggcagatgccacttgcactcctattcagttggccagaataagtcccatgtgcaggcctgggttctacaggtggggatgtgtaattccctcccgctgagaggcacagagcatttgtgagtcataatagagtctgctttcggttgccctgctggtccccagatatttaggtcctgcttcatgggagacagccccaaagtcccactcagtcactactcacagctcattgtctaggatctttgggtgatgaatcattatctttacatcgtgtttggacatggctcttctttattcagagacttatgacaagtgatctgcccccaccatcaaacacctaagatttaatcttgaaacagggataggataactgcagtaaacgttcagaaaagggacgatgaactgtcaaatgatcgctaccctgaagttctcccatgcaaatacagtgacattcccttctctgggggaaagagagttccttcattgagctggtttggctccatgggactaccttccagtcttcattggccttcttcattggctttagcgccacctttctgaagtcttccctttttggttatccttgctggcggaatcaaaagaagatattggaagacatgctcttcatagagtatgagcaggtgtctcagcctagaaaaatggagacccagggattattttctacaacgttcagtctcttttattcaatctggtgatggcttggacaataaaaatctctcaaaacttttttggtcccagttggcttcatctgccaaaacacacctacagtttttctgagatgtaccttttccatagatctaagaccctgatcttgtcaggctcccataaaagagctataaccatggtccctttgccaatgaattttgtcctagtttgctaacaccacataaatccatttgggatttttaaccacaggtgtgacagcagaccaattctaaaccaccctttgccagttaaaacctttttggctttcttttgttgcttttctcattggttctaagaagccagggttttttttccaatcttacaaaactttgaagttctagattctcttttatttttgccagaccctgttatctgcatagacactttcccagaagtactggttatattattgaataaagagagtagtttgttaccttcatcttaggaagggcaatttggtgacttcaaatgtgagagttagcacctacttgggagtaggaattgtccttagtatgttttaggaagaaattagatttttcatgccttgagcctcccctttgtccaggatgcatgaaggacctgatgggaattctgggtggtgttgggggagatggtgcaggtggaacactagtttcctgaggttgactcagcactttccattctgctgagtcagagtctcggtgccttccttgattaggtaaagccatcccttggcatctctgaagtgcagcttataggctacttgtagtgatatgggacatggtcttttatggggtcatgtgtattttgtcatctggtccttttgcagaacctgttgtgttctgacattcctgagttggcagaggaaaaaatcaggtctcagggaacatgttggtaagtggcaaagtcagggttgttgctcaggtcttcctggcttgaggtcttttcttctttctatttttgcagattggtttctggaaagatttatttaaatcctctctagttcacccctattcttgaatcaaaaggcttatcttaacaagcacaaaaagccccatttattcaggtattataaacaagaatggaaaagatagatgtggcctcatttactcatcccattctcctgctttttatcccacaccaggagtctaccaggctctaagcagacctcaggaaggatggggctgtcagatgtgagatgttagtggtcctcattggactgtgactgggtcctggtttttgaagcttgttttgtttcttgggaggcagcaataaggtcaagctggggctcaaagcatcatcgtaaccagcaaaatggggaccacagcagcgagttcactggctaggccctttaaaaggcaggcacacactttcaaatttcccactatttttaaccagcttgcttgcttgcttttaaattcatgtgtggttcctggaggcacttgacctctttctacagagccttcccctctgctattttaatgaacagctgcatcaatgactccctaaattccaactgcatcttcttcatcctcattaacctttaccttggcattcaagcctcttccaggcctcctcctcctttttcttcctcacctctcttaccatggctttccctcacccacttcttgatgttcctgcatcataccttcctttatgggaatgttctttgccacctgtcaggatcctacccacccctcaaggtctggttcaaatgctacaccttcagaaagattttgggggaaaaataaagtcttttttctttttgagtctaaaagtattgcacactcattatagaatatttataaataaaattaaagtcattcccagtcatatcaaccagttaatccctacaaatatttgcatattttcattcatctttcatgtatacatatatacagaaaatatttataatactgatgccatattgtatatataattacatatcccaattttaaatatagcatgtgtcttgaaaattttttggtatcattaaatgtttttcaaatacataattttcactggatacttgaaattctgttctacctctcttctacaattatgtaaacattcctcttactgtttggttgtttacattgttgtgcgtaaggctttgtctctatctctgattatgtatgtagaaatataagtatttttgaacagcgtaaacttttttaagctcttgacacacattgccaaacgttttctcagaaaggtggtatttgttttcactcccatatgtactgtaagctcatctttccaaatcttttccaatctgatgagttgatttttaagaaatcaactaccagtttggcaaaaatggaaactcattacagattcccctcaacttacagtagggttttgtcctgataaactcatcttaagttgacaatatcatgtcaaaaatgcatttaatatacctaatctactgaacatcatagcctcgcctgtcataaatgtgctcaaaacacttatgttagcctacatttaggcaaaaatcatctaccacagcctattttataataaaatatcaaatatctcatataatttatcaaatactgtttaccccgtcaaaattgcaatggtttcacgccattgtaaagttgaaaagtgttatgtagaaccatcgtaagtcagggatagtctgtatttaatttgtttcttttggggtaacttgtagagtttaattttcttttttaagttgtttactgctatattttttcttctgaaaacgattgaaaacatttgtactcttttcaatggggttaagagaagaggaagattttgtgcttcttgttcattttaaagaggtctttatatattaaggacttttttttcattgattgtgaatatattccagagttcattattttacttttttatatgaattttgaatgaaaagttttaaaaattcttatgtaatttggactagccattcttttgttcttgattggttctatttcttttaagcttaaaaattttatcttaaccctgaatcagtttttttccctagattttctacaactgtacttttcaaattaaactgaaatctatcttagtgggggtatgaaagatttccagtgtgacttttccccaaatatctgattatgattctgctatgcgttgcattgttgagaaatgcttttcccattggcttatggtgcttttgttcatcttgacctaacctatcccatatttcatgtagatgcaccccatgatctgagtaatgacacttccactgtggccatgcagttttgattattatagctttgagatgcatttccaggtctgttagatactcttccttgtcatttttttatactgtggtcccctcccagccataactttgcacactctcgagagttccagtgactgttgcaaatgcctttaactcttcagctcactgtgaacttcttgaggacgggactcaatttgtcctaatcaactacacatcctctgtatcatagcccatcatagcattggccagatagaattcactgaaaacacatttgttatgttgattgtgcaatttctttctggtcattttctgggtgacttgtatttttagaaaacctacaatcaggtgtattatttgattaaatttaggaaagaaatatatgctgtatttaattggcttgtgtttctcagcttcaacccaagttaattcaactttcagtgttgtttgtaattaccagacatttagtacattaatgaagacttctttccagtagcccatttatatttactcttgaaaaatgatttacttttgatttcaaaccaaaaacattatcattctaatttctggattctctcatttctattttcaacccaaaacattccgttgagatatgaaataatattggatcagcctggaaggagaccttgggtgaacaaagcgagtttgcctcatttctcacaacacggtctagggtctgagttctcattttgaatcagggtggaggtgggaaaacagctctcctgggtgcctgttgaatgtgtgcctttttgggcatctgtttacattcatgagggtccacagaggcccagagaaattccaactacttgagtttttttttctatctacattttaacacttaagtcgattcctggacatatctggtacttcttgtgttttctactaggcataggacattactttgcacagagcaggtgttcaatagacacgtttcttttaatgtaaaaaaatttattgaatatgaccctcacataacaaagcagcccagtagtccccttgtgtacccccacccaggtattcccagagagaaccactgtcttaatttacatcgtcttgattagttttacttgtttttgagtcttacataattggaactgaacaatatgtaatgttttgtatctgtcttcttttgttcaacattacatttctaagattggtccatgttaccgggtttgataatatttcatcattttctttgctgtatagtattccaatgtgtgaatatattctcaatttatccaatctactgttaataacatttgtgttatttctagtatttggctgttatgagtgatacctctggtaaccttcttgagctcgtttttgtcttttgctttttttttttctccttttttggtaaagaattgctgggtcatatggcttgcatatgtttggcattagtagatactgtgaaacagtattccaaaatgtttgaaccacggtcaactcccacagcagcatggaagttctagttgctctttaatctcccccacccacccttgatactgtcagctttttctaaacaattttagacatcatgatacttgtatggaaatattgcattgtggtttaattggtatttccttgaaaacgaatgaggttgagctcctttttattttttcatggctatttgtatgtcttctttatgaagtacctgttgagttttttgaaagttttaaaaattgaattctaggaatttaaaaaatatatattctggatatgagtctttggttgaagttcctcaatgtgctttgcctttacattcacttaattatatattttcaggaaaagaaatatttaattttaatgtaggtccatttagcaatcttttttcctttttgtatcttatgtaaggagtatttgcctacccacaaaccataaagcttttctcctgttttcttctagaagtgttatttgttttgctctgaaatttggaatcagaattaattttatgtatggtatgagggagggatcaggaatcaattttcccatatggatatcccattgatcctccaccatttggtgaaaggaccattcttttcctactgcacagctgtgttcttttctcataaatcagtcagtacactgcgtgggtctatttctgggctccatgttctgttccattggcctgtctgaacttgttccaatagcacatcatcataattgttggagatttaaaatcagtcatgatatctgatagtggaaatcctaccactttgttttttttcttcaagatcatcttagtcattcttggttctagacatttctatataaaaatttgaattaatttacacacatacacataaaccttttgtaagttggattggaattacattgaacttgtgggtcaatttaggaacaaataaaatctttaaaacattcagtaatttggtctgtgaacatggtatatcccaccttgtatttaggctatttttcttttttctcaataatgtattctatgtataggtcttatgcacatctttggctagatttattctggagtattttatgctgctttaatgacatttaagttatctcgtttaaatataattttctaattctttggttctggcatatagaaatacaatttatttttgtatatggacttcctatgtaagaaacttgctaaattattctaattaagattattttggattttctaaaaacatttctctggagaaaaaaaggaaagcttcattttttcctttccgatccttaaacattttattccttgttgttctggttaaaacctctaatacaattttaaataaagaccttcttgtctcattcccaatctcggagggaaagatttgaatatttcatccttaagtatgggtttgcaatagattttttgtatatattcctcatgaaattaaagaaatttccttttattcctaatctgctggcagtttctaatcataagtgtgttaggagttttatcaaatgctatctctgtatttgtggaagtgatcctataacttttctaatttattctgttaatgtggtgatttccactgattatttttaaatgtcaagctaatcttgcatttctagattaaacctaacttgttttccatgttttgtctttctgcatttctctgcctctggtttactaatgttttctttaggatttctgtatctatggtcacgaaagataggcctgtcattttcatttctagtgatgcccttttctggctttggtatgaaggttatgctggcctcttaaaattgattccctcatgttttttattctctctgacacttgtgtaagactggtattatttcttccttgagagcttggaggaatttactgtggggcccatacatccttcatcagatactcaaatgtttagaagaggtgacatcctttacgtgaggttccaagttaagaaaaaaaatgttaaaggtagaagcagaggtgcctgtccatattttctcctagtgggaatgattcatttgtatatttatttattcagcaaaaaatatcctaaatgtttgtagcacaccagacactgcagcagttaaggatacagcagaagtgaaacacacatgcctgccttctaggagttcacattctggaccaaggagtgttttctattccagtttgagagtgtgtgtccatgcacctggctgtgagctctgggtccctgtgtgctggccctgcccctcctctggctcatggtgctcactccactccagggctccaccccatgttttcagtctccacccagacattgcttcgggaccttcagcaatgaggttccctgcccctgctttgctcttcccttcaccctttgtgtgtgtgtgtgtgtgtgtgtgtgtgtgtgtgtgtgtgtgtgtgtgtgtgtgtgttgtgacagagtctcgttctgttgcccaggctggagtgcagtggtgcgatctcgatctcagctcactgcaacctctgcctcccaggttcaagcgattcttgtgcctcagcctcccaagaagctggaattataggtgtgtgccaccatacctgtctaattttcatatttttactagagacggggtttcaccatgttgcccaggctggtcttgaactcccaacctcagatgattcacacacctcagccacccagattacaggcatgatccactgcacccggccctcttcactcttcaactgagagtcctgctcattattaatgtcactttttttagagaggactttcttggtccctgggctaaaggagattctccagtcccctaagctcagagcccccatgctcttctctcctagcatttacatgttcataattcacacatttatctgtatgattatttttgttttaatgtcatttgttgtcaccaaattgcgggcttcatgatgaaaacagttgcacctcttctactcaccaatgatactcttgtgcccaatgcaaaaccaggcacacagtaggtgctcaataaatgcgccttgctctccttcctttctaaagggttccagaaggccattaataggcaaaaaacgcaagcgtgggtgaaggctgaatctatcatgctccctgatgggtccccatgcccagcactgggtgctctcttagtgttagtaaaatacatgaatgaatgaatgagtgaattaatggatggatgaagtgcaattgaaatttattatgctcataaacacaaaaattaaatagatttactgcattaagattattttaagaagttgttttattcctacattcattttgtttccaacacaaacagtacataaaaataattatttcttggattcatgaaaaattgaaagggcccttgagtgtttatttagtgtattctttttggcagaattaatgatcttaataatgaaaacagcactgggtgacttttttaaattgaagtttttattgagataattgtaaatgtgcatgcagctatgacaaatggcagggagatatcttgtgtaccctttcctcaattttcccccagtgctaaactagaatatacacacctaattgggatactgacacggatgaaatccactgaacttatcccactgtctaacttaattcacatttgcagcactgtgctgagtgctttatctcatttaactgtgacaacagccctgtaagggggatagcattatcactcaggttctagagcctgggacacccgtgctcagagaggtggagcaactcgctcacagcctggtgcatgctcaggggtggagctggaatccccactggaaacccaccccccagcccgtgttcttcctggtgctggcgtaaaccatgatatatagatctgttccttgttagagatctctaaagaagaaaactacttgcttaacaaaaatgactttgctatataaaggtgtggtttttttgactattcctccagaatggcattttttagaagtctgaagtctaagaaaacctctgcaaaaattcaaggcacttaaatctttgatgaagcactcaaatgtattcatttatcatccagtctttcagtttcattgtagacagatttatgtcctttgtgatggtagctccatgtcctggaatggacctcccatccaggttcacagatacagctaagaggctggaaaaggtcgcaagtggaaggaagcttgggtttgtagtttcctcacatattcttagaagctaggggctggggaaacccagaagttaggtggtcaagggcaaaaagattctcccttttctgtctttcttccccaaaccttgtcacatggaagatttgaaatggctcccccaggcctgagtcctgggcagctgtgtcactgttggtgcccacctcccaggctgcttgctctgccctgcttggagaatgacaacttcttaagttgccacacagtacccagagccaccagttcctctcctggttgctgtgtggctgagactgaccctggatcatgaggcatcctgctgcccagcccatcatttccatctggtcctgttggggaggaagaaaatgcagaggcaaatgcagatgcagtatctgtggctgggctccagcaagacccctccaaggtctctgaccccagggccagtggtttcacccacctggaccatctacaagggtcaaatccagtgtgtgcagtgcctggaattagaggaaagagacatgcaggtacagcatcgtgaaaggccccttttgatgctatagaaaaaaaaaaaacctccaaaataattttaatcatgttcctatctttgtttatatttcattatggaatgagatctggttttgacttatattaaggtgacctgtttgaaattgccaattttgtgggtcgatgacagctgaatattggcagttttaaatggttcaatctaatgcgagttaaattaaaaccttgaggaatatgcaacttttcactttacacggctctgttttaaaaagggtgtcaacatatttcagccttgcggagatggcggcgtatgtctatcctgtgttgcaagcagctgtgaatggttgcgtcgttttgcttggcctacgcatgggcgtgttgtcaccagaaagcgtctctgctcctccaagtggtggcaagcccctcctgagagccattcctcatccagacaagaatccatcagatcttatgaaaatttaatgtgtgaaagtgtacagttgcatgagggtttttttcttttaaataaattagtttgcagcccttgctaacaccagatgaatgaattaagaatgcacctcccccggggctgtcgggctgctaaactgcatgctggggcgaaattccctttctcttattcttagctttttctttttttttgaaacagaatctcactctgtccaccagactggagtgcagtggtgcgatctcagctcactataacttccacctcccgggttcaagcaattctctgcctcagcctcccgagtagctgggattacaggcgcctgccaccacacccggctaatttttgtatttttagtagagacagggttttaccatcttggccaggctggtcttgaactcctgaccttgtgatccacccacctcggcctcccaaagtgttgggattataggcatgagccaccgctcccggtctcttagcttattcttaaggggaatttcctaccttttatttttcttcttgagagagtttcaaatttgccagaacctgaagggttgttgtgctttcagccaaaaggatgtctcagtagcctttagcccaccttcccccagggcaatggtagcatggaacatgcaacccctagcttacttgaaagattggacttgaaaaaaatcagcagttccttctggaatctgcaaggattggggaatttgaaagattcaggggaattagttcggcttcccaaactagttggttttagtgaccccttcttcttcccgttgcatcactggtgtgactgatgttaacattattgttgccccgttttacaaatgatgaccctggaaaggcttggagggccctggggctgcctaaggtcataggccaggaagaaatggagcctgtccgagggcttgcgtctcctcattctgaagcccaggctttctccatgttttcaaaatgccagctggttgcattttgtttttccaaatgatattgtagatgccagaaagtggggcctgtgtttccatttcttggttttcctgcccttccagctctctcataggaggcatatgatgagcacagggaacaggcatctgtgctgggcagacctaaaacgaggaaggggcaccgtgaccagttaccttgcggtgtggcacagtgctatcttgaagaccataacatctctcgagcaggctagcatatctggtccgaaaagtcgccatttctttgggtgggcttgtacaaagtggtccacatctcacagggtggtctgctgggctctgcaggcccgtgttgtgtccataatacatgatcaataaacacaaaagctgcccatcaatgaatccaggtgttcacccggatgggcgtgggaaactcagacaggcagaggccacgggctcttctgtctctcaattcctgtcccctttgcatactgggggggcacttgctgggggtagtccagtaattttatctcatggtgctccaccagagaccatggtgctgatggcacctactaagcgcaacgctgtgcttgactctaccctctgagtgtgcccactcagggctggtctccctcatgcagcccgaggcctcctgccaaagtccacttcaaggggaagccgaaggtgcacacaatcccctacgtctcctttgatccaagtacatcagctcttccaaattgtgtttgccgtgcattttttttccagaatcctcttaagaaggatttaagaatcttgccaaagtggccacttctcctaaaaacatctaacccagtcctcgcagattccagaaggaactgctgattttttaatttatcttcagtcatttgctttcggaagggaacatttattgtgttgaaaattaaagacttgataaaaaatgtttgctttttgtggtgtccttgaaaatcgagtgattttcacccaggatttctgtagtgggtgtcaggcaccgtggatttctgtactgggtgtcagggaccgtggtacaccacggtgcttagaaaaatggatgatggaggtggtgctgtggctggctagcatttattaacattgttattgccaggcaccatgtcaaccctttcctatgcattagctcatttaattcttacagccactatttgtggcaggtactagtattatccccattgcacatgacaggaaacggaagctcagagaggttatgtaacttgcccaagtttgaacagttaataagagcttgcattcaaacccagtccattctggctcatggggcccaagccttgctctgctgccccaggctgtgtaggatgcatctgcggtggccattcttctctccagaggtccttcctaggactgactttgtggagattctgtgctggtaggtggcggggcaagacacgcctgtctctccccctggaaggagtcagtccagcaagaaacctgatgaaaccagtgactcccagctctgggtgagacatgatgatggggcgatggtgggggatgtggcagcacaaagcaactttgtccactgatgtcgggaacgccttttgaaggaagaaaagtgtaagttgttacccagagtagaagatggccaggccaggagttgggaagggggttctagaaggcaaagtgcgtgtaaagttcttgaaactagagatacctaaggaatctagatgaggccagtctggttggagcaaagggtgatgagtcgggaggctggagagtgacaaggaccagattgcgtggggaggatactgctgcctgggggcttcccatcctgagggcggaggaacttgaacacagtagttatttgctatcaactgaaatgtattgagcccctgctgctctgtgggcatacaatggttggacaaacagacaaagtccccgttctcaaggaacttgtattccaacagaaaagaaaagaaatacacaagacgacgtcaaagagtgacaagtggcccaaagaaagtaaaacaagggcccagtcagggtgactcacgcctgtaatcccagcactttgggaggccgatgcaggcagatcacaaggtcaggagatcgagaccatcctggctaacacagtgaaaccccatatctactaaaaaatacagaaaaattagccgggtgtggtggcgggcacctgtggtcccagctactcgggaggctgaggcaggagaatggtgtgaacctgggaggcggagcttgcagtgagccaagaacatgccactgcactccagcctgggcagcagagtgagactctgtctcaaaaaaaaaagtaaaacaaggtggcacctcagattgaactgaggaaggtacaggaagccactacagtgggtgggcagggtgggcacctctgtgcagtgggcattcaggggtgaggagtcagcactgtggcagtgttgggagaaggtattcctggcagagagggtggctgattggaaggccctgaggcagcaacaaacagggcacgatcagggacttccctgtgcagtcagcgtggctggaatggagggagcatgatggagaaggcaccaagtgaggccagaggctcctcagggggtttggattggatccttaatggaggggtgggaggatgccctggagggtttcagcacaggacggcaaggcctgctgtgcattgctggggatctctttgcttccataaggtcagtggaccgggaagtggccagaatggcagctgggatgggcaggggatgagggggacactcttgccatcatgcatgccacacatgatggggagtgggcttgaggggcagccatggcggaagaggagccctcaggggtttgggagaggttagcaaatactcatgcttgttttgggaggagcctctgctcacggtgggggcatgggggtggtggtgagcaccgcagcttgtaagaggcaagcttgtgtggctgctgggtcccacgtgctatcagatggactcctatatggtgtgctgggaaagacgccctgtggctctcaaccagctcagcctatggccctgagagaggatgtgggcaggccctgaccatcttggttttcttccctttttttcttttttatttatttctctttttctttctttctttctctttctttctttctttctttctttctttctttctttctttctttctttctttctttcttcagctttattgaactataattcacatattatacaattcacccttatacagttcacagttctgtggtttttgctacactcacgggtttgtgcaactgcaccacagtctaattttaaaacactttcatcatcccaagaggaaaccccatgtccattaagtgctccctccccacttcccctttccctacccctggcaaccgtgaatctactttctgtctctctggacacttcatacaaataggatcgtacagtgtggggtgtgctgtggcagggttgtttcacctaacaccgtgttttcaagttcacctgcattgcggcattgccagtttagggctgatagtattccatgatacatagaccatactctctttatccattcatccgttgatgggcatttgggtttctttcccactttgtgtctattatgagtagagctgctgtgcatattcacgtgcacatttttgtgtggacacctgttttcagttctacgggatctactcaggagtcagatggttatatggtgacccagtcttcggggcaagctcaggagcagaatcatcgtacggtgactcggtcattggggtctactgaggagtcgaatggtcatatggcgactcggtctttgggcaatggtaaggagtgagaatggtcatatggtgactcggtctctggggtgtggtcaggagtagaatgttcatggtgactcggtcctcaaggtctgctcaggagtagaatggttacatggcgactaggtctttgtggtctgctcaggagtagaatcactgtatggtgactcgatgttgaattatttgaggagttgccagactccttccatgttggctgcctggtctgcatcctccccactgtgtgtgaaggctctgatttctcacctccttgcccacaccttttattgagcctgaacacctttcacatggtcacacctgacctgagcagctgcccggccatagtgccaacacatccctggccacgagaggtggcgcctgggctggccaacgtgcaccctcagggtcgggatgtgatctagagcagggcttctctcattctgttcctgcccatgttcatttcaacccccaaaaggacttgagctctcaggcttaatttcatttacttaatgcatgaaggaggaaatgatttctgaggccaagaccggagtggtccccagggactccatttcaacagtgtatttaaaccaccacgtggaggttgcttgctaggctgggaactgtgatcaaagaacttccaatattttatgttcataaaggcagtttgagagtaatgttttttaaaaaggcatctgaatggggaggaataggatcattgtgaggtccacagtctctttgcctttgaagtttgcaagaagctactgaatgagttccatgctttgtaatactctggtctgggcaccctcaggcgtgcgtggccggcagggacctgtaggaatcctcttcacctggggagatttgaagcctagtgcatataaccagggccgtcacccaatgctgtgtgatcctgggccagtcagttagccttttgcagttagctgatcgttttcacctcagcttgaggcatctctttcaggaagtttctccagttccagtacacgctctcaagcgactctccccctctcctcaaaatgcttacctgcattttcatgatgcagctatgatgtgcaacattcactaattgatgtctgtgaaccctggtggctgtgtgccaggtaggtatgtgctcaggtgtgctgtgtgctcagtgaggctgtgaacccacgtgggtgtgagcccaggtaagctgtgtgctcaggaagctgtgagcctaggtgtgctctgtgcttagtgaggctgtgagcccaggtgggtttgagctcaggtatgttgagaggagggtggatgtgagcccaggtgtgctgtgtgctcagtgaggctgtgaacccaggtgtgctgtgtgctcagtaaggctgtgagcccaggtggatgtgagttcagtgaggctatgcactcaggtggctgcaagcccaggtgtgctgcgtgctcagtaaggctgtgaacccaggtgtgctgtgtgctcagtgaggttgtgagcccaggtgtcctgtgtgctcagtgaggttgtgagcccaggtgtcctgtgtgctcaggcagctgtgagtccaggtggatgtgagttcagtgaggctatgagctcaggtgggtgtgagcccaggtgtgccgtgagctcagtgagtccaggtgggctgtgtgcccaccgaggctgtgagcccagatcggtatgagcttaggtgggtgtgagctcaggtgggctgtgtgccttattgaggctgtgaacccaggtgggctgtgagctcagtgaggacagacaccacacctggttttgctcatgggtatcaccccagtacctggcccagagcagatgattgtcttgatttgggttttggggaggtgaccctggaatgaggatttgagagcaagtaatttataagaaagctgtcccaggagaagctggcaccagtgctgggaaagtggcacagggaggccaaggaggggtagtatcaggcacagctgtgcaggggcagttgcagcctgaccctgagggtactctgagcatgagtgtgtcagagtttgtctctgctgaggccaggggctaggctacattcttgccaccaccagtcattggctctcggctctgtgcaggaggacagagaggctgagaggctgggagttggcctgtaggggtgcccttaggggcaaaagcacatgggagctgggaggctccacagccttggactggaggggtgggcagagcactgacagtatccgcttggggtcaggccatgtggatccagtgttctactccgatcctctccgacaggccttccagaacagggtgtaccatgtgctccagcacgagggagacgtgcttctgatgtcagctatagcagtgcctccagggtcgatggcacgagcccagttgacaatccccacagccagatgctttgaaatatgtgatccttgataaatttttaatttagggtaattttaagtttgcatattgcatgagactttactgctctttgaaatctgcataaatcacagtcatgctgcatgtttgggttgtcacttggcatactggccagctttttgttggccccccaatcctacttctgctaagggctggcctggtgtgtgtgaccagaatgccaggcccagaagccaccagcactaagtcaatgggaagtgctttgctcagtgcagagctgctgctgctggaatcactgcaccacttattccccatgacactgggcctcctcgccaccaggtcaagccagactcaagacgcaggcaaacggaaaaatgcagaactgtttgctccttctccctccctggaaacccctgctcttataggttggctttgttggtccagccccagcttcttgacttggtagggagttccacaggatgaggacatgctttttgtgtttttctttgcactaaactatgtgtaacatcaaatttaccatttcaacccttttaaagggtacgattcatgtgtgccaatcatgctagatataatttgcattttcctgaatattaattagggggaacatcttttttatatgctgttgacggtttggatacctccttttggaaggtgttcccggactttgcatattttccacagggttatttgactttgttcatttgtgggagttcttttgatattctagaaactggactatgtccagttaaatatgttacaaacatcttttcctgcactgtgttttgtcttttcattttacagtgtttttgattaaattcttaatttaaataaccaaagagtacagttcagtgctctgtgcagtgagtgcagtcacattgttgcaaaaccatcactgctgtctaattccagaacctttcatcacctacaaggaaattgtgtgatactcctcattctcccctcctccaagcccctgataactacgcatctactttctgtctgtatgaattggtctgtgctgaacatttcatgtaaatggaatcatacgctgtacggacgctatatggacttttgtggccggctgtccccatgcagcatcatgttatcagggtccctccacactgtagcaggtgtccaggcctcattcccttttatggctggggaatgttccatggtctggatagactatacttgatgtgtccatttgtccgctgatggacatttgggctgtttttgctttaggtcatactttctgcctgatgtaaaagtgccagtcgtgtataaggactgtagtcagcgccaccatgccacagcttagagaagggatgggggaactactgggttgtcagaggcgccgttcttgaccctcagagactttctgtctcctggaggagaagtggctgtgttgggcaggtttgaatcttgagaattcacggtccctgggtttgaggcctcgctgtgccacttgatgccatgtgaccttgggcaagtcacctctccctctgagcctcacttttctcacctgttaaatgaggtacttataaagccgaatagcctaattcaaacattttaagtctgaaatgctctgaaattcgaaacttttttagtgttgacatgatgctcaaagaaaatattcatcagaacattttggatttcaaagttttggatgctcaactggtaatgcaaatattccaaaatcagaagaaatctgaaatccgaaacacttctggtcccaagtgtttcggatcaagaatactgcacctgtaacacctgcctccttagtggtgtgatgattgcgtggaatgagacatgaaaagggctcagcccaaaatcgtctggcaccaaatacccaatggataggggattttgtttattttgttgttactgttgttgaggtaaaattcatatagcacaaaattaactattttaaagtgtacaattcagtggcatttagtacattcatgatattggcatctgccacatgtgtctagttcccgaacattgtcacatcacatccaaaggagatcccatgcccattctcccctcccacatcccgcggcagccaccactctgccttgttgagtggtcttctgtgactggctcctttcgtttagcaccatgatcttgggggtcatctgtgctgcagtgggtgtcagtgctttcttcctggtaagagcgtaacatggtgcagtcattgtggaaaacaattgggtggttcttggaaatgtgaaatataggattactgtatgagctagcagctccacttccgggtatctaactaaaacaactgaaaacaggtattagggggaaaaaaacctgcacacgaatgtccaatagcagcactgttgttcacaatagccagtatgtggagacaacctaaatgcccatcgacagatcgatggattaacaatttccatacaatggactattaccttttgttattattattattattatagctttcttaactcctattgattttttcaaaagtgacctcagctgtcatctcttttccacaaagagtcttacctgagtctggagaccattcctttttctgaccacagaaccccgtcttaatctctgtcctgcctcttccactcattaattcattccctgattccttccaaagtatttgttgggtgcctgctatagacaaggtcactccagtggggagggaccgacaacaccaagtcagctgaaataacagcaccgtggagggagtgtgtgccatgcggagaattttgggttgggtgggagggtgcttggatgtctcactgttgctctgatggaccaggaggagatgtttgcaatgaaacccaagtgataagaaggaggcagctttgcaaaggtggaggagagcctcccttgaggggctgcttactaggatccggaggtggggatgagcctggggaggctgcagagaactgtgaggttggagctgctcacagggagaggtcacagggctttgagggccaaagggaggcctaactcctgtggaagccactggagggtttgaggcagggtaaggcggggtcaggggtgtatgccatgtgacccgaagggagggcattgcgggaacctgggagcgatgagggagacctgggccgggggagtcagggcagggcggatgtagcaaagtcacattgtcctgagtgaccattcacttggctgtccccgctcccaggcctcaggactgtgagggcaggcactgggtctcaggcccagagaagatgctcagaaaaggaaaaggagaccggggcacgagtgagccagtgcagtgtgcagagtgagggggcagtgggcaaagaaattgcatggcccagatcactcactggagaccagagacaccttagtgtcccaggatgatgaagagcgaggggccagagctaggggagttagtgatgcatctgctagccgggctggccctccctgtgggcacagagaaagtggttcctcaacagccatgggtgacctttaaggatgcccacagatggtgccatctcaggagaagggtcccagagggactggctctgtcacctgctgtcagctgctcccggaaagcccgcactgcatgacttgctggtttgttggaatggttccatcttgctgtgtcacttccatgacaatcaccagaggaaccaggcccaggcaaggggcctgtgatgaagcgagcagccctgatgacatcagaaatgcagacagttccagacattcaagcatgatgtccttggctcttgggtgaaaatcctcctcggtgtgtcagggaaagtcattgaattcacgttggacccggacttggtaaatcttcagaagcacgctctattctgcaggatttaagcttcagatgggcctagactggtatgcacaggtagggactgtgcacttgagcacagatggaccttcagcccatctccttttggttctcatatacttgttgagccctggctaggccctcctgagctctgtttcagggcctgcagaggctgctgtacaggtcacacttggtctctgctctcacggtcaagtagccaggatggacataaaactaatgaacacatacatcaagagctaattaaaaattgtgctgaaggccatggtggaaaaataacaggaaacctaacaggtgggtaggaagggtgagaccatgagggatgaataggagttcatcagagaaaagtgttgcctccagagggaatggcacagaaggcagccctattgtgggaaagcacttaatgagcgaggagggccatggtggtagagaagcttaagaaatggaggccagggctctggggttacagtgggggttttatatttcatcctaagagccactgtgatgtcatgtggggagcaatataaggccctgtttgcttgcttgcttgcggggtaggcaggagtggaagcgggaaaccagggcagaggctgcagaactgtacaggtgaaagtgatgctggactgcccccaggggttagaagtgaaatgaagataagagatcaggatccaaaaccatttattctctccctttttcttcttggggcacccagtagtattttttcccagaagacatttcttaaaggatcacttaagccaggaactgtcaaatgcacaaaccaaatgcactttctactagtttttgcaaataaagttttattgcaacatagccatgcccattaatttatgtcccatctgtggctgcttcacactacagcagcagagctgagtggcggcagcagagactgtgtggcccgcaaagcctcagagttttattatttggccccttacagaagacatttgccaattcctgacctaagcaaagtgagtgagggacgcattttcaaaacacaaatctgttggcttaaagtcttcctagcacttaaatgcatttaatccctctgaaaaatgctagagtagacacagtttttaaattgacttttgtttttctttaaccttttgctgatattatatataagaaactcaccttatgctttaggtttagaaagtcagggttggaactcagactttgaagatgttgtgtgatattatttctctaaatttctactacaatactaaagtctcctgatgtgttatttcactttttgtcctttctctgaaatgctcattttcctccttttctgtaaaatataatctcagggaagaagtttgtaaaagcagcttttagcctttgcaaagatataggtgggcctcttgtacaataatttttataagagtttgttctttgcaaatgcagatgcatcctactaagccacatacaaaaaaatcatcacaatgatgacaacaacaaagccaattttccagattccacctttctccttcctcatcctcttcatgtttgaatttgtgctgccaaattctatagagcattttcagatccacttgatttacagatttgagctgaatttcacttggaaaactgaccatatgtctggcaggcaccagcgaccattggcagtactatagggttgatactaaacagatgggctttctagttagatgtgctgttttttccacaatacatatgagaaagaaaagaagccactttaataatgtcttgatttttccactggtgtcagagtcatcaatgatgcccatttatgtagtcttaatttcagcatcattgcgtgcagggtgccttagacagctagaagaagcttaatgacttgggaaattttgaggcccaacttctgcctagatcttagagaatcttgttatctttggaatacagatagtggataaaagacttttatagtccaaaaataaattattaacactatttgtcaggaatacattcaaagttcttagtcctgggtttattgctcaaactatttgacagcttttgtggggttattgcagtctaggcagcaaggtgtaaatagcggttgtctgataggtctgtttaggaaaatctagctaaacaactgaatacgatttcttcctgcagaacttctcagagcctatactatgctaatatgcactggggctctcatgaagagggttttagtacagacagcattttctaactactttaatcctctcagcatctccctatgctagagttccatggaaaacactttgggaaacaccggtgtcatgcctagatggtaaactgaagagcagagaggctgcggcagacctgccatttaccagctgtgtgaccttgaacgagtgctttcgtgctctgagcctctactttttaaatgtaaaatggagctgaaaatataggccctgcctgttagggttgtttgcctggaatgaacatgcagaaggttttggtggcctccctttgggcattaaaatataagttctcctaaaattaagtatttattcaattcacaattttccaggggccaattattcactctgaagcttagccaggcttttgtcttttcttctctgtgcttcttagcacctccactaaccagtaaaggagagaaaggagatgccctttgagttaagggctgctgagggggcagccagaagaagccatggccaacatgaggtctagaggtggctcgggaattgcagttaccttccactgtcgggagtcagtgggacagctccaggccattgttaaaaaccattgccctgcatttgattctgcttccatttttgtatcatgggatcaatccactcattcatttattcactcgctcactcatttattcaacccacctgccaggcactgtgctaggtgccggaggaggaagcggaccctaagtctaggaattgcattgtgcagttgttgaggtctctgtttcccctatactggaaaagtcagcagttagtccatcaaacaagggctataatcagattacagattttgatgaatgaacttgcagggctgtagaaaaaagcctataagcttttaggaatagagccataggcatttagcagtattttcttcccttttttgaataaattcactcctttttttttttttttttgcatccctccctgccctccacccaacaccagcaagcagtttattcctccattataagcagtgtgactataagacacttgtcaaatggtctcactttgtccttggatggtatgacccttgttttgtttttattgatcagcacacccaaaatatcatgctcttcagtcattacttaggaattttctaggggtggaggaggtcaaaccaagaacttttacatttgggagattgaaatctatttctaaaacttgattttggaggttcagctccattctggtggtcactctctgaaaatgcccagcactttttctgtagatggctgtcaagccacatctcttgcagcctggccacaggcaattggattttcagtgctcagtgcttccgtgtgaggttattgtatgttgctttaaaggttaacttcttcctcctcccagccctatttctccttcctcctcccagatcttagacagcagtgttatcatctgctctgtgtcatctagcacaggactgggagaggggcggagttgtcaaagaggctgtggggttaagatcagggcttttacagcagatgacctgagttctaagctccactctgtcgctaactagcatgtgccctggggtaattatttcacatctgtgtgcctccattgtcctcatctgtaatgtaggtgatgaaaatagttcttcgcttgctagggtcttgatggaatacaatgagcaaattcatgccaggtgctcagcactgagcctgttgcacagcaaatgctcagtagatgcttccgttgctgatgacagtgatgacaaaaacaaaccttcgtattccttggctcttccatatgtgtgagtgcccccatcctctgccttcctgccttcagccttgttccccctacagtctgccatcctcaccgagattccacgtggtcttctcacaaggctgaacttgctccaggtccctcaatgactccacattgtccccaggactcttatcacagccacacagctcttcttggtcaggtccccacacgccttcctaagctcacctatgtcaactctgttccatagaccataagctccagcctaagggtcctcaagttccagtgcacagacccacaccagcaaattaagaacactaagagcaatgcagttgggttttcatttacgaatgtagaatcaattaatttttttaagagacagggtcttgctctgttgcccaggctggagcacagtggtgcaattcactgtaacctggaattcctgagctcaagcaatcctcctgcctcagcctcctgagttgctgggactacaggtgtgcataaccacaccgagctaatttttttttccttcgtttttgtagagacagggtctcactacgttgcccaggctgggcttgaactcatgccctcaagcagccctcctgcattggcttcccaagccactgagcccaggcctaaaaattctgtttgtttgtttttttctgagactatattttttctattatgtgtactaagttgtgatgaacatagatgattgctttgtgtagtgtgtgtgtgtgttggccattactgccataatgaacattagcatatctgtgtggatcccaattttatatgtggaaattttactgggtttctgagccttagagactggggacctcagacctagcttccccaaatgactccccattccccaaacaccatgtactgccatgcatttatgaatttgcacgttttactaaaatcctactcaacctctaatacccaactcaattatcactacctactacctcccctagcttctagtagccttcttagagttatcccaccctcaagcaggaaaagttgcttcctctgctattataatcctctttcttgattcttcctggtggttccaggtaccttagttttctcagtggtcactgagtcccccgggagagagggtacctagcaccactttgtccctcaggcctaacactgtgctttgttcaaagacaatggtctccacgtattggtgttacaggtaaggactcaaagaagaaatagaggtcatatctcagcttcttatttgcttctattgtggctcatgtcacattatgaggttgccttacactttctgtgttccttcttttctcctccataaatacatgagcttcatgcagcgggaaactgcaggcatgttgatggaatttactgctctgtcaaaactcagagcagtcctgacacacagcaggccctcagccgatatgatgaatgggtttgtgagtgaatgaataaaacaaacaaggaaaaaattattttgcaatattatctgatagagatggcacctttcttctctaagaaatcagccatgtagcacatggcactgagtacctgacctcactcccccagagatatggggctttccttccaatatgtttttggggaatttcgtgaagtggaaggataagataagatatcttagtggatgaaagatgaggatgaaaaaatacctgatgtcactaaagggtggacatcaaagtcagatggacgaggaacagaccctggctccagcgtttggcagccctgcactccggattcacagggtcgagcaggtgtttatttgggcagcccctgggtgccaggaaccagcaaagatgcgagacccagcaacaagcacgagagtgacggttctcattgtcatggagcttatgtttgttctcatgggaaatgcagatgacagtcaataaatagtgaatcccagggcacaatctgagagtaatcagagctaggatggaaggaaatgtgaataaagggattggccctgcaccaggcatggaaattagcctgtaagctccatgaggtcagtgttccgtcagtcctagaacagttcttgcctcatagctctgtgtggctgttgatgggggaaagggatggagttagttacccagggacaagtataccagctactgtgagcctgagagaggcctgggagagggctggctggagttgccaaagaggctggagcttgtcccttgagttgcaagcatgtgacatcagcaggggagggccagctgccccatccatcatctgaggactgaggctgtgtgtagcacttcctcacacagatgccaggtgtgacagacatttcccattaattaacctctaatgcctcagaggtggcagaggtgcagtggaacctggcactactgttattcagaggctggggggtggctgctaatgtgtttgcaccttccagagtctctccagtgtgagaaggcagttcctcaggaactgcagggagagacggggagagaattcctggagtggggggaggtgctcccatctgtcccttccctctgtggacaggtgtgcatgggccacatgcacccgcccacagatggcatcccacccatgcaggtgcacacccacccacgcccatgcacactggctccgcaggtgctcacccgcccacccgtgtaggtgcacacccacccatgcccatgcatgctggctctgcagttgctcacccacccaccctcagagatacacacctacccactctgtgcacacctgcccaccagcatccgcaggccacaccgtgccgtggatgaccacacctgccccgctgtacacctgcagtgatgggctcatgtcctctgcccttggaggggtttgtaagtagttttctctgagcagcactattttgaagtttctcttcttgggcggagagtcatagctctcacaagccctcccctggcacagtcctgggcttgagccaccccagggaaggcagaggggagagggaatttcctcccaagggggatgcagagcagcacagcctggggcccctgggcatggggtcttcactcctctgatgacagttgagccccttgaggagctgcttagactaaggcatctgtcctggtcaatgcattggatttttggtttaggagcaaagggtcttttgagctgaagaccctctagtggctccctgctgaattctgaatcaggttcaagtccctgactacgaccctgcctgcctccccagcacatccacgcctctcaaccactgtttcctcctgtcttggacagcctgcccctttcccatcatagcccctgtcctgttccccactggggcggccctctggagcacccagtgctgaccctgtcacagtcggtcagtcgacacctgccctcgaggctccctgaggaggccctgggtcctgtccttcctcgcgtctgtggggatcctggttcagggctctctatgtccccctggcacgtgcctgagctgttgctggcactggagatacagctgcaaacatccatcaagggcctgcagtcaggagcttcagctcggggcatgggcaggaggagtggagacaactacaaacaggtaaacaaatgagtgtgtgcgtgcatgtgcgtgtgtgtgtgtctgtgtgcgtgcatgtgtgcgtgtatgtgtgtgcgtgcatgtgcatgtgtgtgtctctgtgtgcatgtgtgtgtgcgtgtgtgtgcatgcacaccagctgatacctgtgatgagaaaaataaagaggaaggcaagaaatagtgaggagtgccatcccacatggggtgagccaggactgtctaaattcatacctttattcattgttcatctcctgcaggtgagtacagccccacaaaggcaggcatcgtctcttttgttcacctctgcacaccctgtgcctattaggatacatggcacatggttggtgtcagtacgtatttgttgaaaggtggagtgagtgagtgagtgagtgagtgaattcttaaagggagagaggagtgcagtctcctcagtggccaaagtgctccctcgccagccctcagctctgctgtgaggaccactgtgtgtcagagacggggtgggaaccccagaacctgctccagccactagggcagaagtggggggaggcagctgattaaaatagtgcaggtagtgacggtggtcctggcagtgatggtggtagggagggggaggcgccactgcccctcctgcccaccttccaccagtggaagcagtcacatagccacagcaagaaggagacaccataccccccagcaaggccctggcaaaggggatgcagggagtcaatgcttcaacctcctgttagtaagtggcagggccaggaggggagcctggggtgcctggtcccagcccccatgttcttcacagctacgtcacactggcttccatggcacatggcaagcactaatgcacaataaggatgataataagggggagggagcagcagagcacagagagctgcacaagtttagtgattaacttggattttgtcctaaatgagaagggaagcgagcaggaagtgatagggttagagctctatttctaagacatcggatcacaggaagaccagttgctggggcagggatgctggtactggaccagggttgttatgatgcaggtggcaaagaaagttgggttcagggtctgatctgtagtttattctgtgtgctactccgttttgccttggctgctaggaagctcagggcacacaaataccctcctctggagcccgtgtggtgtctgtcgtggggacccacctaactccttgatgctgtggccctcagcagaccctgattcctccagatccttcctgacactcccttcatccttcagctgtgtatgtgtgtttctggtgattgctgccgatcctttgtgaaggaggtgagatataaataaagcaatgattatgctccatcctcgtctcctctgctcatccctggagatcttcgtcttcatcttcagctgagcttggaggcttggggagacctagcccatccttcccctcgtgcaaagcatgctcaggacagcaggctttcccagggccatgtggagtcacagtcttgctcccatctggtgtctgtaggtggaggaaggaaaggagaggatgagaacatggaatgcattgtctctgagaagagaaggatccctgtacatccctctgcctcccgtggccttggggagagggtggccgggaggatctgtggttaattggtgttctgcagctgccctggttccacacatttcctgggctcccactgggtaccaggcactaggtgctggggtcgcctcaaaaacacagtggaggatgccattgctgtagctcccttaatggtttgcagagcccagaatgtcaaacaagacattcctgggcttgtctttccccatggggctgctttgtggagcatctgtggacacagcacctagcacagttaacacttgtattagtccgttttcatactgctacaaagtgcccccgataaaacaaaaaagaactgcccaagactgcatgatttataaaagaaagaagtttaattggctcaaagtttagcatggttggggaagcctcagaaaacttacaatcatggcagaaggtgaaggggaagcaaggcaccttcttcacaaggcagcaggaaggagaagtgcagggcgaagggggaggagcctcccttataaaaccaacagatctcaagagaactcactcaatatcatgcggacagcatgggggaaaccacctccctgatccaatcacctccacctggtctttctcttgacacatggagattatggggattataattcaagatgagatttgggtggggacacaaagcctaaccatatcagcactctattagtaatgcctggagagaatgacctcatgccccaacccacctagggtgggcctggtttatcctcttgtcttggtgtcccatccttctgtgttctgctttgggtcccctcgatgcagctttggaaggtgagaggggcctctggagtcagggtgctcaaggtcctgccctgccacagcatttcccagctctgagaccaacaaaaaaatggctcagggctctgatcttcagtttgttcatctgtaaaatggatataaaatggaatgatctctagctcatagatttattgtgaaggtaaaataggacaatgccttaggatagtcctggccctgcacaggcagtgaccagcgtttactccatcatcattattctattgctcatatcatagaaattattataatataaattttgaccaaaagttacctgcactggcatggtatgttaatcagagtgatgataaagtctagacatatagataatattattttacatggatgataacatgaactattaataaactgtgtattgtggatgtttatctttgttttcagattgtttttcattttaatttttttttagagacagggtctctctctctgtagcccaggctggagtacaggtgcaaatcatagctcactgcagtcttgacctcctaggctcaagtgatcctcctgtctccgactcttaagtagcatgcaccaccatgcctggggaatttccaaaaatttttttgtagaggtggagtctctgtgttacccaggctggtctcaaactcttgggatcaagggatcctctagccttggcatcccaaagcattacgattacaggcatgagccactgtactggccttcccagaatttatgaccacactgagtcctcccctcaaccttacctatcagggatgattatcatggcatcttttttttttatcaacagatgtggaaaccgaggctccaaggggccgggtggcttactcaaaggccctgggttagagacaggtgcagccctttggaagccagaccccgtggaagctctagaggctgccaggcaggccgcctgtcactgggggcacagaggtcactgccatgtggggccttgggccctcgggtgctgcctcatatggctcttctcaggctgagctctgcagagcccagattcagagcaggccgtcctgggcctccttggggcagccagtggcatgcatgggtgccttaggtgggaaatgcgggagtgtgaccccttccctgggtctgaggggcctggcccatcataatccccggccccttggacactggtaatgccccttcccctcgaacactggtggtctccttccctgtcctctctgacaaaggtgacctccttcctcaggtgagcccttgtgttagccacaccgtccagcccttctccctgcatgtccatgcttcctggggctctgaggtctgcatcagcttagggctcccagccccttccacaggtaacaaggcaaattcacctgctggctgtggaactgaccacgcgctgaccatgggaggctgagccagctgtcggggagtgtgtatgttcgcagggcgaggggtcctggcagaggtctgggctcctgtggtagcagccgtgctggggagcaccccacgggtctgcgatcttcctcccccagcgacactgggaggttaaatcggagcctggttgggactcaggtccttgttgctgccagaagaaacgtcccttccctgtcccaggaggcatctggggcaatgtgctcatctattctcagtcctgcctgggtgacggcctgaactctgctctacactgtgaccctaggatggaggtgacgctggcttactttgtgagcttctctaactttaccattttgttagttgcattttgtttcattctaactaatctttcctactaagggacacacggcttgtgctacaaaaacagcctgtgaagcacatctccctctctcccccgcctgccaacagccagggctccccatttctttctttctttttttttttttttcttctttttttgagacagagtctcaccctgtcacccaggctggagtacaatggtgtgatcttggctcactgcaacctttgcctcccgggttgaaacaattatcctgtctcagcctcctgagtagctgggattacaggtacccgccaccacactcagctaatttttgtatttttagtagagacgggatttcaccatgtcggtcaggctggtctcgaactcctgaccttgtgatctgcctgcctgggcctcccaaagtgctgggattataggcgtaagccactgtgcccagccccggggttccccatttctttggagggcccacagacattttctctccacacaccagtgtgtgcctgtataccacccctgttcgcacactggtggcgtgtgcgtgtgaatttgtgcgctggggttttctttggcctgattatctcagatcagtttcctgtccgtgcttggagatccactttctttctttctgcatctgcacacaggtggttgacaggacagacgatgacttacccagtccccctgtggacgggtatgtaggtcggtatgagtctcttttacaacaaacagcactgccatgagcttcctaggacgttcatcttcacgtgtcccagagtctacaaacatggccgtttcatggacaaggaaggggtccaggagcactgcttcctctgcctgctcacagacgtgctcacagacgtgctcactctgcagccgtttgctcagaattctcaccggcctggctctgcgttgggttccaaggctgccccaggcctgggctctaccctagaagaggtggcagcctggtgggagggcaggcaggcagaggtctttgcggctcattggtgcctgcataggtagcttcatgggcgtaagacaagggagtgaccctgtctgggacaagaggaaggtaaagactctggacaaagtcctattcaatggaggagctgaagtttatgaggcagagaagcggctgggagggagagcagcgtgggtggagggcagagcacgagcaagggtcctgggcaggcagcgtttcatgctggaattaggaacatcttcacacgtggcgcgtcatatggcggaaggcgaaggcttctggtggccgtgagtgggtcgcaggagggagggtctcacagagggaaattcagcgcacgctgctgagctgctgcggccactgtgggtgcactgctggacaaccatcctggggtccaggctttggggggatcactggtgaccccttagggtgagaggtcatcaccttgggcccccaggagtcacataggtttggtggccacttgaggacccccttggttttcgtcttccagatgagatggaccaaacgcccccggcgcgtcctgaatatctggtctcagggattcgaactccccctgtgaggaggaacagcaaactggccaccctgggcaggatcttcaaaccctggaaatggaggaaaaagaaaaacgaaaaactgaagcagacaacgtcaggtaaaggcctggtgacaggcgcgggcaggctgtggctgggaccagcgtccttggcatggtgctgcggcccctgctgatctgtgacttcctggcccctacacaggaggggcagatgtgcttcatggcctgtgatggccaggagccatgcaagttaccccgctggcccctccagggcccacctggcctccctgaagccctggggtggagttggcaccaggcaccccatgtgggacgctctgcccagaccctaaggtgcccacaagtccactgggaccttgttaaaaacgaagcctctgatttacttagggctgggttgggccgagacactggctttggagcaaggtctcacttgctggcttcacctgggtggtgagcccccagcccacgcgactcccgcaccacctcacctcccacacctgcaatctcacttggaggatgctggggcctgggtcgtacccccacagatgcaggtttagttggccaagagcctcctgggtgactcagggttgaggccgtcggtttggctttgacacctctgggcctctcttcttcctgaaagacagaggctgctcccctgctcctaagctgtctcagtgtgccttccctacaccctcccaccaaagcatccagaaggttcctccactcacctcctgctgccccctcacaccctgccagccctggctctgtgggaagcgggattgcgatggctggtcccgttgcccccgcctcctcggaatccagcttgggaactgcagccatgaggctgaaccacagacagggtggacacaggcagtgatgacgggacaagcagccgtaaggcacataacggcagaacacggccccccagcatttggcatggaggagccaactcaaccctcagaacctcctgctaggccagcactcccgcaggatcctgccccatcggaagggatggggaacaggcccagaaagggaaatcactcacccagggtcacacagccagcaggtggcggggctgaggcttggaccctggcagccgggtgtggtggctcgtcagcctgggctctgcagatggcagtgttctgagaagagagcccggaggaggccgcatctccaccccagggccccgcctccagccacatgcctgtgagccacacctaaaaacaattagtgagggagctgctgctgtggaatcagtcccaggcctcaggaaccagccctggcgagtgcccgtctcaggctgttgcctcggggggtccctggggtcccatttcctttccagctctgaagaggcgcaggctccagggctttgaggatggtggagacgaaggccaggtgttacagcgcccaggcccacagcaggggaggcggccaacaccgacagcaggccctccactcatgcttttctgtgtgctttacaaaattattattattatttttaccaaccaagaagttgatagatgaattcttgttgaagtggaaacagaacaagcatcatcattcggcagatcttgagcacctcctgtgtgcccagtaccaacaggaggggcccaggccctgcccacccagagctttccgcagagtagggagtcgagtgacaaagtgtggaagccaccaagtgaaccagcacgtgagtcgattgcagactccggcgaggctgcaaggcagcctccctcactggatgctaggctcagctaggtgggcgggttccatttgttcccctgcatctggcagggccccttgcacacacacggcactaatgggctcttagtgatccaggcttaatggcaggatcacggagcaggccctggggggtggaaatgagcagggcgggcactgctttgggcccagtggtccgagaagacccaggtgaggaggctgcattgagctgagatgtaattggttcattgagaaaggcagggaagagcatggcagcagtgggaacagccctcgaaaaggcagcgagctggggaaggcacgtctgtgcagcagtgaaaggccgggggactagagcagagtgacctccgtgacctcaggggggtctctgacattctccaggcctgctgaccccagcagtggaactggaaggctgaggtttgtcttctgaggactctgggctctttggcctactccaagctgtgccgtgtgagttcaccagcaagatgctctggggaccctgcaagggcattggaggtctcgaggtttttacctgcagcatccccaccttcaggaccgccattcgggcatctggaaattcgaggaacagtgctgcattttgtttacttattccaaaccactattttcctttaaagcagggggtgttatttgtttcagcatatcaaattcctgatttcacgggcatcacgggttaggatgagttgaagtgaatgcaaagatgattgaaagagaaatatgtagcaaacagtggttttggtaggcgaggctgggggaaccggctgaagatggctctcaggggctgcagggtggaccagcatctcagtccatgcctgccctggcaggtggctcagatccactcagccatttacacactgtaccaccttcacaagctgcaccaccactgacgtccccatccccgagagggggagggtagagcctcgcagctgcatctttgggtcatcgggaagtccttgagtcagtgcaggcaaagacctgtgatgtctgaggctagccaccatgagcaccgcctggtgccggcctggggacggggtccacacagagctcgaggcctccacccctgttcttcttatctgctttgtgagcctggctgcagcctctttgctgacacctcccaaggtcagcattcactttgtcaattttatccacaattctggcacctggaaattggcttggaaattgggaccacagaaaggaaattctgttttctctgcccaaaaatgtccccaccctgctgtgtttgggtttcccttttcatcctttggctttagggtaaatatcctcagggaagccacccgggaggtcaaggatgggatgggtttccccagacaactgccccccagtcagtcccccgccccaggcctgacttattcctcctcgcccacttctagacacttgccatctgtcctcccacctgtgctggcatcaggcagaggctgtgcctgtcttgctcatggcagaatctcctgtgcctgacatggtgcctggcacacagtaggtgctcagtaaatgtgtaaggggtttccatagattgaacacctgatcaccatggcctgttcccccagtggagccccacctgtgaaggctgcagggcttctgccctccgtgactccccagcacccagctcagcacttggcacatagcaggtgctcaggaaatgcttttgagtaagtgaaataattccattgccagtgcctgtttgtcatctgcctccccaactagacattaagctaagccaggtgggctgactctgtctgttccccggcagctggcagggccccctgcacacacagaacactgatggactctctgtgatccagggttaatggcaggatcacggagcaggccctggggtggaaatgagcagggcgggcactgctttgggcccagtggtcggagaagacccaggtgaggaggctgcattgagctgagatgtaattggttcattgggaaaggcggggaaatcatcacagcagtggaaacagcccttgcaaagctgcatctttcaaagaaagggttgaggtggttatgtagtcttgtatttggaaattggggctcacctgtaggcaaacagttttcctgacggaaggaagaagatgattgtggagcagcccgaggcctgcctgtgaaagaagggagaatgggacaaggtggtggccgtcgctcaagagtgttttgctccgggaaggggaggcagaaagggctattctgaaggcggaattgacaaagatttggcaaattaggcttggtggaaggggactgggggctggcctcctcccttcctgtccatctggtagactggaagcttttaacctgggtttattggaagaagctctagtgggagagccgcacaggagaatctcatctgtgagtggatgttaagagcggccaggaggcacttcgcaaaggcgaacaggaaccacggaaaggagcccggggtgttggcggcagagggagggcactttccttggttggtaatttagggaacatttggtgaagggcaggaatggctggtgagagctagcttagagaggggcgttatatgtgcaggggctttccagataaatcacagaaatgatcgctgtagaatatctactgcgtgcactgctctttagctgtggtttatgcacattgcttagcagcactcttggtaagaaagttgggcctcgccagtggactaggccccctaaccccgaggcgcctgctagctcagtgtttttggtctgtaaacttgagcctggcattggctgtggcttggacagggcccagtgacacctttgcctgagactcacctgtgtgtttgtgtgttgggcagcgctggagaagaagatggccggcaggcaaggccgagaggagctcatcaagaaggggctgctggagatgatggagcagggtaagtgggacccgtccctggcttggaagggcacggtgctgggaatgcagaatggaaagtctcacatgagcccaggaagcccatcagaaacagtgtagaatccaaggagggccgtgttcagatgaagcctgcaaggttggagagacaccccatgtcaggagccattccattggtccagcccccaggggcacgggagaccccattactgagctgaagagctccccctcatggcaccactcctctctggggaatgtctaacagagctgggtgtgcatgaatctggtggtttatcccaattcctttaaagtggtagcagtggttttttcagcattaatttttttttcatattcacatttcagtcctccatttgggcaaattatttttaattccactattacctactccccctaccaccatgtaggaagcattcaggacatgctggggcggggtgggatattgtgcacgccctgtctcattggtcttcccagcatccctggggagagaggcagcggctatcccacttgcagacgaggcgtgggagggtctgggtggtgactgccccaagtcattgcagcctgagagcagagacacagaacaaatcctgatctcttggtctctggtctagagagcttaatctcagtggggtctacataatcatctttgtttccatctttcagaaaggccagttattatcactcatgcaattaactgaacagagttctttaattcccaagtctttctctttgtgatggattcctggaggtgtgaggcccaggacttagatgctgacactagcccttggtgccttccggttccctgagaggctaaatcttggttaggaggtttcacaacacctcactgcctctggaagactctctggagctggaccaagctctggcctgctgatttgaggaatctggccatgcatagccagtttcctgaggcttgcatggatatattgaattcctctctccccacttcagccttaaaatattactagtgtctttgtaatttggcccaaatatcaggaattaggaaggaagctcatgaaataaacgaatccagattttatgcagccgggcctgtcagcacacaaacccgattgtgggcccaggcttttgtcattgtttcctctctttagactcgaagagtgaagtattttgatgatgctatttttaggggaaatctacatgggaaattgcttcatagtgataataaaaccttacatgtgcgaggaaagcttggtgtcaagtcccgtggcactcagatggttaacgccgtcgtgacgctcggatttggcggaatgcggttgctgagctagaaatctggaggattttcactgggatgggacaaaaaagtgtcaaactccggcattttgaatatgttgccaacaagcatacctttggatcttagggaaggagaaaggaagatgaaaacaatgctaaggccttttctcatctattctaaaaaaaacactacttttgttgagtaaagagtaagtatatagatttggttcctctcaaaaatgaagctatagtttgactaattaaaggggaaaacttctaggagcgttggcttttttccactctgaatttttgcaagatgactttgtctgatgaagtcatagcagaggctggagacgaatgcttggccgcggccaggctgacagtgtggctctcaccctgctgccgtgggagcctggtctctggcttccgtgcctctgacggcgacatcacacacccgcaggcttacagaatcactttagatcagggtcggcaaaccttttctggagagggtcagatagtgcatatttcagggggacgtgcagtctctgttgcaactacttgtctctgcttttgtagcgcaaaggcagccggagacaaaacatgcatgagagggcatggctgtgtcccaagaaaactttatttatggccactggcctttgaattttatataattttcatgtgccacaaactattatttttcttttgatttttttttcttttgtcaaccatttaaagatgtcaaatccaggtgggggagctggattggtccccacattgtggtttgctcatctctaccttccatactctctctcttgctaaatgattgtggaccagggactagagtggcctgaaacacagtctctttccttgagagggaaaatgcactcctaaattgatgccatgacattttattgagggcccactctgtgtcagggtctgtgctagctgctgaggacacaggtgagcaaaatactgttctgaacgcacatccagtggggccattaggtaatcccacaaaaagccggcaactcacgaccacagtgagtgcagtgaaggatgcagcaccctaagatcatgagacaggacctgacctggttctcggggggccgggagatgtttgagtcaggtccaaaggtgggcaggaggacctaggctggttctcagagtctgttgcatattaggatcacctggagagatttaataaccctccaccgctcaggcagcagttaaattagatgcgctgggcgtgggacccaggcagcagtgcttcctcatcctccacagctgattccgactttgatgcaggaaggttgaaaagccaagagacagaaggaagcggggagtgacttccagcccacaggagcagcaagcacaagtccccgcggtggaagggaccttgagatggtgggttgggttggaggaaaggaggaaggaggaagcaggaaagggagaggggcttgggtcaagacgcctcccgtcttccctgcccacacaccggctggggtggcagaggcatgaccacgctgctgcgggagcctggggcggccacagtgcgagtgggtgggatctgcgaggagcccgagtgtctctgcagggaaatatcagggaccgggcagcaggggttgctctgggaggggacttggacttgcttttcgcagtcgactcttctgtgctgcttgaatcctttactgtgtgccacctgtaatcaacctgtaatcaacgtgctgtaataacgggatccacgcagatgcttggccacaggctcccggctaaatccttccctgcaccgcagtttccgtcctgcactagcttcaaaaatgtcttttctcactgggtcgacctgaggtcagaccctgtctgtccctaatcctcctggtgctgggtcaccgggtcctcttgcaggatgactggaattgttggcggtggctgtgcacctgccctctccggctcaggggaggatcaggcttgagggctgttgctctggggtaggcacgcagtgccgccgcctctgctgtggatgtgaggactctccagggtgaggagcagaggcgctttcctggctttggggttaaggaaccggcttcagggttaaggaaccggcttcagccaccgccttccactgctggcagggacgaatctgcagccgggggcgccctcctgtggccggccaggctcatgagcctccctgcaaggtggacgggacttcatgcaggacaggccctgtgaggctgtgggagtggattgtcagggactccagagcctcatttgagccccctcgaaactcacatttgaacttccttggccaggacaaaccccaggattgccctctgccctgcacacgcgcatgtatgcacacacacatgtacatacacattggacaccctggagcttgccctgaagcaggtgggcagcctggtggagtgagccggactctgggcagggccagcagaagagagcccgccagctcccgggggtgaggcagcatccagggcatgagtttgctccctctggggtgttactttatgatcgatggtctgttttatgaaccactgtgaccccctcccctctcgttcctgtgactctagtcgccagcttggacctaggaaggaccctgctggtggcgttattacatgactagatgtgtgcagtggagcccgttgtgccctggggagggcagaggggacccctctgatctcttcagtgctccttccaccctcgtctcggatatccgtgactaagtgaggccagaccaaatctctggtacaaggggtccccttccccagcccccttgccctggtccccagcccacgtttctctgtgctagacactgtttatgttctgaatgactttcctccatctccctgtatgcgttgacttggcattttcttaaataatttaaggaatttcctaccccgtcattgggtataaaagaagagagtttattactctgtgctgtgttcagtgacttgagattgactaggcattctttcctcagggaattggacagtgacaaatcaagtctatctggtttccatgtggtaggaacgccgggggacacatgtctgcacgtgtgcacacacatgcacgtgcacctgtgtgcacccacctgtgcttgcactgtgcacatgtgccacgacacacgtgtgtgcctgcgtgtgcatctgtgagtgtgtgtgcatgtctgcaacacgttccctctcactgtggctgctcaggtgcactgccccgcgctcccctctgcagccctcagaaggagagtggccgggcggaggctggccttccagcgagaggagcagggcctgggctcccaccgctcccccaacccctccccaaccagcgtttcttagcaacggccctgccaccagggctattttgggaactgaaacttttcactgaacatgattatgagctggagctctgaccgcagcccagagaagtcctgcaagaagtccttgcagaaaacctgcaagaaagcaggggaaggttcaaagactgtggaggggcatggtgcttttctgagtctggagacctctgggccttccaggttctatgttctgacctttttatagtggcagttgtgatgattttgatgatgacgatggaggcatccttattattaacagcagtgacagtcatggcagcaaaagacctgtgcattctaaggtttggtgtccataactgcaagtggtgggtggcagccttgcctgtcacatagggtaggtgtgaagctcaagctggcagagccctgtgctcccctacgccagctctcacattccctgtgtgttgccaggggctgggtaagctgtgctgtcacggttgcacgtcaaatgcgagtaagtcggtcacgagaaggggctggtttcagttttcagctttgtgacctctaattttgtctactcggtgagctctcttggcttgtatctgggttggtgggctgttatagccaagggtcaaatgtggctcaggacctgtttttatgtggtctttgagctaagaatgctttttaaatagaaaagactttcataaaaattaaaaaaaaaaaatcaagggttgcagcacgggggatacagcacgtggcccacagagcccgtcacaatggccatctgcgccttatgggaagagcctgccagcctcgcctggacctctgggcaactgacgcggctgcatggatgagatcgtccagccctaaatctccagacttctggcatggctgaccttttcattctccccggaggagacgtgtgcggcagagggaatatgatcagcagcgatgacaagctcaaatctcttccagggtcccaggcaggaaatgggtctggcatgagtcctgggtgtggtgaggactctggagggagaaacggttctgtcctaagcctgctgttagcagatgggcccaaaggtgcagaccaaggggccagatcactcttgtcaccctcctcttctcgttgtcagaaaccatcaccaacaacaatgacagaaagcacatgtaaagtgcctaccttatgccagacacattccataccctagctccgttaattctcactatgttgccatgaagcaagcagaaatattatccccattttatagataaggaaattgagatccagaggaatttgctatttgggcacaaaacaccgtttgcaggtggtgggacgcatgatggggtgactgtatactgtttgtccaaacaggacacttttaggagtgaaagggacactgttgaaggacacagggatggcaggtaggaatcgggactgaccaggtcctatggaccctgaccctgaagtaaatgttgcctcctccttccactgccaggatgggacgtgtgtggaaggaggtcagcgtaggctagcatccccaaacggccacctcgtggctgtgtcgacatgtgcaggtcacactgccctctgcaccgggcctccaggaactgctgtagagattgagaggagtcctgcagggctatgtggaggctttgtgcatggggctgtaacgtgcatctcagtgacgtgactgtgacttgctggccgagggccctgccatcctgcagttgggtaactgagccatttattttgctctccaagtgctgagcccctcagcattaaggtgcaaacccagggatggcaagtgaagggccagaccctcagaggctgcagcagccgagcttcaagagacggaaagcaccaggtccttccttatgccctgctagtgcctcctcttctgggaaggctgcctgtcagacctagggacccccggctctgtggcccctccatccatgggtgtgccccgttcctgggctcacggtgccatgtgtggtcatctgcgtggcttcctcagagtgtgagacccctgggggcaaggactgtatcttactaacctccaccttgccagggtttattacagtgccagacacgtagccggtgatcagtaaacacctgtttaatgcctggctgagggtcaaacggtgggtgcagaggtgagttggttctctgcagccatgacaacccctgcatctcagagacctacagcaatcaccgtttgttgtcccctgtctgggttggcctgtgatctgccccgtgggtctgctgactccagccagctgctgggcatgtcttcaggacaaaggtccagggaaacaggagggacgagcagggatgtgcaagcacttctcatgccagtgctgcatcatacccactgtgtcccatcgaccaaagcaagctccagggcagaggccggggtcagagtggggctactgcaaaggtgcacggcagtgggtgtggacgtggctcaggggcactgcagtctcccacaggtgtcggaggaagagtgcacacagggagtggagtgtaagagcagaaaccaggctagggtgtgctgaggtgcccagggctcccctggaaagtccagacttggagagggactcctagggtgtgtggtgagggggagaggggtgggggaccacccagagcctagaatggatacttctcagaaagactcttgggacgacggaagggatgaaggaagggaggtgcaggcccagctgacagctacatttccttgtagatgctgaaagcaaaacttgcaaccccgatggaggaccccgatctgtacagagtgaaccacccactcccaagtcggagacgctgacttcagaagatgcccagcccggaagccccttggccactgggacggaccaggtctccctggacaagccactgtcctcagctgcccacttggacgatgcaggtactggctggagaccacgcgaagttgagctgctcctagaatggccatacgtccccactgttgtccttggctatagcttaggcaacagccctcgtagaacattgttctccagagagctgggcccgtgctctaagcgctgccatgctgtgctgcctggctgggttgaagtgtttgctggggcacttttctctactgtctctttccaagtctggcacggctgataagtgaaggtacttaacgatgttcatctccctggcacacctaccccccctcccagggcgtctttgtgtttccctgggaacttctaggcaggaaagtgctctctggaggggcaagtgcccagtggggggattttagtgaccctaaaagggtaggaggtagggttgagggacttttctgtggccgaaatcctgccacagggggcctcttggcctaagagatgctgaagtccctgcatgtgtgcatgcctgggagctggtcggtgctgatgcagtctcagcatgctgcagcctatgtggggctcttccgctgcttcttgaggggaggtgggcttggtgccttgctccaagcctcagtttccctctgttaaatgggaaaagtaatggacctacatcagggttgtttggagggtgggaggaacttagcagtgtctgacgtgtagagtgactattatcaaaggcagtaggggctttgcgtagtggtggtggtttttattttaattgaatagaccagggcgcttcccaaggataggggagaagggaggaaggatagaggggaggaaagcaggaactggccacagacacctgcagatgcttcaccagctcctcctcctcctgcccacctggcagagtgattcttacggagcttcactgttgacttggaatcctgatgtctcgtaaaatttcaagctataagcgagtctcacacggtttgggggtgggaaggtgaacgcgtctctccgtgagtgtgggaggttggaaatccaggccccaggacagcctgctgggcttctgcttcagagcgggtggacacctggtcctccgtgcccgggacttccttctgccacacaagggtggcaccacacactcgcaggccgcccgtccacaacgcccctgcagcgctagcggcacctgcccagaggcatgctcagccctcttcgggggtggccgtgtctctccagtttcacttggcttggaatttggggtctgagagttgtgacttctggagggtcccagctctcacgcagaggccccctccacacacacaggtctctgtgtgccccaggcatctgactttggggctggcgtggttctttttttttttaatactttaagttctagggtacatgtgcacaacgtgcaggtttgttacatatgtatacatgtgccacgttggtgtgctgcacccattaactcgtcatttacattaggtatatctcctaatgctttccctccccctccccccaccaagcaatggcaacaaaagccaaaattgacaaatgggatctaaactaaagagcttctttgcagcaaaagaaactcccattggagtgaacagacaacctacagaatgggggaacatttttgcaatctactcatctgacaaagggctaatatccagaatctacgaagaattcaaacaaattgataagaaaaaaaccccaccacaaagtgggtgaaggatatgaacagacacttctcaaaagaagatatttatgcaacccgctggcatggttcttaaggctgagcagagcctggccttcctgccgtggtgtggtccccacagcccagcccttgtgtgtggcctgtgagcctccccaagggaggcagggctgctgctcccagcccttgatgggggtcacgcttctccttggcagtgatttctgtagctcagctcagggcctgtgcctgctcccctcagtgccctcttctgacctcagacacgctcccgctctctctccagatgctgggtgtgcggatgggttcctgagagcagagtgggtctgttgagattacacatttgtatcagggaccctctcctgagtgaggcctgagggaggagtgggaatcagctgggcagagagcgaggtgcagagcatcccagaaaggggaatgacatgcaaagacaggggacaggaacacacacgttttctgtaaagggccagagaggaaagagcatgagctctgcaggctggaggtgtctgacacagccactcgcctctgccccctggtagcacaaaagcagcgtcggtggtgaaagggtggggctcttgtcggtggaactttagtgattaaaaacaatccagggcccggtgaggtgggtcacacctatcattccagcactttgggaagccaagacaggagaatcacttgaacctaggagttcaaagtcatcctggacagcatagcatgacgccatctctacaaaaaagttttgttttttgtttttggttttaattagctgagtgtgtgggcacacacctgtagtcctagctactcacgaagctgaggcgggaggatagcctgagcccgggaggtcaaggctgcagtgagctgtgatcacaccactgcactccagtctgggcgacagagccagaccctgcttcaaaaaaaattcaaaataaacagcccacagaatggagagagagaagagacctggcaggttatccctgagggcagctggaaccccccagggatggagagtcgatgggatttgccttgtaggaagcgctctgctggtgacccagcaagacctgggggagactggagccgtgcatggttccctggggacttgtctcattcccagcttccccagtgtgggtcttgtgctcctgggatttgtgagatgacttcttgtgaatggcatgtggacagacaatgagaaaacattattaatgttcaattaataatgaaaaagtttaaacattaataatgaaaatacttttcagtaattagggcaagtagtattggcttctcattttgggcaatgatagagatttgctttttcttataaacagagataaaaatataaattcacttaaagtaaaatatagcaaacaaaagtatagaaagtacagaggaatgtccaaaatgtctaaagcaggagccacaagtctgatttaagaaagaccattccattccctagggatgcagctggcttattagcagttagtgacatttgtcatcatgctggggataacaagaggtgacacaagtggctgcctgcatgcagggttggggagcgtgctctactaatgactgcacattcatttagcttacttagccctggaagcagcccccggagatctcacgcccatgatgaaatgctggcacaaaagtcgaataactggtccaaatgactggaaacagagggcaatgtctttgacatcaggccgacctgggtttgagacacacggctgaactccttactgagctgtgggaccatgggcaagtgacttaacctttctgattatgtttgatcaactgtaaaatgaggatagtagtcacactgacctcccagggtcgctaaaattaaattaagtgatccccaggaaagacttatctccctcctaacccacaccgagcacttggaaagtgtctgctgctgctactgtagcatcactgttactctcaccatcatcgttgtcatcgtcattgtcatctgttgtcttcattgtcaaaaacaacccttggaaagggacgcactaacacgcattatttagctgcctacagatgctcccagagaggccatctctctggtagcatgtgtgttttgggatgtggggccacctgcagtttgctatggctgggacaaccccgaggcctcatccagccctgcaggcctgggatcctgcgccagggaccctgcgccagggacatcggtcacctccacaacaccaggtcaatgttcagaagcttggccatgagcaacatccctataaacggggtataacttaacacagggacattaaatgcactggttaaaaatttgcaagccaatgtttaaaaatcaggagtgttcacagaaatccagatgtgcagtttcttttcagtcatcaaagttcaggcctccggatccctgttcccacacagccagggtcgctggagctgaacagagtctgtccctgtagatgggtgttggagtttgcaaccctttccatgaaggttaagagcctagtctttggagccaatccctgtgttactgacttaatcttctgctttgggccccagtattttgtgatagaaggagttaaagcttgaggccactgtgaggcaacgtggtcctaggtctccggtttctactgcagagctcagggggaccagctgttagatgctgtgtgtctgatgctgtctgttctcttcccacattctgcacctcagcacccaagggaactgcccacatctgggcccagtcgctctgtgttgtgggtaattccatgacagacagatgtcatctaatggcagacaaagccagatcctcaagtggcaaatgtgtcacgtgagtgctggaacctgggacctgcttctctccttgaccttggacaagttcagggaaacctcatgggggcccagaacatggtgccccgtgggtgatggtctacacctgcaggagcccctggggtgtctgcagtggtgctcattgctgtcctgaaaggtcagctgctttctcttaaaaagcaaacctcccatgagctttgctgggggtcggggagaggggtcatcaaaaagcacaaggggctgtcctgggtcactcctggcatccaggtggcaacatccaggactggagttgcagcttccccgtgccccaaccatgatgagtgtgggtgtcaggggatacatctgaatattgcaaatctctcaggaggaggacactgtcaatgattttgaccattattttccttgagcctttggtttggtgatttgggttgactttgggcttttgtgtttggggcgactttgcttttcctggttttgtttggatggtgcccgatatggtttggctgtgtccgcacccaaatctcatcttgaattgtagctcccataattcccacgtgtggtgggagggacctggtgggagatcattgaatcatgggggtggtttccccagtactgttctcatggtagtgaataagcctcatgagatctgatggttttataagggaaaaccccttttgcttcgttctcattctcttttgtctgccaccatgtaagatgtgcgtttcgccttccgccatgattgtgaggcctccccagctatatggaactatgagtccattaaacttctttttctttataaattactcagtctcaggtatgtctttatcagcagcatgaaaacggactaataagtgccacaccagcaacagagcattccctacaaagcccagaaggatccggtgttttgacacaaatgggaacagggtcctcttcagtgtttctactatgggacaggggctgagttctggccttcccacaagtgcactaattaaaaaggagagtgacactcagggagcgtgttctgtgtgcactctattatcttataacagcctcatatttttggatgagaaaacagagcccagagaggttaagtcactttcccaggccatagagcataaaaacagatcaaacccagtggcaggactgggtttgatcttcaccataacagtctacagcctaaactctagagccaaacaggagacaaacatttcttctgcttctggaatgttctggaatgtgagtctagaacaaggactgtcaaattgcaggcttcaggtcagatactgcccatgtctgtgtctgcatggctgtggagcactgctctagtgggccggtcctgggagccagggagggaggggtgcctccctccctgtgccctgctcctgtcttcctagctggtggctgcccttaaccactgcctggggcctatgctggtcccagctacccctggggcctgggctctgggcaactgctgggcaccgagtggaggaacctcatctgggagttggtgagccacctggcccacagccagctgcccaagctgagaccaaggttgtgctgggtgtacgggggtggagtacaagtgaccatggctcaccacatccatccttgggctggccacccttgaactccagaatgtcttcagtgggtggtaactggctgcaaagtgtgtcccctgccctggtagccctcttgaggcaagtggcagggcagagtttttcctcttgtttaagttcctacataatattcttgattttgcctcttagcctggaaagacaaaaatgtttactatctgcatctgaacagaaaaggtttatcagcccctgctctggaaaataagtggggattacacagaagggtgtcagtggaacatgctcagcaaagaggtaccagtaagtcatgaacttgtggcgctgtggttgagcttcaggtatttccattcctagccctgacccctgcattggggtttgtacagtgtagaagcttctggttgagactgcatttggtaagagggagcctctgctggtccagccccaagggagcggtcccccaaatgcagggaaccagtgtcttcttccactttttaaaaaattgattcagcacttgagatgttaacagatgttgcaatttcagttttgacaagattccaaaatacaacggtggctgcacactcacgtgagatgcagagggcggtgtcagagaggagagggaagatggggaggagggagggagagaggagatgctgaaaaccgtctcctgtccttagagccatcaggcaggctaaggatgtgagggttcagtgtgtggtgaggatggatgttttgggggagactttggaggagggttttggtcagcgtagctggtgtggtgagtctcatggccatcagggtgaagggtggggaacccatagtcccaccttgggcaggtggaatgaggggacctcagagacttaccctttaccctgtgccttaaggcagtggcactatgaccattgactcagtcctgggaaatccagagctcccctgtccagtgcagtagccactagccatgtgactgtttgaaataattaaaatttaagcttgtttttcactccagccgcttgtccagtgttcagtggtcatgagggtctagtggccaccatatggacaaggaagaaatgtgtccatcatctcagaaagtgctactgggtagtaccgagggtcagggtggctgcacatctactttgctgtgaaacaagggcagatgtagtttggattggctagccttccagagttctccatactaacagagactgtaatagcaacagaggccacatggcccaagctggaaatattttctacctggccctctgcagaaaaggcctgccaaaccctggtttggagaatgggtttccactggggtgggaagcattgccaggagctgggaggctggtgaggaggcccaggcagaagttctgacagctcacactgggaaacacgtgggtatttctgagaaatattttcgaagtagagttcgtgagacttgcctgtgaattagatacaaggggtgggtacagggtggagaggacaagagaaggatggcgtggggcatctggtctggctggacagctggtgggtcatggaacactgaacctggtgaaagtaggtgatatggtttcgctgtgtccccacccaaaatctcatcttgaattataatccccacaatccccataatctccacgtgtcaagggagaggccaggtggaggcaattgaatcacaggggggcagtttcctccatgctattctcacaatagtgagttctcacaagatctgatggttttataagagactcttcccccttcacttggtacatgtccttcctgccgccttgtgaagaaggtgcttacttctcctttgccttctgccatgattgtaagtttcctgaggcctccccagccatgctgaactgtgagccaattaaacctcttttctttataagttactcagtcttgggcagttatttttagcagtgtaagaagagactaatacagtagggatctgtctggattagtgccatgtccacagcttctagaatagtgcctggaacccatggttgttcaataacatttgcaagatgggttgatggttgaatgagcaagagggaagggaaggctcaggagaattttttgtggggaccaagattcaagtttggatgtgattggcctccagatggagatgccagtgtggccaactggtaacatatgagtctggagctcagagaaatggtccagggttaacagagaaatggaatcagttctgaagccaaaggagtggatgagaatgacctgtgagaaggttagacagggaagaggacctaggccttcatcctggggcagcccaggtggacattcagatgcaggaggtgggacctgccagagaggctgagcagaggtggccagagctccaggggagaaccaggagagtatgtgtcgggaagccagaggggaaagtgttaaagatggtggatggctgagtggggtggccctggctcagtgagggggccaggccttgctgggtggagatgcagtgttaaaggtcatctttcataagtttatttttcaaaggagcagataattgtaactaagctgggagtatacatgaggtcaagactgtttggtttggttttgggtagaatattttagatcttgttgggatcctgaaaagaaggataagtcagtgatgcaggccaagcgggacaacctgtcaatagctcagagggatgtggaactggcccaagtcagtgcttatctagtgaagtcttatgtggagatcagacatagaagatagatccagatgattggctggggctgacccagaagtgaggacactgaccccaggctgcccttcctccctggtatgaggacactgaccccaggctgcccttcctccctggtatgaggacactgaccccaggctgcccttcctccctggtaatgcttcctttggtggcacctctgagcagacccttggagcctggttcagacgctggccacattgtcctggaggagatgagtcagaggagtgctgagtagctctagacaaaccttccccaccatggtttcatgttggcctttccatacttgtagtgggcaggttcgggtattttatacagattattgtacagatgaggagactgagactcactaagcaaggtggaggccaaagtcactcgtctgtaaataggtcaaacgtatggaggaagggggcggatgctggatactggtgtaattgaggccgggtgagccagttccgtgacatctctgtctcccaaaagcaggactttggaaatgtgctgggtgaccagtaccctgagagcgtaacccattcacaaagaagcgttcaggaacaagaagtcctgtaaacccaaacaatcaaagcagggtgtggatgcaaggaccatattaaaggacttcagaataatagatgtgtgaatatctgaaaaggggtgggacccccccaggaagaaacttcctagaagaaaactaggcctgggctggctactgagagctcaccccatgcctggtggtcttggccaggaacttggctgccgaggaaatgggctgtgaagtgtggtgtcccaagaatgagggtgtccacttgcctgtgctgatttacacaagacagaaaactccacaaagttataactggaacctacatagagaaaatgggcatttctgtgcttacctgtggcttaacaaggacacctcacaactatttttacctagaaagcataaaatatttactttgatgttgttatcagggcaaaacttactaagtgaaacaactaatcagagttgtagactcttagacattataggttacaagtcagatgacataatgacagtctcaaagcataggagtcttaaaccctttttaacaagtaacacttttgaggacagtttaatgtaacaagaaaaataaaatgaaaacagcattttcatgtgggtatccatgcagaacaagagtatagagccagttgtaatggttgttctcagttcaggccaacttcataacacagagctgagtctgccgtctgcagctggagtatgtgttgttgagggagaacaacacatactccatctctgctttcagagattttgttctccaggcattaggagggctggcctttctgagataaggactccattgtcatgaacttaacataagaaagggctgggaatgagagtttaaaacttccaacatagccaataaaggaacggaaactaatgatagctaatgggatacaaggagcgtgcaatatttgcatctggtgtttagctggaggctctctgcaggcaggaattaggcctgttgtaacaccccctccctgaccactgtgttttcagcaccatggacagcacccaacagctcttgggtacctccagaaacagcagctgatagatgaatgaaccccataggagctaacacagtgacccaaggacaagccccagctccactaggcttttcccttagacatacagtggggagagtgttcgtgtgttcttcattgggtagttgtaaaaactgaataagatgatgtatgccaggtgccttccacaggccttagcactcaagagtgtgctgagagggcaggaagtgagggagtgctggtcccagggagaccatctctcttggatcagagggaaggaagaatagagatgctggggacagcagtttgcatttgagtcagaaatccaagaggagccccggtctgatgacctcagtttcccctgtaaagctggaggtgaagctgtgtggtgggagcaggcaaaggtgggaagctggaggtggggaagggacagaaagggcttgagcagtcatgcagagcacctgcaggaggaagctcctggccacgggtcctgcagagtgacagttcttcctgaagtggactccgtaggctcttcctcctgcaatagtaggcaagggcaggagcagacaagtggcagcttaatccccagatgaaacttttccagagagttaaatggaaaggaatccaggcaaaggacttagggactgttggtccgattgttgttgaaataatggatgatggaacccaagccaggcaaaaagagaaataagaaagggaaggattgataggttgagggaaagctggggatgggcaggctgaggggtggttgtgaaggaggtggatggagcctgaatcagcagctagaaagggagggatgagggttctgggtggcctgacccttcctccaagtcgatccttcctatcctcactcccactctaggctggcatgccagatgttagggctgctgcaaacagacaaataagaatgagagctgctggactggagggttacactgtgtcatggccacttcttgcttaaactgagaaacaatcctgtgagggactattgttaacacaatgccatgcatgagtaaatggagttttggagagatttagtaacttaaggtccaagagtaaattcagagaccacttgagcctgggtgtgtctgactccaaaacctggcatggtgaacactgctcctaggtgaggtgggagctgtggcatggacctctcatgtggaaaaaagaatggaatccctcatactattgaaatgacttccctctctccatattcctctctctgcttccgatggttctattgagagttgaacttgcaggaagtcaagtgcctgtgtgaggtcactgctctgtatgctcttcacgatcccatcccaccaaaccctcttgctttgctctcttacttccactgctgtcagaggaaacatgtttttaactctctgctttgcctttgaaccagccaagatgccttctgcatccagtggtgaagaagcagacgctggcagcctcctgcccaccaccaatgagctctcccaagccttagctggggctgactccctggacagtcctcccagacctctggagagatccgtgggccagctccccagccccccactgctgcccactccgccacccaaggcaagctccaaaaccacaaaaaatgtcacaggtgggtccacatgcatcctgcccattctatttcctttctctgccccatccatccatctatcctacattcatccacccatccatcatctatctatttattcacccattcactcatccatccatccataccttcaaccagtcttgattgggcaccaactgtgggctggttctcatcattagcttctgtgactggggctcagggcaggcccagaggagtagatcttaccaaggaaactgtggttggcaggagtagactgcctaggctccctcaagcaaacaggggagtctctttgcaggagtcaaaggggggatcttccaggacctgaatgcaagaggtgcagccagttcccaggatggggcttggctttagcttggcttggcttttctttttcttttttcttttcctttccattctgttcctttccattccattccattcctttcctttccattcctttctgttccattccattctgttctgttccattccattctttctggatgctcatgtgtctgtctttctctttgtgcttctctctgagtctcagtctctttcagtcagtctctctcccttcctccctccctctctctgctggtctctgttttgctgtttcactttccagtgagttctgtccagcaaggcagagccaggagtaaacagcagacattggtggtcagataggggtgcacagctggacagaggcccccacagtcatacacttatgtagcttttgtcacactggcagaataatcctagcaagtagagataattactttgcaagcttaggtattttttatctggaattgactgctacaaacaggacacattgatggtctcagggaaaaagtaggctgttgatcaagagataatgacttttcagagtaaagccttgcgtgctgtctttgaaggctgtgggcgtgaaacatgatgcatagcagggtttgacagttttgttacaatcacctaaccagtgattaaccaccatcaataattgccatttgctgggtaggcacgaggtgccccatttatggttgagaaaacaggctcaggaaactccagtaacttgtcccaggtcctggaaatgattgagacttttgaacccagtttttgggcccaaagcttgttgctaccacacgtgtggccaggggctggtgccctcccctctgcgatctcacctaatcctcattgtgcttcttcccagttttcatgaaagagggaactgccaccttttggaagaggtgtcagctgctgagacaaggagagcccgggcatgagctcgggagggctgggtcccagcccttggctcttttctggggaccttactgccccttatggggtgaatgttcaatctggaggggactcttgggtggaaaatgctttcagtggggcattttccttgtacacctaacacgaattaagtattccagtctaactgatgattctcagccagataccacagaaacggaggaggtgagatgcaccccacagggggcctctttagctgggactgcagatgtcctggatgggttagatgtggggctgtggtgccctgtggttccccaagtagtattggtttgtgggagaatgtgctgctgggtgggtggagggatgagtgagggggcgcccccgccaccccaccaccctgagacttggccccagctgttctccctgacagaacattctcccttcctgctttgcctggtcagtacctttgcatgcttgggaccacagctcaagctgtttctcctccaggggagccagccctgacccttgacctcatagcaccatgcgccccatcttccagcatttaccacattgccccaccttgtttagtgggttgaatggtgtcaccccaaaattcccatccacctggaacctcagaacatgaccttgtttggaataagggtctctcaactgccattaagttaaagatcaagctgagctcatgctggattcggttaggccctgaatccaatgacagtgtccatgtgacaggcaggacaggacacacagggatgggactgatgcatccacagaacgccaagaattttccgggggagaggcctgggacggcatctccctcacagcctcagaaggaaccaacgctgccagcatcttgatttcagacttctggtctccaaaactgtgagagttgttctgttgctttgggctgcccaaggagccatacacgccttgtctgttggatggtttgcctctctctaaccacctgccccccagacagtagtccctgagagacggccacacgtctgtgttcactgtcaaatccaagtgcaggcatagtacagggcatacagcaggcactcagcaagtgcagatgatggttggatggatgaatgaatgagtgaatgaatgcatgcgtgctctgaaccctgtctgtctgctttctgcatctttctacatctctgtagatgaatccaaatattcagtctttatgcaacatggccacataaattacagtacaaagtttgaggcaaaactgtgctactttgcattttgttattgtctttgtgatagctccctttttcctccattgaaacctaaaaccatttaaagtccattcaattagccaccatccacctcattttattctggcgaatgtataatttgttcctggccctcaataacttggtaacccagagagtttcctgcctctcccaagcttgggaaggtcgagcctcagatggcacaggtcttcattctgactccacacgccctaaattctggcgttctgtccccagtctgcggacacttctggcttccgccctgccctcagttgcaaggacatcaggggatactctgacacttatgcgtttccatagggactgaattgagactgggaggtggaggagggtagttccgagctatgggtcctggcctggcttcttcctgcacagactacattttggtgactttgatttaattttctcagttcctctttttccttttcctttgggaaaaggttcatgtgcttcagcatgtgaacactagatggtagcaaagaagaaagtctccttacctgggcttcccttgctgcaggagggaccctggcccaactgagtctccacccaaggcaggactgcaggtgtcttagttcatctgagtgacttataaaccacagaaatttattcgtcactcttctagaggctggaagtccaagatcagggtgccggcagatttggtgtctctgatgagggcttgcttcctggttcataggccaaattcctggactttcttgaaaagtcttcatctctgatcaccctctgagtcactacaggcccattaaggtgggcaggttctcctctgtgtgctgtggtccccaccctgcccccatggagaaattgcaggaggtcctttgcattcctgggtttcacctgcctggtccctggagatgcgtttacccctctcccttttacctctcctttacccctgctgtcacctggtccagttggtaacgctcaactctgcgggatgggagtcccacagcctctgccaagtgtaagtggagctgggtgcgatgtgctgttctcagcccccaccttttcctggcagcctgcccctgaggtggcttctgaacctcagcttcctcatctgtgaaatgggggtgacaagtggtcccctgcacaagctgggtggggcgagccaggcaaagctctatgggggccgtgggggcagtgctggttgtcacatctgtgattgacagtggggcagagacctgggtgggatcccagctccaccaagctgagcgagagcaggcaaaccacgctgcctcagtttccctatttgtacaagagggctagtgattccttcctcatggggctggggtgagaagtagaggcaatgatggttagagacagaggggctgggggatgctgcgtgtcacctgcgtgtgctcaggagtggggcactgtcctgagcaggagcagcctggggaggctgaggccagtggggagaggacagcgcagtgtgcagaagctggggatgggtctccctgcagcccctgccctgcctggccacttcttgcatggctggctccttgtcatttctcaggtctcagctcaaagtttccctctgcagagcagcctttcctgacctccctctcccaaaccagctaccacctccccccgaccagcccagtactctcagcccacctgcgtggtgccctctcgcccccctccctccaccactctctctcccagcccttttctctccctctccttctgtctccttctctattctacaatcatctgctctctttctgtctgcctggcctctgtctgtctccaccagctgacggcagggcctggcccgtttccctgtggcctggccttgtgtggccaagcaggtgcttgtagagaaagcgaaataactaaagtcctccacgaggtttacagtttccttttgggttttgaggaatactttttattgatgctgtccacatcccaggattgtattggaagtttgtttctggtttttagggaatggggtagtttagatctggttgttttgctggtgggattaaagggatctggtgtttgcaccagtcctgccaggacgcttttggaatgagagtttgtgctgaacacctaagagcttctgggcctgtgccagctgctaggctcctgaaaaggagctgatggtctcattttacaggcaagtaggctaagcctttgagagcttcagtgacttgcccagagtcttgcatactgggaaatggcagatcaagaccagaggccaaatctgcagaagacaaagcccatgctctctgctcttccgggcacctgacaccctgctggcccggagcacatgcaggagactgtcattgatggaaggagggggtgtcccactcatttagacttgaatgagcaaagcctgtttagaatcatcttcaaagtcatttcatgtacacaagtgtttattgcccgtgttttaagtgccaggcctggggaaactgtaggaaggaaggtggacacaggcctgcccaggagcaagaaacagactgggcagcgtgattcactccaagtaagaggaaaagtgtcagggcaggctcaggtcccaggggacaggagacgagggatctgatcatggcctctctaaggaaatggtattctagcagaggagcggggaagcatttcaggcagaaagaacagcccatgcaaagactcaggttggacggagtgtggtgccttcaaagacgggagagatcttcacatgctggagtgaagagagtgaggtggagatgcagctagggagccgagtggggccacccccaggggccttgagactgggccatgagttcgaatcatgtcctaaggaagatgggagagtgatccaattcaccttctggggtgatcctcctggcagagatacagggagagggttggagcccagaaatttattccttactgttctgggggctggaagtgcaagcccaaggtgctggaatagatgctgtggggagggcagagcggaccatggtgctcatccaggctgaagggtggctgcacagattcttccgggtttcccaagaacaagaagcagcttcaggaagctgaattcatagcagagaagcaggaaggaggcttttctaagcccagcgccctgcagggaggatgctggtgctggtgtctgcaaggcttggcccctaacagggtttgccctacagatggagcagaactggacagagatgcaccctggcctctagctttgggagcagggatcccggtccagcatcttggcattagttggggcccctcctggaggtgcaggggagcgtcctttccgctcatggtccccagtctcagcaaaacccttggtcccagctcctgaagacctatgttcttgctgcttcctcccacaccccaggccaagccacactcttccaagcctccagcatgaagagtgccgacccttccctccggggccagctctccacacccacggggtctccgcatctcaccacggtccaccggcctcttcccccaagccgcgtcattgaggagctgcacagggcgctggccacgaagcaccgccaggacaggtgaggccctgccccatgagggagacctgtgctgccagaatccctgcctggccagcctcaggctgtgcagctcatgccacgcccagggccttggctgggtgtcccgttctacagtcactttctgaacaaggaagtcacattttcattttgcacctcgctctgcagattgcatagctgatcttggttcccacattctgggacggggtgcacagtgaatgtgcactatgggaacctggccacaaagtcctgtgcgtgagcccctcaggacccagggtggggtgggagctttgcaggagagactgacttagagaaaagtggccgttccactttgtcccaggacactgagggcttcatagttgtcactgggcaagagtgtaaggcagcctgtgcctgcagcttactcttattttggatcacatgtgtctcatggactgtgaaagattagaggtaaaataggtaataggagacagtatgggttggaggaatattagacaaacaaaatgtccttctcagtttttgtgaagtcctcgccctgaacattgattgcatgtattttggcaggttttattacttgcatgttctgtgcttttcaaaacagcatgttgtaaacagccatttgccttgaactcaaatcctcatgctccttctggtgtgtccaggataaaaaccaagaggtcacatgcattttggggctgcctctgtgatattcattataagctccaaagtcaatcgtgctgggtttctgggtgaagggggtgacctataacctgaaccatctttctggtttagttttcaaggaagagaaagtaaagggtctccaaagaagcggctggatgtccgtctgtcgagaacgtccagcgtggagcggggcaaggagagggaggaggcttggagctttgacggggcattggagaacaagcgaactgccgctaaggaatctgaggagaacaaggagaacctgatcataaattctgaactcaaagacgacttgcttttgtatcaggacgaggaggcgctgaacgactccattatttctggtgaggaaaggatggcccattaagtgtggggatctcggccagaggtctagtgtcaccagggggtcgaggacagagctcgtgcctgggggaggaacaggtcgaggggctgcacctggggagaaacaagaggggggctgtgtcctctggaaatgagcttctcctgaaacaagctggggtgggggtgcacagccaggcttagagcaaggaactagaaaataccccggtgaaattgttttgagagttgcatattagttttcatgtgtatgtgaaaaaaaaaaacaacataaaagtggtgaagcaagtgacttagagaatgccacccctgaggatgctgtggcgaacagtatatagttggtgtacagatgctcagtgtacagaagttatagcaaaaacaaaaacaaaaaaaaactgtaacaagtaaagcaggacgagatggaagcagggggagagggaggaagagagattgctctattgatctcaaatggccgtctcagaagtgctgtggatgggacaggcagcatacgcttgtttgggagcagatgctcacagggtccttggaagccagctccgtatttgtcctcatggtgcgttctcccatgaggtaattgctccatcctacccttgaggactccggggctcgggacgatagaggcctgcagaccaccctgtgatgaagggagaaggaggctcaggccaggaggaggaagtgctgagggggtttccctcccagctggtactggctgtgcggggccctctgattagtcccaggaaggtccagggcggccgtggtgtttggcctgcaagggaaggatcaggaagcgtccgttgctgttcttcctggaagcatctcatggtgactgttgcgggcatgggcaaagctcaggccacgtctccctgggtgtctgtggggagcaggaaagggcatcagatgtcggtgctgaccctggctggtactgaaggcatgcggtgggtactgtgatgggtggatagaccggcagcccagggctccatagcctcccgcttcctgctgctttggagcctttccaccgggtccgaggaagcaattctgagtatgtggctgcacaacatgaaaggggtgggggtgctgtcacctgtgcgtttggaggaggctgactgccaccgcggaaccagtgtctttgtggcagaaactaggagctggtcactggcctgagggcaccaacctctctgaagaggctggagcctgtggtgttcccaaactcgttaggccctggaatccttgcccttaaacacctgtgagcctccagcaggagggtgctatgagggtgcacttctgagtagagctggtgttgggatggtcaagggctagagcacggtccctcagcctcagcgctggtggcaagaggccaggcgattctctgctggggagggggctgtcctggacacattaggatatcctgcagcatccctggcctctccacactggattcccccagtgaagacaatctaaaatgtctccagacttggccagatgcccctgaggggcagaatcacccccagctgagaatcactggcatagtctgtgcccttggtttgggggtgcccttccataagtcccttatccactccaggacacaatgctttcattggtgaagagggagatgggaactgcttcctcttgacattgacaatgtcagcagccagggccccttaccgggtgtttcttgtgtccgggatgctggtctaaggttgtgacaagaaaggttttatcctcacaggagccccatgaggctatgacatcatagtccttattttacagatgtgtaaactgaggcatagggaggccatgtaactggccatggtcatgcagctcgttggtgccaggctgggacttgaacccaggctgccagcgccagctttccgctctgtgctagaccctctctgaggatgagtggattaatccatgtcagcccttggcacagggcctggctcagggtgcacctcggagagcacttcttcctgtcctcaccagccacacggggaggatagcccctggggaggacagcccctggggaggagagcctctggcccagaagggtctcccggcttgactttcctttagggcattgttaggccatccagatgcagtgtcctcacgcctggcgttaaaggtataatgcagtcattttatttaaacacagaagaggatgggaatctgcatttcacctctcgggagcctcaggcctggcccggatatgacctcaaaaccctctgtggcagcgtggttgagccagcagcgtggttgagacacagagtttctgcactggagacggcatcaaagcacatctagcagcacccttggctcccacctctgtccctcccgcccagtgccttccttctctgattgagtgctctgcacagggacgcctcctgctcagccaggtggcctggtcacagccagctgtgttagcctcttgtggctgttgtaacaccttatcatctgctgggtgacttatgaccacagaatttactcttctgcagttctagaagctagaaatccaaaatcaaagtgtgggtagggtcgtgctccctgcgagtgctccaaggaggagccattctcttccagtttctggtggttcctgcattcttggcctgagaatcccagccctgcctccgtgggcacatagctgcctcctctccctccttcctctccccttcatatgaggatagtagtattgcaggcagggcccatctggataatcctggatgatctcctcatctagagattaacttaattacttctgcaaagatccgatttccaaataaggtcactttcacaggttctggggatttggacttggcacatcttttagagaaccccctttcaaccccctgattccactcctcttggttaactcgttcctcttctcattgagctaaagctaggctctgggatttgacccacaaagtcccctccatccctgagatctctgtggctgggccggtccatggcctccaacagaatgtgctgtgaagcttggacttggccctgggcaggtccctcccctgtccctgccccatttccttgttgtcagacgaaggccctcattgttggcttctatgacaacactgaaccttccttcctagctgggacacagttgcagattcacactaattcttgtcattctctattctctgtctctttgctacctatcaattacttattgttgactgtctaattttgtctgtatgagggatcatgctggtatctgtctgtgtcccgtggtgtgtccatcatcccagggtacctggttctaagagtcagtaagcacctgttggttgtgtggctttaaacacatctgtgaccctgatgaatctgatttgtccctccagccgatggcccctgagctccagggtgtctctgtggactctacgcatgcgtccacgtggggactggtgtgcattgcatagcttacatctccagatctcggttcccatctgcgccctgtgctgggactcttctccatttcaatcaatacatctaagcctcctgtgaagcttttggctttgtgctgatgtccggatgaccctgaagtcctctctgttccccttggagcagttcgcgggtccagccaactccctcttctctggcaatggtttgctgtgctctcctgcctggacttggcctccaggcggtctctctgtgccaccattgccccatttctagttcattctccacacaggtggccacaggaccagggtctcatagaagttggataatgtcacctcttgctcaaatccctccagtggctccctgaggcactgaatgccacatcctccctagtgcctgtggccccaccccatgtggcctgcctccctctcccggctcgcctctcccttggacccagcccatgggcctctttgatggtcctcacaccccaaccacagcccctgagactcttgctgtccctggaggtgtgcaaggctccaccgcgtttaaaacatcgctcagtgcaggaagccacctggccgctgtgtggcaacacttggccccttcttctcacccaaccttatttcccctacggcagcgtccctgacgccaataccattggctttgcccatgcagcctctctaccagcacatgggctccgcgagaccaagtcttcgcctctgtagttcttactgtgcgcacagctcacgagtgctaagtgcaaaataaatatcagttacatgaatgagccagaatgggccaatgggggattagagaagccagtgcctgtaaagtactaacaggtgccaggtccagggagccctcatccctggactgtttctcccatggcgtggctcagacctgagcctcttgttatttgttctcgaaacccagtgtctgtaagtgaacacggattttgagctggggtctgagagtgggggaaggtagcactcattgtagaaactcattctggaaactgctgtcgtgaacgtggcccaggcccaccgctgtctgcaccgtgcaatgtgttacatggggtgtcatctgcaagccctgggtgaggccccctttcctccatgggccttttgtgggccaaggtcaggattcctgtctgaccctgagaaactccttgttgagggctgggctcattgcacaaactggcaggtatgtctgaggtgcaacctccagccatttgcaaattgaggcttctgtgtgctggtcccagggtatagagtctagggtccctgaagccctgaaatcaagtgcagaaagcagtgctttgcttttgtcacattctcaactgtgtccccaatgctccagaagtgatagatctctgagataaaatgctgtgggaaaattcaatattggtcatacagaaagtatataaatgttgctttttggggggaaaattactcacagtaggaaaggcctgtaagagtattttgctttgcctggtgcagacaatggtgaataatggttgttatttgcttctctctgcagtgtgttgagttcaaaccccattcccactgtctcgcctgatacattgttttcacatctccatggggtgaaagcagaaagcaccaggcagcaaattaatcaattattaatcgcaacaactactattttattcatttattcatttattctccctctctccctctctttcccctgttgagggaggtttggcagacgttgtcttatcccatgtgaaaaagaaaatttttgttatcaaacgtttttgtgaacttcagttctctattagaatggagaatgcatctgcatgagaatttaatttttggaaatggtggaggccctatgcccacatgcacatgcgtgcccacacacacaggcttgcacatggggtgccttcgtgggtatgcctggtcagcggtgggtgagcagggccttgcgctcattctccagtcatcaaaagcgaattttatgagaaacagtctttgtgttgtcactgccccaagatttaagttttaaaacctgtcaagaaaaagatgtttgtgttttgtcttttctctgtgctgaacccaagagtcatgaccacacctgtctggtttttcacagtgtcccagctctgggcgcagtagaaacacgtgatgagggggagcgagggactgaggggctgctatgggaatccgggctgcaagggaagaacctactgatggaaggaagctgacttctccagagccccccagctgcctgtgctgctgctcctcctgcagacagcttctcccaggtgctcatgacagcaaggctgcaggctaggactcaccactgtgtctcacctgggcccatgtaaggacagcacaggccctccacttcatccatgctgtagtcttagtccctttgagctgtcataacaaaatccctagactgggtgtcttataaacaacagaaattcattcctcacagttccagagacagggaagtccaagatcaaggttctgacacgtggggtttggcaaggccccactttctcataggtggtgccttctatgtgtcctcacatggcagaaggggccacagagctctctaaggcccctttcctaagggtaccaatcccattggtgagggttccacctaatgatctaatcaccttccaagaccctaccccccgaataccatcacattggggttaggcttcaacataggaattttgggggacacaaacatctggcccctggcattgggaatgtcacagggagggctgtctgtgcagctgggtgggcctccgtctctggggcttactctgcgtagagagacttgctgcaggatttgaccaccccacgtgcctcgacatgtttctttctagctctgtgaccttggaaaagtttcttaacctctctgtgcttcagttctatcccttgtaaatgggggtgacaagaaagttcttatgaaggtcaacaggggtgctcaccgaagtatagctttgtctcattgtgctcagtgagcgttctggttgccgtggtaatcagcactgtcaccctcatcatcactgtggttaaggagcatataggaacaaggaagcactgggcatccaccgctcatcaaaatactgcctcacaggcatgaagcaaagtttagctcccagtttgtcaatgttccgtagctgatttgtgctattcctcattcctcggccaattcatcagtgagagtgttgatgtccctgccgctgcataggtacatctgttctccatccagacatgcagttacatgtgtttgtgtaactggctgtggttttgcttgcctgcttagcaagggacaagggcaaggggaattaatcaccggggtctatgtgccaggacaggctggcggggacctttgggttggtcaggagaaacaagcctcaagaaggcctctcgatggcacctgccatgagccacccgtcccagaccaggttgggtaacccacggcgcccagcctcagattactctgcccattgggatgaccctgggcaggtggtggcacatctgggccctggctgcctttcggtagctcacaggtgatgtcagtgacccccttgtcaggttgtcctgggggcggatgagacaacgctcatggagggcctggcctgtgtgggcacatggcgctcacgtggtagccctgctgccaaggttttctgagggtgtgtcccagcggcaaaagaaaaaaatctgatatttgtacattatttatttataaactatacattaggggtaccatgctaatatactgtgtactttataaaatatacatgcaagatagtaataaaaggtgacccgagagagtgactatgtacatattaatatgttctagcacagcctgccccactgtgtcctaggagtaaggccctaggaagtatatttcagcaagcacaggggggttctagtgctggtgcaggagtgaaagagtaaatcctagcccccacaatcccatgagtcaattccagtcagctaggcggtacaagagtaaagggacatacgggatttcccggctttatagattttttttaaagcttcttaagacacacccttgctatgtattcagcaagtactatatgtcccaatctaggcctcaaggattctaaggagaaactagacacagtctccaaccctctaggagctcatgactgaccttaaaagctgatgttcaccataaactcaacaacgcaaaagagggctgggtcgggagttgaaaggtgtattagtccgttttcacactgctgataaaaacatacctgagactgggtaatttataaggaaaaagaggtggttgtttttttcattttgttttgctttgttttttgttttgttttttctaagacagagtcttgctctgttgcccaggctggagtatcgtggcacgatcttggctcactgcaacctccacctccggagttcaaacaattctcctgccccagcctcccaagtagctgggattacaggtgcataccaccatgcctggctaatttttgtatttttagtagaggcagagtttcaccatgttggccaggctggtctggaactcctgacctcaggtgatccacccacctcggcctctcaaagtgctgggattacaggtgtgagccaccacacccagccagaaaaagaggtttaatggacttacagttgcacctgcctggggaggcctcacaatcatggtggcaggcaagagagaatgagaaccacgcaaaaggagttttccctcataaaaccaccagatctcatgagacttattcactaccacgagaaaagtatgggggaaaccacccccatgattcaattatctcccattgggtccctcccacaacacttgggaattatgggagctacaattcaagatgagatttgggtggggacacagccaaaccatatcaaaatcctaagacaaatgtgtgacgccaagaatgtggtgacacgggcatttgatgacatggagaacgttacacggagagaggcaacactcaggcagttcctggtactgtctaaatgtaaagaaagccttctttgcaggctccgggatcctttccccagtagacatacttgtaaaaagtgaatgctaacgtgttatttgaatgccattttaagtgtggggagggtgtactgaaaggcttcgtgcagtgtatgcttctgtaaagtgaagagccacctgcagcgagtgaggactcccccacagtcgtctccatggtgacttcacagaacagcaggcagcccctgccttttcttgaaagttggggctagagatttgaaaggctgtggaaacccagccactccctgcactgacaccagatggcgctggagatgctcgctgggatgcaggatgcttgtgagaacctggtctcaggacgacctggtgggcgtcttgcagcggaggcaggtctggcccagggtggttctggctgagcaccaagcagcagagctctcagagtgggaacgcacagccccagtgacaatcagctgaaacagggctgccccccgccccgccccaccccggcccttttttttgtttgagctattatttcccatcaagtaccttgataagcacttttcatgcattttattgcctaagtcccttgacaaggtgataagacagctgctattaccgctttttttgtttgtttgtttgttaacagtagaggaaaatgaggcaaagagaggggatgaaacttgcccattttgaatccagggctttccagctccacagcacatgactgtagcctactgttcgtccaatgcgtaagcacatcataggtgccaggcactgccctgggtgctgtggacacagtgatacaagccagggtcccagcccgcaggtgcctgcagcaagggggaggcaggagcccccaggaggtgatttcaagattggggcatgagcaccagatggacacaggcaaagagtactctgtgatttgtgcatctgaaagcagctgttctgggccagccgtgtgctcttaaaagcattggtaggaactgtatccgtctccctggggcctgggcctctgcactttgcaggctccgcaagggtgaaggtcaatcttgtgtgtcctcttggctgagctgttccacccagctattgaaatgctagtctgcatgttgctgtgaaggtattttgtagatgtggttgtcacctgcagtcggtgactttaaggggctttgagtggccctctccagtcagttaaaggtttgagaataaattggagtttcccagagaagaggaaatcttgcctcaagactgcggaatccactccagccgctggcctgccctccaaatccaggactgtacagcccccgcaatcgcatgagtcaattccttaaaataaatgtcttaaaacacacacatatgcacatatatgtgtgtgtgtggatgtatatatatatatatgtgtatatatagaatgtgtatgtacaaacatgtatgtgtatgcatatgtatatgtgtgtgtggtgtgtgtctatcccattgcttctgtgtctctggagagccctgacccaaacaccaggtgactctcaagagctgccagggtggagaaccaaagctttaaaatgaggagtcctggtcatcaaggtaaaggctttccacatagggacagcttgagcctgggcgtggagatgagacgcgtgaggtgcacagggtagcgtggttgttgcatagcccagtgtgagacctagggactggccagggagagagacctttattcaccctgtaaagaaagctggaattcaaaagacaccaaagtgtgaagcctctgagggttgtcccaagtcactcacctcctggctatgtggccttgggctacactgtgggacgttgtcatctgcaaaataggaaaactaaatcctagcacctgccttatagggctgcggggagatgacatgggaaacgcattcaaaggctgcctctgggcctggcataccgcaagggctcattcaatcttggctgctcttgctgccactggtgggaagcagtgtgggatctcctgcagctgaactgatctttctggagtgcagacctgatgccgtctgtcatgattcaagccttggaaagggccccaggactttccgagggtgggagggtgggctccagagaaaagacagggaggggccatgaggaggctcaggcaggaggggatggggtctgcagggagtgtcagagtcagctccagctgccgtaacaggataccacagagtggatgcctgaaacgacagacgtttgttttcttaccattctggaggctgaaagtccaagaacaaggtgatttccagtgaggcctctctctgtgtctttatagggccgttcccctgtgtgctggttggtgagagtgggtgatgagtactctggcctctgtttcctctacagggacaccagttccatcagatcagggccccgctcttgcaacctcctttaaccttagttacctccttacaggccctacccacaaatacagtcacattgtgggtcaaagcttcaacttgtgaattctggggcagagcggtggtacacaggtgaatcataatgtgggagactgaggcagagaggagaaactggcaggagctggggagtggggatggtgctgctggactccattcttgcagctgtgggcccctggctgcaagagaaagcgcagaggggaggaagcgggagatgattcgccagcgacctgagttgactagagaggggccctgcccagctccacgctgacagggaccatatagtcagtcaagagcgtttattgagcacctcctgcatgcactgtgaggaaagccaagtcacatccacagaggaaggccgtggtcagcagcaccagcatctgtccagtgggtgtgtccctggcatgttgcaccagcacagcgtgtgaggtccgatccttaaagctgcttcattttgttttccagcagccctctgcatcccctgcttctgcatcccctacttcattttgttttccaacggccctctgcatcccctgcttctggttttccaacggccctctgcctcccctgcatccccaggtagcactagacttttctgtttatttgcaggtagtgaactgccactgagtctgagtcgtaaacactgtttggattcagaggtcagaatatccttcccctgtgatgctcaaacttctgagtcagttcggtgttttgccagctccctcctcaactgagcccctctgtggcaggaggcctggggctgggatcctcccctttgccctgctcattccccagcttctgcgtgtgtgcccccagggagtgcaggctagcctggtgtctgggggccttggctgggctctgagctctgtgtggccattcagtttgcccacttgggtcccagtctgtggggctggcacctgctggaggttcaatttcccttcaaaaaaggtcatggtgatccctctgagaattactttgagaacctgacaactcaatgatgtgagattgcctactccaaggcccttctgtgggggacagcgagggctgctgtggcctcctgctcctctctctttaagatgagcaggtccatccacagcagcccagggagcagccctgggggcagagccatcaaggacctggtggagccatcctgaaacttcaacaggtcagggtggccattgtgcgcggcatggcacttagcacagctgagcagttaaaggggtatatggagggccctctgtgcagttgacaggtgtctgtggagcactctctgtgccattgacgggtgtccatggagcgctgtctgtgcagctgacaggtctccacagagcactctctgtgcagttgacgggtgtccatggagctctttctgtgcagttgacagatgtccgtggagctctctctgtgcagttgacaggtgtttacagaagtctttttctgtgcagttgacgggtgtccatggagcgctctctgtgtagttaacaggtatttacagaagtctctttctgtgctgcttgtagaagtcctcaacaatggtgatcttcactaatcactatttttttttcaggaagtatgcaggacttttgcaatccaacgtgcgtgtgttattttaaatttcatggctatggtggcagtggtgtcagagtaagggaaatcatgcagagtggaagcaagaggaaaccctgtcacttgtgccctattctgttgcaaaaccatgtcccagtgctggcctagacacacggggtaggaaaatagacaccacgtttttgtaggaagattggagaatagtggtctccttgcacttgacctgctgtgaagagttgatgttaacttcttggtgagtatgtaaattacatccatgggcacaggcgttctcgcagaggatgccccatccaggcctgtgatgcaactgcagtgccctggcaagtgcactggcttccggggctgggctggggagggcactgagctgagatccagaggaggagcagaggtgggagggtctcacaggctcagaagctccagggtggaaggaagcccagcctttgagggacgaaagggaagaagacaggcagagatcattctggagaagccagtaggggagtggccatgtgcagccttgtctactatgccagtgatctcactctttatataaagaaaatgcacaagagatatagggacatctttgtggctgttgttctgccaacaaccgtggcacacacaaaaaccctcacagcaggagcccaggaggagaagagagtccccattccactccttagacagcccctctggccaggagctggagaggagagtttccagtgccattccttagtcaggcgccctgggctagagctcaggctttcagacagagcctgacttttccacacccacttcctactggtttacagctactgtataaagcaaagcaccctcactttcctctttgtgacaggtagtgatgctttttacagaaactagactttatagaagcctggaggtgtggaatggtagagatccacaggactctgtagtgaacatgcaacaccagctcccatctgaaatacacacccacagatgcatttttccgttttattttatttcttccataagttattggggtacaggtggtatttgcttatgtgagtaagttatttgtgagatccttgtgcactcatcacccaagcagtaaacactgcaccatatttgtttgtcttttatcctttgcccccctcccactcttctccccaagaccccaatgtccattgtatcattcttatgcctttgcattctcatagcttagctcccacacataagtgagaacatacgatgtttggttttccattcctgagttacttcacttagaataatagcctccaatctcatccacgtcatcgtacagatgcgtttttctctagagaaagttcatcagcccagaaggcctgcctgggcgcttccctttcagactgagggatagtgacacttcccttaccctcaggcacccattgcagggtctggatgccccccacgcctggcagcccctcctcccccattgttggctccctcctctcattaacctccaaccctgctctctccctggctcccaggacaccatccctgcctttcttcctgccatcctggcccctcttccctgacccgcccctaaaggtgagcaggcccaagcttcctggctccttcctttgctggctctgtgctctctcttgaggctcaacctcacatctgtccccatatgtggatcgtcacaaatctccatccctggctccagctctttctgatgctaaaacctcacatgtccatttgtccactgtccctgcagaggccctgatgcaccctgagttcagcagagccaaagctaaccttgtcctctttcccgggaaacccgctcaacttcccagatcctcatactcagctaatgtcatctccatgtttccacatcaaagcccaggcagtcccctcctccaacatcacagccccactcattcagaaaagatgtgccatgatgtatgtgtcaggcatggcagggagagtttgccctcaagacccccagagtctggtgtcggcatctataacagtgtcactgttgtttcagaaaacgtcaggcacttctgcctctggccatgatgaagcgatggtagctgccctcccactaaaatcaaacgagagactggacaaaatgaatgagaggactgtttcgaggcattgaacagaaacagtacatgcctgttatccttgagagagtggagacccctgggttagcccataattgatctccctggtttctgggggaggcatcttcctgcagggtgcagggaggtggcctctgagcagagtggtgatctcaccgagatgaggaggcagagactggagtctgggctactgaaacagctggagtttgtaggacaggaaggagctatgtaacgggttctgtgcagatccagttggccatagcctgggctatgcctatatgcagaattctacagacttagcagagattgcctgtgagcatgacagctgaaggtcagggggtgctaggagatgttgggagttcagctcaaacagaatgaagagatcttgatgaatgcaacagacttgaaatcccacaaagaccaagacttaggagtaaggggcataccttaaggctttgttcaaaaccaaaatggacctgcagttattataaatatgttagaggtcttagagtgtcaacaaaatgatcacaatgaatgaccagatggagaatcttagcagagaaacagaaacaaaaagaaaaccaaatggaagttctagaattaaaaggtacaatatctgaaaatgtcactgcttgtgcaaaacagactccaggactgttctcacacaggggcttataaagccaggacataggccaggctgggaggagttggggaatccctgccaccctcctctttcctgggattcattactccctctacccaaatgccaaagcctcatgcacatcaattcatgcagcctgaacccagcaggatccacgactgccaatcctggcttgcagtttgtgctgggaaatggctgcattagcaacgtggagacatacttccttgtaactaagactttgtgcatctctgtaattatgtccttaggataaattccaacatgcaggctaattgagaaaaagatatctcatcatgagtttattttaactccaaagcctctttgccttatgttcttatttatatacatttcctttttttctcttttttaaaatttaactttaaagttcaggggtacatgtgcaggtttgttatatagataaacttgtgtcatgagggtttgttgtacagattatttcgtcacccaggtattaatcttagtacccattagttagttttcctgatcctctcccttctcccaccacattggcatcctttttcttctctagagagtatctgagactggttctaaaagcagtagccagcccggtgatacagggagaaatagccaaaagagctcctgccaaaacctacagtaatcagaaactttgactcaggaattctcccctttctagggatcaagctgatggaaatattcatatgcatgcagagaaatgcaggaatgaggacattttctgcggctttggttagaagtagaaaaacaaacactaacctaagtgtccattcatggtgagctggaccaataaatgatgggattatgtgatgttcacactgtggggttattaacagctattgaaagagctggattaaaacaccctgctttggaaccaggaccagctgtggtgtggaggaaacagcatattgcaaagtagtgtgtatggtatgatcctacttttgtaagacatcagaattaagtgggagtctgtaaattgttaattgtgtagaagtaggtctggaagtagatactgcaaaatgttagcagtcgctttttttagaggtgagatgtgggcagagaaaggaatactatctttccttaatactattaggcttaagttgtttgcaacgagcatacattatttttgtagctgaggaagagaacatagttctttgagctttgctgggaggcagtcagctctctggtctcagctatgacctgggacaactcatatctccatgaactttggtgttcttttcattaattcaccagggaggtgagggtagaaggagagcctggtgagcacctttcagctccaccatggtatgaatgtttgtctcctccaaaactcatgttgaaatttaattgccattataacagtattaagaggtgggacttctaaaaggtgattgggccatgagagctccgccatcatggatgggattaatgctggtataaaagagtctgtctggccctctctcagcctctctttgcccttctgttatgttatgacataacaagaaggccccttgttatgctggtaccttgctgttggacttcccagcctccaaaactgtgagccaataaatttctgttcaatgtaaattacccagtcttgggtattctgttatagcagcatgaaacaaactaagatgggctctaattctgatggtcagagcaagctccctggtaggttgaagggtggctctgactgggactccccattgggaagcaaatcaccctacagccttgtcctctgggaagtcctgacctcaaggagcactgcccagaggagtggctagagggtcactctggagaagcatgtgagcacttttcttttttctttttttttttttaactgaagttttagggtacatgtgcacagtgctggtttgttacatatgtgtacatgtgccatgttggtgtgctgcacccattaactcgtcatttacattaggcatatcttctaatgctatccctcccccaccccccaccccacaacaggccccggtgtgtgatggtcctgttcctgtgtccatgtgttctcattgtttcatactgattgtatttctatttatttttgcaaacaggtggtatactcagtatacattgctcaaaggagccccagtgctactggtttcttatctgtcccattggggctgttttatgcttatacaagcgaagatacattaatatatgttaagcttttccatcttggagattaggtatcagggagaagactgatgtgagatctgcctcctcttctttgtccctttcctgtctccccactcacctaggaatagaagggaggattctgacgactagtcttagagccaggcacctctcttcactctagagagggcagctcttcctgggatcaaagtgccatgtgtggtcttcttggagtggggctatcaggaacagctgggaacaaatgaggggccttggaagcatcaaccaggtctcatctgttgatggacatatgggttgtttttagttattacaaataaatctgtgatcagcatttgtgtacaagtctttgtgtggacatatgctttcacttatcttggataaatagctagaagtggaatggctgagtcatgtggtaggtttttaactttttaataaccggaaaaatgtgaagtgatcctgccatttagagtggtcctctgatatattctcaccatcaaggtattagagtttcagttcctccacatcctctccaatacttgatgtggtcagtctttttaatttcatgtaaagaactctgtgcagatccagttggccaagggctgggctatgcctatatgcagaattccacagacttagcagagagttagaatttaatttttaattctagtgggtgtgttgtggtgtcttattatggttttaatttgcattttttctaataattaatgatgttgagcattttttcatatacttatcaccatatctttgttgggaaaatatctattaaaatcttcccatttttcaaaattaggtcaattgatttttatgtttgagagtttcattggtctgtgtgtctgtttttatgctgctttagttattataccaaaatattgtttggtaccatgctgttttggttactatagctttgtagtatatctatttattttattttatttttttagagacagggtctcactctgttgtccaggctggagtgcagtggtataaccacagctcactgaagccttgacctcttgggctcaagtgatcctcaaacattggctttctgagtagccgagactatagacatgtaccaccacacccagttaatttttgtattttttttttgtagagacgaggtctcactatgttttccagggtgctcttgaactcttgagctcaagcatttctcccaccttggcctctcaaagtgttgggattacaggtgtgagcccctgcacccagcctatagtagtatatcttgaagtcaggtagtgttgtgcctccagcttcgttcttgctcaagattgctgtaaatattcagtgtcttttgtggctccataccaattttagattcattgttttcctatttttatgaataatgtcattggtattttgataaagattgcattgaatctgtgtatcactttggataatatgggcattttagcaatgtttattcttcccagccatggacaaaggatattttttcatttatttgtgtcatcttcaatttctttcaatgattcataattttcagaatacagatctttcatctccttggttatatttattcccattttacttttttgtagctattgtgaatgggattattttcttgatttctttttcagatagtttgctattgctgtacagaaacagtagggatttttgtatgttgatttttgtatcctgcaactttatggaatttgtttattttaacagttttttggtgaggtctttagggttttctatatagaagttcatgtcatctgcagacaggaacaatttagcttttcctttctaatttggatgccttttttttttctgtagcctaattgctctggctaggacttctagtattttgttgaatgaaagtagtaaaagtgggcatccttagctgggcatggtggctcatgcctgtaatcccagcactttgggagggtgagacaggtggattacttgaggataaagagttcaagaccagcctggccaacacaaagaaacctcatttctactaaaaatacaaaaaattagccaggtgtgctggtgcatacctgtaatcccagctactcgggaggctgaggcaggaggatcacttgaacctgggaggccgaggttgcagtgagccaagattgtgccactgcactccagcctgggcaacagaacaagactccatctcaaaaaaaaaaaaaaaaaaaagagtggtcatccttgtcttgtttcagatcctggaggaaagactttcaattttcctccttcaaaatgatgttaactatggatttgtcatatatggcctttattatattgagttacaattcttctaaactgacttcattaagaggttttattatgaagtgatgttgaattttgtcaaatgctttttctgcatctatgatttaacatattaatttttacatattgaaccatgcttgcatccctgggataaattccacctgatcatgttgaaggatctttttaaatgtgttgttgaatctagtttgctattattttgttgaggatttttatatctatgttcatcagggatgctggcctatagttttctttttttgtgtccttatctggtcttagtaacaggtaatgctggccttgtagaatagtttggaaatactccttccttttcaatattttagaatagtttaggaagaactgatattagttccttaaatgtttggtggaattcagaagtgaagcagtcaagtcctggactttcctttgatgggagattttttagtactgactcaatctccttactcattattggtctgttctgattttctatttcttcataagtaaatcttggtaggctgtacgtgtccaggaaatgatccatttcttctaggttatccaattgttcgtactgtgcattgtgcaggtaattgttcataatagtgtcttatgattccttctgtggtatctaatgttccatttttcatctctgattttccttcatttcttagtctaaagatttgtcagctttgtcttttcaaaaaaacctcatttgttaatcttttgtattttctagtctttattttatttctgctctaacctttatttttttttccttctactaattttgggttgagtttggtcttttcctggtttcttgaggtatagtgttaggttgtttatttcacatcttattttttgatgtaggcaattgttgttgcatgcttccttgttacaactgcttttgctgtatctcatagggtttggtatgtttttacttttgtttgtctaaagatactttctaatttcccttttaattttgttgttgactccttggttattcaggagcatgatgttttatttcctcatatttgaaaagtttctgaagttcctcctgttactaatttctggctttatacctttgtagtcaaagaagatacttgatatgatttttatcttcttaaatttgttaagatttgttttctggcctaatatattatctaggagaatgttccatgtgcaattgagaagaatgtgtattctgcagctgctggatagaatgttctgtaaatgtacattatgtctgttttgtctaaagtacactttaaatccaatatttctctgttcattttttgactggatgatctgtccattgctgaagtaaggtgttgatatcacctgctattattgtgttgcaatttatgtcttcatttagatctaataatatgtgctttatatatttaggtacaaatttgtatgcatatatatttacaatggtaacatcctcttgttgaattgatttcatcattgtataatgaccttttacagtttttgacttaaactctaatttatcagatataagcatagctactcctgcttttctttgggtttcaatttgcatggagtatttttgtccttcccttcactttcagtctgtgtgtgtccttagaggtgaagtgaatctcttataggcagcatacaattaggtcttgtttttaaaaatctatttagccactctctattttagctggagactttattcatttatattcaaagttagtattgatgggtaaatactcctgccattttgttagttgttttctggttattttatagatcttttgatcctcttttcctctgttgttgtttacctttgtggtttgatggttttctgtagtgcaaagctttgattctttccttgttctcatttgtgtatctgctgtaatttttttgttaccatggggcttatataaaaaattataaagttataatacactattttaagtagaaaacaatgtaactctggtcacatacaaatactctagacttttaccttaccccactcccacagtttttaattatgctgccttaatttacatctttttaattttgtatgtttcttaacaacttattgtagctatagttatttttgaccattttgattttttaatcttcatactagagatttgaaagatttacctacaccattatcataatgtagattctgaagttgattatgaatttgcgtctaccagtgagttttatactttcacatgttttcatgatagtaattattgtcctttcacttctggttgaagtactctcttgagcatttcttgtaaaggcaatctagtggtaatgaatttcctcagcttattcttgcctgggaaagattgtatttcctccatttctcaaggatagctttgctggatataatattcttggttagtagagatttttttccccctctcttatcatcccattctctccaggcctgacaggtttctgctgagaagtttgctcatagactaatggggattcccctatatgtgactttgttatttttatttccttctgcttttagaatcttttcttgttttcaccttttggtggtttgattatgatgtatctgagagaggacttctttgagttaaagttatttggggatgtttgagtttcatggatctggatgtccatctctctgccaacacatgggaatttttcacctgtagttttgttaaataagttttctgtgtttttatctgtcttctttgaaaatttcataatgcaaacatttgtttacttaatggtgtctcataagtcccataggttttcttcattttttaatcctttgctctctctcttttcccctctggatgggttattttgagttcagaagttcattttgcttgatctagtctgttgttgaagctctcaatttaaaaaaattatttattgaattcttcagctacaagatttctgtttgttcctttttaaatgatgactctttgttgactttcttattcagatcataaattgttttcctgatttcattgaattttctactgtattctcttgtatcttgctaaggtttcttaaggtcattattttgaatttcttctcatgcgattcataaagttttatttctttagggtcagttactggagaattattgtggttttttttttggcagcatcatgtttccttgctttcttgtttcttgtgtccatgcattggtatctgcacatattgtggtacaatcacctcttctaattttacagattggcatattttgggaaaaacttttacctatagatgggacctagggtgtcagtagggtagagtacattgccctttgttccaggtgggtgcagtaatatagtctctgtgcaggtttttcagctgtaatcaatgtcagcaatgcctgtgagtacctctgttgcctagtctgcagaagtctgtggcaatagtggtagcaagctatagtgttagtttcctcattggctgccaaatactttttctatgtacattgaggtaattgtgtgctttccttttttcagtttgtgaattttggtaaattacactgttgctttttgagcgataaactaatcttgccttcctgaaataaaaactccacttggtcatggtgtatcacaatttttataaattgttgggtttgatttgcttttttttttagagttttacatcagtgtttttcaggaatattggtctttcattttcttttcttggaatattttctagttttactttgtcagagtaaattctggcttcacagaattatttgtagtctctcctgtcttagtttattcatgctgctataacaaaataccacagacaaggtggtaataaataacacaaatttatttttcccagttctggaggctaggagttcaagaagctggcaagttcaatgtctggtgagaacccattcttcataggtggcaccatctaggtgtccttacatgacaagagatggaaggacaaaaagatgtgaactattgtgaagcccttttttaagggccttaaatccattcattatggaggagccctcaagccattcatgatggaggagacctcctgaccctaatcacttgcaaaagtccctgtctgttaacactattacattggagattaagtttcaacatgaattttggaagggacacaaacattcaaaccataaaaacttcctttcacttttttgaaataatttacataaaattagtattattctctaaatgttttgtagaactcatcagtgcatgtgtctgagactgcagtgtgtatgtgcatgaagatttttaattagaaattctatttttaataaatataggtccattctggttacatatttcttcttaagtgaggtttggtagtttgtgttttttcaaggaagttgttcattttatatcaattgtcaaatttattagcatgaagtgattcactatattttttatatcttcttaacatctgtagaattagatgatgtcagtgtcacctctccagtttctgatataggtaatttgtgtgttcccttaccatctctttttccttcttcttcctgatgaattattttctttattattttttaaatttcattggtttctgctttgatccttattatctttttcttctactcttgtggtttattttgttcttctttgtctaggttcctaagatggaacctgatatcatcgatttgagacctttcttcttttttaatattggcatttaatgttataaatttccctgttaccattattttgatatattgtattttcatttgtttcaaaacactttcaaatttcccttttgatttcttattggagccatgaattattcaggaatttaatttagtttccaaatatgtgggtttttttagaggtatttttttttgttattgattgccaatttatttccactctggtcagagaacatacttggtatgactgagtcctttggcatttattgaagcttatttctggtccaaatatgtccaatcttggtaaatgttttgtgtgtacttgaaaagaatgcgtgctcttctgttgtttggtatagtgctttataagtgttagatcaaattggtcgataatgtcattcatgtcttcagtagccttacaagttttctatttattctatgaattatttagagaggggttttgaaatctccaagaaatgatgtgtggatttctttatttctttcctcaattctgtcactttttgctttaggtattttaaagctcacataggtttgtcaatatttagtatcattgtgctctcctgatgaaggtatctctttaccattataagatgacccttttcaaagaacctgatgaggtttcttgctctgaattctaccttgcttgacattaatgtgcccatttcagctctgtttgattagtgtcagaatggtacatcttttttaagattttatttttaatctatttgtaactttatatatagttttgttgttctttataggttctttatatataagacttgttggcagcacatagttttgtctcatgttttaatccattctgaaaatttttgccattaattagggtattctgaccatttgcacttaatgattattttattaggtttaactctaccgtctggcaatttattttctatttgttccatctagttttttccatcttttctatctttctgctttcttttggattgagtgattcttttattccactttatctcctctgttggcttattagctatatacctctttgactatttccatagttataatggttgctttagtggttatagcatacctctcttatcttatcactgcctacctcaagcaatagtatgctaattcacttttagtctcatgacctcaccagagtatacttctgttctcctttcccaacatttgttctattgttgttgtccattccactcatgttataaacctcatactactttatttttagtatcaaagtcagttttcttttaaagataaataataagaaaacaattatatatttacacttgtggttaccatttctattactcttctttccttggtatagattcaggtttctattggctatcatcttccttttgcctaaaggatttcctttgtcatttcttataatgcaggtctgctggtgatgaaatcttccagcttttttatgtccaagaaggtacttattttgtctttattttgaaagatagtttttccaagtatggaattccgagttgtctggggttttttttctttcattactttgtaattgttgctccactgtcttgtcatccacattgtttctcttgagacatctgctgtcattctctttgttactctatacagtgaatacagataatgtctttttatttctgtacacttttaatattttctcatggttatagattttgattaccatggcccagacacagttttctttatgtttcatgcataaagttcactgagccttttcctgcttctttgcaggcatggtaattttttattggatgacacatgtgaattttaccttcttgggtgttggatgttttttgtattcctataaatactcttgagttttgttctgggaagcagttaagttacttgaaaatagtctaattcatgccaggttttgctttaacatttgttagatagaaccagagcagtgctcaattattgagttagctcaacagctaactcccattccagaggcagaaccccgtgtactctattcaatgtctgtacaccatgaagttttctgtctggctgatgggaaccggccctccgtctagtgccatgtgtgcaccgggcactgctatctcatcatttcagaggattctttcctcagagtcacatattaatccactgagggttcaagggaccctctgcagatctttggatcttcttactatgcaactctctcctctccaggtctctttcacgctaactctggctgccctgatccccttggcctctcaggttcatattctcaactctgggagttttccaggctcttcctggattccccctccctggattgtggcctggcaactctctagaggcagtagctggccagtcatgggcctactccatttgattctcatttttcaagaatcactgtcttctgttgctgatttctagcacgttgaaaactacggttttatacattttgactttgtgtttgaggtttgagtgaggaagacaattcagtccatgtttgtccaccttggtcagaagcagaagttaatgtcatagctttttactttgaagactcagacaagttttcacaacacattccttctagagaataaagttaggctctgctattgggtgtccccagatgggaaccccacttatttttaggcttcagctcagacgctacttccttcagaagtccctttctggcacactaccttcctcatgtggcttatttgttcctcttgcaccagatcactccgcagcttttgagtttgtatatggcaacaatgaacaaggtataatcctcgctgtagataaactcatcatatttgtttttctccatggagtgaaaatgttttaagctcatataatgactatggtcagggaaaaagccacacaaataattaggatatgttgtgacagtgcacaaatagaaacacacataatgtgcttgagaacatgataaatgccggttttacctttccttccctcacctgaccaagcttagcgagacgtgtggcatcttcctcatctttgctcttcagtgccaggtatggaataggtccattatggacaggtgccttattgaactgagcagagccacgaatgtcaggctgggagtgtggtcgctggagtcaggccttggtttacatcctggttctgcttcttaaccactctgtgcttcgacaggagagcaggaggtcctacttagttttggacgtgctaagtttgggatgcctgctagagatctgggggaagcatggtgaagaaagctgaatgtgcaagcctggagttcaggagggaggtggtgtctggagatggaaatctcgagccagtagcagttggttcttagtgtcatgggacacaggaggtcatataggaagcaaatgtggacagagagtgaaggggtttgaggattgggtcctgggcacatccacctctggaggtaggggagatgatgaagagccagcaaagtaaactgagacataatcattgaggcaggaggatagcaggctagggcagagacctgcaaggagagagaagagagcctttcacaaagaagggagtgaccgatggtgtccatgcttctgtgtgcttgagtacagagtctgggattctcctgagcatcctttgctccactgggatggaagatgggacctgatgagaccggggctaggggaatgtcctgagccccacacgtttgtgtctgtgtgcagggagcgtggaaggcagttcctgcttggtgaggtggagctgagagcggtgccacttagcagctatctgtgccactctggtatccggagagaaggagccggcatttgcccatccttcctcctaagccctgtcagttgtgattggaacgatgcccccgcccaccacatttgctggagttggactagagctggtaatatcagggttttactttttagtttaatttcttgcacaatgcatggatgtttattgagttttgccaataaagagttccatagggtattactgagcaggactggtctgaagataaatgaaagttgtgtacttggaaagacaatgctgtattattttcaaacccccttgagaaaaaggccttttgcactgggtgagctctggatcaggtccaatacagacagccttgcaaaagtggtgtttcagggaacacaagatgggtcaaatgatgacagtttggggggaatgagtctttgaagagctctagccctgttcttttccctcggtggctgccaggcagctggtcttcactacaaatgcagactgtcacatgtcaagactactgcagagttgaagaatggggcacaggactggaaaaggtgaaacattcttctcaaaattccaccaatttttctggaataaacattccttgttttgctgtaaacatgtggttaatttcaagaattgtgaaaaaattgactgcaatctttttttgccagttttctctttgcttttacaaaggagagattttttttttgtcattttctgtgatgttacctaacaatgttctttctaagcaatgacttctttttttataaggaaactatataaaaaataaaatacagtaaccaaaattaagtaaaatgatcaattcttggcttttatttgccaatttattttaatatatatttacaaaattggacacatacacatatatattttggcatataatatgcatactttctgtcatttgctttccttagcaatatatagtgactatcttttgtcattccgtaacatatacgccaccatttttaataggtacacaatattcagatggaacagatgcatcgtaatttaacaggcatcctctgactggatgtttacgttgtgttcaatttcttacttttatgaaaaagtccgggatgaacatcctttcatgtactttttatgtgtttgtcccaatcattttaggagacagactcctagaagtgggatttccagatcaaaggttaggatgagaaagtaagcgtgtttgggggcatttggggagggtgatgtctgtcacacaatctagactgaaagctctccgtccgtccctgcacctgtttctcagcttctacctcctgctcagtgctaggcagcctgctctgggaaggcatgctcatttagattaattcaatcagtgggtagaagggtcactcaaatccatgaaaagtcctcattttaagctatgtcttttggaaatttcctcttttggcttttaagtagcaaaacctggtaaccttctgataccttggtgaagatcagtcagatctgtaagtttttgttgtggtcctactgtgtatccttgctgtgttcatagaggccggattaataagtaaatgagaatgacttgctcctagcacagatttcacacagagtgagttttcatttatgtctagaaatctgcaaagaagggaactttttctcggttaagagcaaatacgattgaaagtatgtgatgataagcctgagacatttgcaatgggcttaaggacttggttcatcaaaagctgaaaagattaaaccacgttcagtatagttttatgtttaagcataccatagttctctgaaaatggcagttccttttcctgtattagtcccttagcattatgaaggaatctgtcccgagacctttgagacttcctgcattcatgaatgtcaccgtcgcattcagtctctctcataacatgcagtaaaggccaactgaaaaatgcctgcaactcctccaggctcctgaggagactataaatacaagactgcagtcatttataaagctattaaaacaaagtggggcctgagcccttgctgaaatgattttcagagttgttttctctctaaaacacatggcaaacaatcgcatgttagaaattcaagacttggctgagttccactttttgtatcttactttatcccaaacttctgtgaaacgaccatgttgttcaactgactttcttgctttctattcccgcctccacactaggagttgacttccttttaggtaccatgtttcttaagaaataaaacctgccttcatctatggaagtgatcatattggataacaacttgagcccccaggaattaaatcccggcccaaaaaaactgcaaaaccacagactgcaaaactgcaacctacatcgcatgtagatactctggagttacttgcaggcagcagcatctgcagtggcagggcaggtggggactgtgctgttcggaaagctgaattaactagcacccacatttcctagtgcactaaggaatgacactctgcctgcgaaagagctaaaccccatctctgctcctaagtaaatataaacattccattccctaataccttcctctcatgctgttaacttcactcagctgattccagacacacatagaacacaagggctggcctagcagacctggagtcagcccaccgttaagttcacgcaacagtattcaccaatgatctgccatctccacaccctgctaggacatgggcgggtgggggaaaggctgtcacttaaagtctctgcaggagacagatggtaaacaaactgaaaagatatcagttggttggggggaattaagataagtggagtggtggtgattgaaggctcagagggtttctgaggacctgggtccaaccctggatggtcctggcaaggctgtgcggtaggcagaggaaggagatgacatggagaccctagcgtgggatatctagaaactgaaggaagagccatgtggctggggggacagtgggcagggagaaagtgcagggaccatgtggagctgggtgggggcagtggccaccatggggaaagtcactgtgtcatttttggtccaaactcagacgtttttgaaagaaaaatgtaggtgctattagtaatcatctgggacagcaggtgtcagccgggactgtacctggaaacccatgagtagggggcttagcggacagagatggtgacatcaccttacccctgtgttgcccactgttccactggaaagtgccgcaagctggcgagcgtgtgtcctctcagttctagccaccatcaccctggtctggagtccttcctctggcaggtgggcggctccattgacaagccagccctccgctaagacctgtctcctttgttcccttctctcctcttgccctggatggggcttttaggaacactgccacggaaatgcaagaaggagctcctggccgtgaagctaaggaaccggccaagcaaacaggaactagaagaccggaacattttccccagaaggactgatgaagaaagacaggagatccggcagcagatcgagatgaagctttccaagtaagtggcagcttgcgggcacagccgggcctgtgctctggccttgcaggcggagcccctctgagatcccacatcctgggtgtgccaggccgggacgcacaacccaccgtctgcagcaggtctcttgaccccgccaccgttgacgtttggggccgtgtggaggccctttcctgtgggggctgtcccgtgcatgctcagatgtttagcggcattctcggcctctacacactacacctcccgtgacaatcaaaactgtccctggacatcatcaaatgcctcctggagggtgaattgctccactggcctgtagcagccaggcaaggactgggccaaactgatgaggacatggcttgtcagtgttagagacaggggcagtctctgttcacctctatctgatcattttcctgcaagaaggtggatccagtgttgccagatcttctaaatttgtcaagtaaagctacccccccacccacatacacacagttatgcagtcacgtgtcacttaatgacaggatacattctgagaaatgcgtcattaggagattttgttgttgtgggaacatcacagagcgcactacacaaacccagagggcgcggtctgcagcacgcctggctccacgctgtagctgatggctccgaggctacaaacccgtacagcacatgactctaccatatactgtaggcaattctagcacgttatggtatagaaacatttctcaacatagaaaaggtacagtaaaaatatgacatacaaaatacaaaatgtcacctctgtatagagcacttaccatgaatggagcttgcaggcctggaagttgctctgggtgagtcccgagtgagcagtgagtgaacgggaaggctagcacgcgaccgtgcacctccgcagacttcagaatcactgcacacttaggctacgctaaatttacataaactttttttttctttaatagtaactttttactggataaactttaactttcggactcttataataacacttagcacaaaacacaaattatacagctgtataaaagtaatttctctttacccttattctacaagctttttatatttttcaattttttaactttttaaatgttttattaaaaattaaaacacaaatgccgcattagcctaggcctgcacagggtcagaaccatcaatcactgtcatcttcctcctccacagcttgtcccactggaagatcttcaggggcagtaacatgcgtagagctgtcatctcctatgagaacagtgccttctggattccttctgagggacctgctggaggctgctttacagttaacttttttttaataagtaggagtacactctaaaataatcattaaaattatagtgactacatacagcagtaacatagtcctttcatatcatgatcacgtgtgatgtactgcacggttacacgcactagactttgagaggccttggcagcacagtaggttttttcacaccagcatcgccacacacgttaggaacgccttacaccacgatgtcatatgacagcaacaatgtcacgaggcataaggaattttacagctccattttcatcttctgggacaactatcttatatgtgtcgtatatgtcgtgtatcattgaaatgtcatgaggtgcatgtctgtgcatatatacacatacaggtatatccacatacgcatcattttctggacaatatgtgcaccaagtccacccatctgccgtctggctgtgacccagagccacgggtgggcaccttctgtgttgcacccccataagtttccctgggtggtccctgctgtctgctgggctggagttggactgtctcatggggcaggacagagtggagctgctgcgtcttgctggttgaggtctgaagggatccagtcatgcccctgagacagaatgggggccttcttttggaaggcaaggctaccatgagccgggtggagctgacttgtgtggctttccaggatcgggcacctccctagttgctttccacattccagagccactggagttcagaacccctcggagcttgctgcgtaccccagtttgcgcccacggacactgcccaaaggtgccaagagccactgagcaggcatcggtgggctttcagaggaaagtcatgccattctggcagggtgggcctctgtttcccctttcaccaggccagatggcaggctaacgtgtctcgtgtgcggtaggagaggaaattctgataaagctcaggtgcaccgtcccaggagccacagtccacatctcctgcccaccctgtgaggtgtgagtcagtctgtgtagggctgggcttggtagacagtgccctggacagcccctagtccgctccttccctctttaaacctcaaaagccaacccttccctggagggagagacagtgccccaggggtgaggggaaccagctcccggagcgccagtgcctctgttggtttgctctgcacccttgctgtccccaggcccctgagtcactggagaccctgggaaaatgcaggttctgatgctgcaggtgcagggaggcctgagaatctgcatttctagcaagcttctagggctgccgacactgctcgctgctgggctgcaggccacactttgagaagcgagggtctacagcagggtccccagccagggaaccattgatgtttgggcccagatcgttctccgtggaggggccgtcccgtgtgtgtagtgtgttagcagcattcctcccgccttccactagatactagtagtacaccctccgcttctgaccaccaaacgtgtcccagacaccgcccaacgtcccctgaggtcagagacaacagaacgctccccgggtgagaatccatgatctgaatgttggactcccgctctgggcagattttcctctgagcagtggggcttttcatttcgaggaagggttgtttctggtctccgctggggagcttgagccccagtgttcccaactcccaccaaaatccttacttgagtgttttcacggtggagggccgtgaacgtaagcaggtgaggccggcccggggtggggctgtggatagagcacgaggtcctacccttccaggtgttacagagttgtgcttggggcgcaggtgcaggttgcatttctaccagcggttgggacagccctgccgctcggcctctgcatcgtggtgtcgtcatcccaggctttcatttctgcaagtctcagtgatgggacgtgtgttcctaaggcttggtttcctgtttctctgatttctggtgaggttgagcattattttcagcgtttatcagctttttggtttcttctttatgtactttgcctgaagttttctttatcttaatgatttttaggagtttacttttgaagatgtagcttctaatccttccccattttgagttacatgattcttctctctggggcttgtattttcagttttaaaatacttttctttgaggcacaaaagttttgatttttaaggctgtcagattgctgatcataaacttgaggagctcacagcctttttctgtgaggaccaagttgtcagtactttgaggtttgtgagccaggctgtccccgccacccctactcagttcaggcgctgtagtgatgaagtagctgtagacaatctgaggatgaaggggcatggctgtgtgtcaataaaactttatttacaaaaatagccagcggtccattgggtccagctggcactttgctgacccctgatgtgctttatggttcgcactatttgtaccgtgtttaaaaatcctccccagcctagaggtcatcagaattttattcacttctgttatttgcggttgcctttacctgtaccagttaataatggttttctatttgatagtcaaaccaagttctttcaaattaaaatactaagtgaattgatctaaacaacaaaaaaaaaggtaagtaatggaagatagtacatgtggttcaaaaaacaacaaaaattatggtggggcttggaatgagagatgcctggggtccccaccgccgactgtgaaggttgagaggaagttgggagaaggttgggctgccggggataccccaaacgcccccctatgtaagaagtaccaaaaacatgggccctgtggcttgtttttactccattacttactgaatctggaactaattttaaaccttggactggaatgtagtagctccctgctatttgtcaccatgtttaaaaacctggaattagacacagagaaaacagcagcggagtagcagcatcccaggaggtcagacatggcttcctggaggcgccatttgttttccctacagcagtggcttaattggtctccctttgtctctgctctgcctcctttcagagattcctccaccgtctcttgctaagtaattcagcctctggttgccatggcaacgtgccatctactgtatcccaaagaacatttgcgatttcctttttttaatttccagaaccttcatattttatcttctgagtgttcctgggccttttcctggtgaagcagtcactgctccccacggctaccccagaacacatccgtgtgcttggtctgggacccccaggaaagtcagggtcccatttgaaagagtgaagctctatgctgattttcacccctctctgtgtaggagctcagcttacctttaaaacctgtgtggatgcatcagcagagtatgagaggcccgcagctcctgcacggtaggtgtgcactggaaattatgcacagaggcacgggctgttttgcctccatcctgtctacagccaccatctaaggagagcagtgggaagcacctgctgccggctttcagcataggtgccggcgatgtgcttgacgtctgccttactttctttcatttatctagtcttcacagtaacccagtaaagcaggtggtactatcatctccattttacagatgagaaaattaagccttggtgagaaggtaactggcccagggccacgtagcttgcagaagctgccgtgcagtgagataggccatttgttagagccctagccctgggcctgggagaagcattctagacacgaaagcactgtggctccttgtttatcttaggcatggctttgaattttcttatattggtttggctttgatcagggtatcagctggcaactgggcaatgcaccaggtgtctcgggcaaaggacttcacacttgctctaaagcagtgcagaatgttggccgggtccggtggctcatgcctgtaatcccagcactttgggaggctgaggcaggcagatcacttgaggtcaggagttcgagaccagcctggccaatatggtgaaacctcgtctctactgaaaatacaaaaattagccaggcgtggtggcaggtgcctgtagtccaagctactcaggaggctgaggcaggagaatcgcttgaacctgggaggcagagtttgcagtgagccaagatcatgctattgtactccagcctgggcaacagggcaaagacaggggggttgggggtggtggcagtgcagactgtcaacacagcatggagcagtggggggttggacatcctcagggggaacatatagaaagagacactgcccagcaagggctctggaacagtgcagcaagcaggctagagccccagccgtctttgtctcagctgcgtgagataggccagcaccagtgtctcagaatctctctccttgtttgtgaaatggggatggtggcaatacctgcctcagggccctctggaagattccacattggtccctgaagaaagtcataaaagcacattctcagcagggggtgctggggccagagctgctgctgtcacagtcaaggctggatgcactcctgggcgagctgtcacctgcacggggcagaggccagcagcaggccttgtggcaggatgaaatgaatgctgctgcatgaacagcggtcacgatgctagtgggccagggagtgcaggagcattgctgttgatggggcttgagtgtcattcccattcgtgactgttgtgtaattttgcccgaagagagaggaatagggtaggcacctcctaagtcatgcacaaactgtcattccccttggggcgttctttgctcccaggaacgtgtgtgagaagctgattaatgctcagtagcatctttcaggagggggcacttagcatgttcatacagcagttagcggatctctgagtggcttctctgcacgttttgtcctgtggcctccagaacacgctgcaccctcaggtgtcctcccgggctgtggcctcccactcctgctctgtctgcaggagcaggacacagcgtgcagcgagtttagacgctccctcctctagatgtgctttaggcaaggcaggcctatttttggtcctggagacagaacgcacagaaatgtggagacagacagtgtccccgcagaggctgtggtttgggctgcaaggcggaaaccgtgcctggccagccaggggaccagcctgtctcaatggggccttcgttctgctgtgagcttttacctgaaactgcatggacggaaattttcacttccacagaaatggtgtttggtaaatttcagacacgtggaagcgggggaggaatcagcttccaatgccagccttcataatgacaccactaatagcatctgagagggtctgccgtgacgctgggcaggtgcagtgctgattgcctgtgatgccgagcagggaccatcatccctgctctgcagatgaggagactgggcagagaggctaagcagtgtccctgggtctcacagttcatgaatggccaggctgtgggctccagggccctcgctcccagccactgagccttgctgcctgaggccaagcatccggctcacaccttgtggacagggccgggaagctgatgatacactatagctaaaggccagtttccggtgaatgtttgtgttaatgaggtggttatggtccacgttcactgggctgagtcctttgcccgctgatgtctgcaaccctgaagttctgtgctcggtatggtgtgggtgctgcacacaggctccttcatggatcttactaccttccccaagaccctcactgaggagcgaacacacctgacatgggtcactcccggagcagggctgagctgccgcaagcgctgacggtttctcttgtcacagttatcattgccgccctgaaaaggctgcaaagtttgccttctgcctcagggttaatccatggctgctgggatggaaggtagcatttgaaattacctacagggggaggctgcacctgcagaacgggcccagttgatcctgtcacatccaatgtcattgcccatctcttggggtgcttaccccccaattacagagatttcgaattcatgtagcgtgcacgtgctaggcgctggggtgcagagatgaaaagatgcactcacaggtgataaattattgtgtctggtgaaagatgtacagagatagatgtgtggaccagcttcaggagggagggtgagggtgtcccaggcagaccagccagtgagagctcgaaggtgggaagcagcaccgccttcccaggactaccctgggggctgagaaggttcagggctgggtgagggtggcagggcagagggagaagactggaggggccatgggtccaggtggtggaggctcctgtgctgcccgctatgggttcccaatccacacagacctcctcttgtcattctgggctcagctcagatgtcaccttcctgaccatctcccagtggcacagcctcgccattaccctgtgtcacatcgtcccctgctgtgtttttagccacttccacagctgctgaaagtgccgtttactcatctgttctgttcgcctcttcagggtgtgcccactggcgtggcggggccctgctctgctcttctgtgagggccttgcccaccaaggaggcgctggctaagctggtgggaaatggcagatgaggaggcctggctctcccgagaagcagccagggctccctgggggtcaggagcgagggcatgtctgggaaacgcccctctgctgcagtgcagggctggtttgggagagcaaggctagagctgggtggggagacaagggtttctcacatgctacaggcccaggagccagcaccatcctggggacgcggggctgcagagaggacggcagagctggtgaggatgaacggcaggcctgtggctgagggaggagggcctgccagcctaggggtgggtggatctgcaatggtggagagggaatccaggaagaaggcaggcagacacaggggaaaggttatatgtccaaagggtccctatgccgtcaggtgcctggggtttttggcagtgcttccatccacttgtgcaggtgagactgcccaaggagcacagggactggaacgggagactgcccggtccatgctggacttgctgatctcagctgaggtcgagggtattcagagcccgtcgtggtgttttatacggtcctgtacttcctgttatccttggtccattttcttctacactatcttccctccagtttcacacacttggacagaagggagtggttgtttttcactgaccgccaggaaccacaacaggcttctgtgtgttccagtgaaataagccctatctgtctctcgggaatggagcagtgttaagctttttttaaaagcacaatctgaagacactggggtctggaaacccattttttcttgttctgaagcctgtggggcctccgcggttgggccttgctgaataatttggggttttaggttgggtacatcaagggtaaagggcttctgtttggatcaaacaggaggtggggggagggtgagattccctcatattgctgagaagggagttgggggctgagttccccgacttcagaggtgagacatctcacaagccagaccttgggactgtccctgtggacccaggctggactgggaagttcagggaaccctcgactcgaagagggttcttgttaatgaacagtcttcaaggagcaaagcccagactgttctcccagtgtggtgtacacatgaggagggacctcatcggggggaatttggcttcctgatattcaaaagcacatttgtctgctcagtctctgaaattgccagtgggacaatttccaaagggatcaccagaaagaaggtaaatgcagagacgaacaaggaactcatcatacccaggatcgttcttgatcaaaatgccaacagctgggcatcttcagccaaaagaaatgcagttgtggcaggaaagactcagctgtacttggggttctggtttttttttttttgtttttttttttgagatggactctcactctgtctccaggctggagtgcagtggcgtgatctcggctcactgtaacctctgccttctgggttcaagcgattctcctgcctcagcctcccaattagctgggattacaggtgtgcaccaccatgcccagctaacttttgtatttttagtagaaacagtgtttcaccatgttggccaggatggtcttgatctcttgacctcatgatccgcctgccttggcctcccaaagtgctgggattgcaggcgtaagccaccacgcctggcttgggtttcctgttttatagtgaaccccaaggttgcaaaacaggcgatgaggcttgtgatcatttatctttatggatcatgggtctgcgaactggatgagagttttaagcatgtcaggtgtgcaaacatctcctatggttgtgggaatttctccttgcatagccaccattgtctagagcagcagtccccatccatttttgtaccaggaaccagtttcatggaagacagtttttccatggaccagggaggaggatggttttgggatgattcaagcacattacctttattgtacagtttatctctattattattacattgtaatatataatgaagttattatacaactcactgtaatatagaatcagtgggagccctgagcttgttttcctgcaactagatggtcccatctggaggtgatgggaaacagggatggatcatcaggcattagattctcataagaagtgtgcaacccagatccctcatatgcgtagttcacaatctgctgagaatcgaatgctgctgctgatctgacaggaggtggagctaaggcagtaatgcttgctcgccactactcacctcctgctgtgtggccaggttcctaataggctaggttgccccagatgggtactggggttgggacccctgttctagagcagtctgcacgctggggactctgggtccatgacagtatttccttcctgtgtgataggcctcacagcctccactttgcatgtgaggaaatggaggctcagaattgttagtagccagtgagtagctgagtgaggacatgaacctgagtctttccagctcaaagtccttttccttagcctatttcacaactccctggaactcatccatggccatcctctggttcaaattatcctccacctaggcagtagactttcctttaaggaaggaagaaacttcttcaatgttttatcctcagtgcctggtacacagtaggctcccagctaattactgttgaatggatggttggttagatggatagatggatgattgtatgattggataggtgggtggttgggtagttagatggatggccatctggatggtgggatgattgaacaggttaatggctgctggggtaattgcattataagatgcatgagtataggtagatggagagacagctggatgaataggtagatgggtggataagtggtgggatgttgtgtagttagatggatgaggaggtgaatggagacattgttgaactaaatggcatcctattcactgtgcttgatgtaccctaatatctgtccatccatccatgcaactgtctcagcacgcacagtgggttagatggaatttcctaagagtttatttcaataaaataagagtttagttcagtacaataagtgtttattgaatgaatatctctctttgcatagtgggctctttggatacatttaagcaatgattccatttactacattgattataaccaacctattcagaagtgtatttgtgaatagtgtgagccctcaggacctcagtggccattgccaattttggagactggttctgtgctgtctccaggccagggtctgcatacgcttctggcgacaccactgccgtctggctgctgaccagcctgggctatttctgagctgcaggtccttaggccctcaggtgaggatactccagaagcctccacttcaccctcactggaaggaagtctctggtggaaacaagctactcctaaagctttctgagcacttgtcaggaggaataggagagaaagctttatcggaatgagtaagaccaatagtattaacccatgactcgccacaggaggcgggtgggggatggtgtcttcacagctcattcaacagagtagaagtcacagacccaaatgctccataagtgacctgggccaggcagggctgtggcatcctggggagtgtgcactcttgctcaagagggcagctgtcactcagatcctgtgggccatcacccctggccacatgtcaggccattgtggccagaatttccaagagaaaccgaagatttgatttttttggtgaaatagccttcatgtaaatgttgagagcctcttcctatttttaaaagcaatgtgtgcacccagaaaacatatttgtggaccagatttggcccgggaccacccactggccacctctgatgtgaagtcacttatgcacttgtattgggagaagtacatgtttctttacactgaggttaaggggattttcaactcttgagttagcagggaaaataaatgggtcatcctgtaaagtgactgtcagcagcggaagcctccagggctaccactgtcagtatcctagggagcctcagcgaacctgtctccttcctcgcatatgtgagggggcccttgtgtgcggccctctcagctccacccttgctctaaggaagccgcacagtgcaccgctgagaagtcaggatggacagaatgcctcggttcccagccagctctgcagttttccagcatgtgggcatggggaagtcacctcctgacatgcgccttactttcctcctctgtaaaagggatgtgactacaacagagcctgtcttttggggccacgggaaggatgcaatgagccgtcacacgtagaatgcctggaatcatgcctggcagagaggaagctctccaggaagaaaaggaagaaatctgagttccatgaggatagggaatttgtctctttcagttttaacagctttgttgagacataattcacacaccacatgcttcacgcactttaagtgtccaattcagggcttccaacatactcatagagttgtatttccatcagcacaatcgattttaagatattttcctcactccaaaaagaagcctctccctctcagctgtatctccagtccctagaatggtactgagtcctgtgggtactcggtgattttgcagctactgctgcagggacgaaggggaaactgcatgggaaggcatctcctaaacatgaccagttattggtgtcaccattccctttgcttcaccaacttgatcttcttcagatccttttcttctgcttcggcatcttttcattgtcatcattttatcttcatcactatcatcaccttcactgcttgtttatcatcatctttgtcattttcatctttttcttcctcattatctttccatcatctttagcaacaactttgtcaacatttttatcctcatcatcattttcatcatttccataatcacgaatttgccccatctttgctccctaggagacactcggggaacttgggctctcaatccccttgacgtctgggggcttggcctatgaagggaatgaagcccacatctaaagcaggttccggagcctctgctgagtctgatcgtgcctggagtgaagaggactcttgagaatggtgggggctgggcgcagtggctcattcccgcaatcccagaactttgggaagccgaggcaggagaatcgcttgagtccaggatcacttgctgtgttgcccaggctggtcaccagacctgggtgcccacaggcagataagaggaaggtgcctgagtcaccaactgcccacgggactgaggcacctccctcttatcttcctgctattttccagatcagcctgggcaacacagccagactccatctctacaaaaaatagaaatttaaaaacagctaggcatggtggtgcacacctgtgatctcagctacttgggaggctcaggagggagagaggatggcttgagcctaggagttagaggctgcagtgaactatgatggtgccattgcactccagcccgggcaacagattgagaccctgtcgttaaaaaaaaaaaaaaaaagaaaacaaaatggtgggaaggtgagtctgagccgggaccctgcagatcccacaggtccagctcaggttgccacccccgtgtgtggcctggttgggccggtgctgtcccagtactggccacccgtcaactgaggcacctggttgggccagtgctgtcccagtactggccacccgtcaactgaggcacctgattgggccggtgctgtcccggtactggccacccgtcagctgaggcacctggctgggccggtgctgtcccggtactggccacccatcaactgaggcacctggttgggccggtgctgtaccggtactggccacacgtcagctgaggcatgcagggctctgccatctatagccttctttggattccgagatcccaagaacagaagctgttggcatttagcaatttatgattttcttcctttttttgatgctgcagatttatccgactgactttcccagccctccagggggaccgttgctggggcttccggtctctctttgtttagaaatctcagggcaagtggagatcaggtctgttctgcacagatgcaccttcctgagctcttggcgtggcaccacctcctgcttcaccactgtggtgaggggtctgcctgtgaacactgcagagcctccaaggtcaagaagaccaccaagatttatgagggcactttcaaggatttgttgcaaaaatgcgaaggagctcacgaggcagtgctgtgagcaggctctgtgtggtattgtgggcagaaatcaacctcagccctaaagggaggggcctggtagtcctgcaaaggccggggcaggcaaggccagcacggatcaggcaaaatggtggctatcatgtatggatcttgtacgttctgcttttagatggaggtagctaagcaacagaacacacagcttccaaattgggacaagtttaaactggcaaatctcagccccagaggatataaatatgacgcttcatcgtcttgggtggaagtccccgtgtacagggagggaaagcccatctgtgtgtggcatgcagggtacagggagtgggtcccgagtcccatcctgtgcaggggagaggctcaggccccttctgtgcagtgtcaatatgaagtggccctgtccctgctgagggctccagggagggtcagctgctgtttgttttccttggttgcttgggaatctgtagaggatggtacagcatgttttgtaagaaaatgcaaaacaacatcaacccccattcagtgtcaataaaacatgattcccaaaccagggagcaggtggtttggtggacttggaggctgcctggctgagagccatgggctgagtgagcccagggaagtcacatggtgagtccaagccttgaaatgggtgtgtgatgtctgcctgctcagatgcttgcagggactaaataccacacagtcctgcttcacccaggatcggggcttagcgtgtgtgagtagtagtcatggtaataagagcacaaccatagctcactaacatgtatgaaacccatgttatgtatgaggggtggtgtttgcctgcattcatataaacataagacgtaaatgctattattggatgttcttagcagctaaggaaatggaggcccagagagattgggtaagatgctcaaagtcacacagctagtaagctagtggagctgagatgtgacccaggtgggccgactccagaccgcacgttagagccaccccactccctggaatagttgcacaggcggtcaggactggcatggttgttccaaaatcaacaaggacgcagactcctcttaccttcctgctatttacccttatgccggtgttgatcctccatggtccagggtggctgcaaaggcaccagacatcatattcaagtcccaaaggggcatacatctcagctgagtcagcttttccagagggctcctcccagaagctcctccacacacatctacctactgctccttggttggaccctcctcatgtggccgtggtcagctggaaaagagactgctctgaataggaccagcattcaggcataagaaggggagaagggagatggggtaggaaactcgcggcttctgctgctttaggtgttcaagttaattttgttacattaaaggaagaaaagaagcaacaaatgaagagatggatgagtgaatggaaagcattctgtctgttaggtagcaatgatttctaagtgatttctggagcagcctggtttgaggagtgcatgtggatccctatgggcttggagagcaccgccggggaatttaaaaatgccccattcctgaccctcccacactgggccagggaggtgagcagctggcaggaagttgaggaggaggagggaaagaggaaccctgagaggcgctgagagtgatgtggacaaacacagctaccccctccccagcaatcctaccctttctgcagcgatcccaccccttccccagcaatcccaccccttccccagcgatcccaccccttccccagcgatcccaccccttccccagcgatccgccccgcaacgatcccaccccttctccagcgatcccaccccctccgcagcgatcccaccccctccgcagcgatcccaccccctccgcagcgatcccaccccttccgcagcgatcccaccccctccgcagccatcccaccccctccgcagccatcccaccccctcccctgccatcccaccccctccccacagtgatcccaccccctccgcagtgatcccaccccctccccaatattttagttcagcaacagatgtttcctgaacagcctctgtgtgccactctccgcactgggcctaggatggggggaagaacaaagcagatgcgggggctgccttccgaagcttccattccaccagcaggcgtgggggaggggaggtcaggtgaacatgtgtgtggcacatgtggaatatgtggctatggctagacacgggaagggctgcagtgcagagtgaccgtgttccactcaggtggcttccagcatcccctcctgggctggtgggcgctggtgcacctcagtgccattgctgatgaaggtctgggtccggtggaaatggtgtggtctgcagatgaggtgcgcctgtcttttcttaaatcaaggacactttcagatggatttggtttctctctgactcggctcgttcagtcagcctgacgggcacctaccgtgtggctcgggccccgtgctgggcaagaccctgcctccagctcccagcctcactaggagtgggggatgggagtcacaggatgtgcccagtggaacagccgccagggcaggtgaatcctggagagcggcgggctgttcaggtctgggaccctgggaagccacagggaggagtgcatgggagtgaccctggaagcccagagatggagatggggaggggaagggctggcaggggccctgcccgagcaaaagatcagaggcagacaatgctcagcgtccaaggaggaaagcggaaggagctggagggcaaggcaggccctggtacctggcaggtgctccattggtgcctgtggaatggaccccaaaggatcttagccctgggagcaggcagtggggagcattacgtattctttccattttcaaaatttgaagaagggacttatatacatggtaaaaaataaaacggtacttctcactcccacctcatccatctgtccggagtcagccactgtccacggggccatttgtgatcattcagaagtgggtctttataggagtcctaacgcccagaacagtaatctgcagatattacctcccatgtgctgtgcccagctcggggtgagctggaacctgcggtagatccttcgctcggcatcagtctctggagggaggtaaagacctgtcctcagtgctcagccccaggtgactactcaaaaagccatttgaaagaagagatcataagcatgatttgttcatgctttaaacacaattttaaaccatacagatgtcacttgtttggccgtcactttgaggtagaatccaaggacatttctttgaggaaggatctaccaacttaagttatttttgctctaaacaaaggctggatgtgtctcctccaagttccactgacagtttctttggagaggagtgagtatttaaaggcacttggaagcaatctcagtgcagaatccttccagagttttaaggccccacctccccagatctcacttctctctcccacgcaaactgcacagtggtatttttagcaacttgcctctactgactccaaagcttagttttcatggaatttacattttcattttacacccatatgagatcatttaatcaatgtgcattaaaagcttaattacatttattacagagacaagtacacctggtacaaataggtttgggaacagaagcaaccagttcctgatccatgcacagctcagctggtgtggccaggcagttctgaaatcaacagggaggccacgaagtcagcacgggatgcccagcatggctggagccactgaaggatttctgcttcaagaagcctcaaccggtatctaaggccttcccactgatcagatcaggcccacccatttcagccaggacactctccttgacttaaagtcagctgatcacggcccttggtcacatctaccagacgccgtcacagcagcacctagaggagtgtttggttgagtaactggggactgggaccccaccccccataccattcaggttgacacatcaaattgaccctcacagattcaaggttggcagaaagctcatgagcagatgtaagattgcactcagtctctcactcacagcctctctcctcaggtgatttgtagagaagccactattcaagcaaagggcaagttcaaagcttagactcttaatgatgatgtggttttgcagtttctatattcacgtttattcccttttatcttccccagagtctggctgggagagccttccacataagggctaatggagcagcacccggttcctttctgtaatggcattgaattccactgcagggttgaacacaggtcctttaggcccaatgggcattaaggctctgccctgtgcttggctataatgaacatcctcatacgtgtgtctgtaagaggcccatgtggaaggatgttcacacacatcagaaatcttggaactggaactggcaggttagagaatatatgcatctgtcatttttgacctgagcattgaccaccagggaatgcccctgattgacagccccaccagtgggggggcggggggaggggctctgtctacactcctgtcaacattgtggattttccaactttctgccctctgctgatctggaggtggcacagtgacgtgctgtttggcacaaccacacactccatgtggttgttatttccatggaggtctgtgaatgacgatgaactttggacttgccccacaacagcagcccagttctactagtaaggcagagctgtgtcccacaagcccagaaccatgccccctgcagcggggcccctgtattgccagtggcttctctgttcattttgctgtgccagcttgagaggctgtgcaggggctggggattcagcagtgaccaggtagacaaagtctctgcccttggaggggtcctgagtccctaactggccagcttggtgccttgtcctgggttggcacacatactgccttttgtactctggtggcagctgtgcaagcgtgggactgtggtgtctctttcacaggcttggagggtggcttgcccaaggttgccttgttgctgtcaaaaccagcctttgggctcaagtttctcaatgtaaacctggcgttgccttgatgtcccattcatgtatccactcatgcattcagacactcattcattcattcagtcacttgttcattcattcactcgttcattcactcattcactcattcattcattcagtcactcattcattggtcacttatcacggaccaggcttggttccagggccctgagtacacagcattgggtactactgatgcagttcttaccattgaggtactcaaaacataaataatcaattctggccatgaaggccacaaaatacacaaatgcactggggagcaacctgtgcagaaaggagccagttacttcagctggaggagtcggggtgggctttctggaagaagaggtttaagctgaaccatggggagatctgggtaacaactttctcagcagagggaagggcccaggcagaggcgctgggtgggaatcagcttggcatgtgctgtggtctgaatgtttgtgtcctccccaaattcatgtgtcacccccagtatgatggtggttgtacatggggcctttgggaggtgattaggtcatgagggtgcagtgctcttgagcgggattagcgccctcaaaaaagggacccctgagggctgcattgctccctccaccatgtgaggacacagtgagaagatgctgtctctgggaaagtgggtcctccccggatgccgaatctgctggcacctcaaccttggacttcccagactccagaacagggagaaatggatttttgttgtttataagacactgagcttaggggactgtgttgtagcagccgcgctgggcaagggcagctcagcaggtcagcatgaccaaaggaggacaaggtatggggaggagggagatcagtggggtgggggaggggaggggtgctcaggggcttcgaggaggctggagctctgctcctcagcaggttgtctccctccaggaattccctgccacaggctcgggcctctgggtcctggtggctgagcacagatcttcgctgagtgtccctggtctgggccaatgtggggccagcatcttggttcttcccagctgactcaacctgggcttggctcacccttggctgggacccaaggaggccaggcagggtggtggggcccagtggggtgtggggcacattccttccagtgcgctcccctgccccagccttacacctggcattacagggcacatgctgtcctcaccctgcctctcacacctgctgtctctgcacacaccctcctggccctgcctctcacacctgctctctctgtacacactgtcctcactctgcctctcatacccactctcccacacactctgtccctgccctgtctctcatgcctgctctgcacacacagtcctggccctgcctgttacgcctgctgtctctgcttccctctctcacgtccttccctgcagggtgcgtctctccctcctctttgcacacatgttcttggcctttcttcctcactccactttcctcctttcaaaagtagcattggcagggctgggtgtcactgtgaatgacattctctgcgttaccttgactgtgagaacagaaagtgcctctctacaggtagatgcgagtttggtcctgaaagtcaagggcctggttttcctccggaggatttgaatccttccctctccctgctcccctcccttctctccttccctccctccttccctcccatagttctcaggcaccaggtgattcctcagtacctctgagagtccccagatggaaggtgacctggatgtcccttggtgtccatgttgctgtctttagcacctggaagaggaggtagaaggggcatgttcacggtggggttggggaagcctctcagggcagcccgggaaccatccggagagactggtgctggtgaccagctggccttcatgggcgggggtgcacgtgatcttggtgcctcacctgagcccttggaacacccggctccaggaggctgattggaggcgagacccctccccaccaccactggggctgttcctggtgcagagggtgaaggactcatctcatctgtatcccaggggcactaacccaaccctgggcagggcagtctagagtccctttttggcttagggtgggccacagagccaggctgacaaaacagaaatagcaacagtgatggagacagtgcggtgtgcagcttgcggagcccagggcacagcggcctggctagccccctcacatacggctctctcctttcagtctcaccaggtgagaccatggaggtgcagagaggagactggctgcacccaggaggtggaggacaagagacactggagagtctgggaggccaactccacgtacctggagttcttttctgtgctgccctgggagggagcccaggctccaggggacatatttctcctgcagggtggggttgggaggacagagtaggcaggagcctttggcctgaaggcttgtcactgtgggcacaagaggcatgggacaccttcccgacatcagaagccccccactgcaccaagcttggcggggcttcctggtggagttgaagttgccctgcctcctatgccctcaggacacaggaggcaggccagccgttctgttgccttttggaaactcagggcagctctgtggattgtcacagcaactggagctcctgctgtattttcaggatggtcccgggaggcaggtgttctgcagccatggggcactcccttagcaatgaagactggccccccattccacttgacttctgaatgtccctgggacactcatgagagtccgaagcctgtttatgatgacctgagcctcatcccaagtgcattgtggacacacacaggaggtattttggtggagctgtattacaggtggcgtctcctggaatgcaaaatgccagaaacctctcccacagattggggagggaaccttgctttgtccagagcttcaccaagaagcattcctccactagtgtctctcagggcatggagtgaccagtgtggcagctgtgggtctgtctgcattggtggctggcactgtgatggtgatttttctgtagcggcagcattggcattgtgtgctgtgtcacccaatccagccatgcctggcacttacttacctatcggaatatgtgttatttgattaaaacttaatttcctttttcctcctttatattgcagatagggtgttatgttgtttttttggttatgcgtgtcagggatttggaggaaaagggacaagacagaacaattgtaataatgggggtgtgtggggtacagtggggctgcggacccgtgtgaggagaaggacatctttgccggacagggacagtgtgaacagccacttattggtaaatgcagctcgacgtggggccatcacccggcatggagttttgggaggggtgggagtaggaggggctgctggaggggtcaccgtaaactgaaaggctttgctgagggccttggagtttgtcctgaggatggtgggaacccgggcttgagctcatcgtgggagtaggagttagagttatgctgctgtgggcagggaggtggacagtgtggaagtctccatcatccagggctgaggcttgtggcctggatcagggaagtggccttggggatggagagaggcagatggatggatggacggatggatggatgcaagcagaacccagcagacttggagcttcctggggtgttggacgtagggagtaagaggagccagttctcccaggggtctggtgtgtgcctgggtggtggctggagccagcccctgagcccaggatgctgggcacggagcaggtgtgaggaggtggggaacagggtgtgaaaaggtcggctttggactcagagtgcctggagtcacatcctccccggcatcccagaagtcaggactgctggctgctgagatggggcttgccccaggcatgtggaccagcagccagcacctctcagctgagccctcagtcggcagaacatccctgcttgctgtttcctagtgtggacacactccatcccctctgcctggatgcccatcccaggtctttccctgggcggtttctttcatcatccaggcctcatcttatggcctggagagtcctcttctcttcctgaacttctctccagacacacccacattgctctgacgctctgagacatagggtcaatgtgcctgtcatccgtgcacccagatggtgtgcgcctgggggcaagcagacgagacatctgccccattcaccatcagatgtctgaggatgcatcaatgcgtcgtgtgaatggtgtgtggagacgctgcctcgctggggaatcccatctccaggcgggggccgccagcttttctcagtgactcaaggcggctgtggggcaggattggcattcccagaaaggagcctcccaaaatagcccgggcgtcccctgtgggtgtcgagctgtctgttctctctaggaaggcattctgccttgtatggaaggaattgcttctcaatttctgctccacactgaggtgactttagatgttgattcaaaccttttctgtgacatctgtgctggggtgagatcaagatttgggggatgtgcgtttagtggggcagcctggctgggtggggcttcattggggaagcaaagcttggggagctggaactatgcttctcctgaccccgtgtccttccacttcctgaaattacctgcagcccctgctgctgtgctcatcatgcaggaaggcagtcagctgagcagtgtgtgcagaggacgattcagaaactggtacaaacttggcactgagacggcgtctgatgggagaagagggggtgtctgatgaaagaggctatgacagacaggagcatgtgcgtgtctggtggaagagggtgtgcgtgtctgatggaagagggtatgagtgtctgatagaagagggcgtgagtgtctgatggaagagggtatgagtgtctgatagaagagggtatgagtgtctgatggaagcaagtgagtgatggacagtgtgagtagatgatgaaagaaggtgtgagtatttgatggaggagggtgtgtctgatggagacggtgtgaatgtctgatggagagagcatgagtgatgaagagggtgtgagtgtctgatggaggaatgtgtgggcatctgatggaggaagatgtgaacatctgatggaggtgtgaatgagcagatgttgaaagagggtgtgagcatccgtctgatggaggaggctgtgagtgtctgaaggaggagtgattcttggggatccaggcctgcaaggaggcgctgggcaggatggagcctgcagctctgctggctgaaggtggaagagacctgggctcagcacgccaggtgaataatatcagtgctatagtagtaatgatgccacctatttgtgtgtcaacctcctcctgtatttagtgttctcgactctcccagcatccctgtgggttttgttggcaggtgttcacctggggaatcagaggctcaagtaagggagggcgtgacgccatcacccagctggcaggggtcagagctggaactggaatcctagctctgtgccagtgctggggcaccagtgctgactgtggaatagacagttgacagcctccacagacctggaaatgtgggtggcacagtggcatcatgactcctggagcctctccaggcgtcctgactgtccaggctgtcggcggtctcatcagctccacctctaggccccttcctccccattgtttgtcccctgctccctgtctcctctgtgctactcacagcacagggccaggtgtgtcgtaggtgactgctacagatctgtcgtgtgagaggcactcggaaccaggaagtgcctgtggggtcacctgtttggctggtgcccccttggcccccagaaatgactcacatccacacttgaacatacagacatccttttccagggtgtgttgtgctcgatacctttaattcctgtctgcattccagggcctgcccagcctcttcctggctccccagcccagcctggtccttccggcctccctgtcatccccacctctcgtgtgtgcacaagcagggaccaggtagggagaccggcagatgctgctctctgtccctggggtttcttttcttagtgttgctcccacacccacgcgatgctttaattaactgccacactcaggctttctcagtggggagagtcagaaatagactgtggcttccccagctccaggcggcaccaggacgtcaccagcagccccatttctgaatcaggagtctcaagcagctgcagagggtggggaggtttggggaatcccacaggggttctacacccccacctaccccgccccacccctctgcagggccttctgcagcttccaaagcccagctatgctccggccacgtctctagcggctcctcggagagcaacttgatactgaagctcaaagcccaggaagccctggcggcatccctgccccagccaggtccaagcaggctatgtagtgagggagaggaaccggcgcccattcctttgctcctcgacacaggctgctccccttgcctgcgccggctctgggggtctgctctcacagagcttcatgactcgttcaacctgactgcccttttcctggccatggttctgcctagaaaatttcctgggccaccctggcctgagtggcgactgtgtgtcagggcaggggtcagcacactgtggggcaggggtggtggcctgtgatgcatgcctctgcctgggcctgactctctgtgctgggagaatgcttcctgggcctcatcccagctgtgtccctgctggctagttcctgccagctggtgttgccggtgttcctccctgcctcagccctcccagcatctggaactggctgtgggttctgattccagctgtagtagctgctgatcacattcctctctctgagcctcaagggtctcgcctgtaatgttggcaaagtaattgtctgtccttggcatcaggctcgtcaccatttttccttttggaagccccaactctgcatgaagagttagcatagcttcaggtagcaggtggacaaaagggtatcttttatgtatacttagggtaacaagtattaatttggagtgtggggtgtttttgctctgtggccaacttcttccccaagtcttgaacacttcagggggccctcacaggcctgcagcacactttgtccttggtatctggtgggggtctgggcaggtccgtatctcttggtagtgggttcatctccatctctgttggacagaaatctggaagagtccggagagtgtttgcaaatgcaaatctagtcctggcacgcccacaccccatctcacccaggtctgctttaaatccttcagtgccgctctggggttccaggagtgaatccagactctctctccagcgatgccaggctgtgtgggtcctgcccctgctcagcctcggtgcacacacacctccatgcgatctaaacgaccccacctcaggacctttgcacatgtcctctcctcacctagcgatccccaatcatcctctggatcccaactaaagtgtcaccttctgggaagccattcatgtgcagattagagcctagtctgaacggtggcctggccttgttgggttggcagaaccaccctaagaccctgcttagcaccctcacctggcagtcaggggtcttcttgctcacctcaatcccctccactggtgagaaccacagggagggtcttggggcccacagcactgtctagggttctgcatccacccttccaggtgtggggtcctggcactctgtaagtagagaggcaggttggtgacaagccagtggggtcctggcctgagcacccttttgctctgtttacaaccctgtgcctccggggctgtgtctacccagaggactgcatattctagaccattcaggggtaccctgttgacattcagtgagaagcttggcagctagatgaagccctgcagtgagcgattggaccactaccagactgcctctgtgccttgggaccaattgcacagtttttgctggcttgatgtccacgctttcctgaggtgtaccagttggatgaaatgcttttctgggaacatggtccgcgatcagctggcaagtcacaggttgggttttcttgagaaattactatatcccaagcatgcattgtcacaaacatttttgtgcattatctcatttaatgctcattaagagggtctggtactaattctcattttggatgagaaagacaaggttccaacaaagggcggggggaagccttgttcgggggccatgccagtggacactagcctccagggacatttggggtacttctcagatttgaggaaatgcacagcctcactcctcaggtgtccctatgggtgttcctggctgggcagctggctcaagaattgtcttgagccacacacaaaatacaaatggctggggccagcatcgcggacagtgaaagagtttaccaaggcagttataggtaaagaaaggcaaatttattagagaaagtatgaagatccgttgcaagggtgcaatgggcagcacagtagagaaggggctgctggaaagaggcaggcgctggagggaagttttatagggttgtgccagaggggcttatgtgcagataagatagtactgctgggtcttcgagtggaacaaggtgtttggaaataggatgtcatgccagtgggttgtctgtgattagctggctctcagaacaattcttctcccccacctaggaccccttcctcattgttgcttacttattaggactccacgttttacttcccaagatcccattcctatacacagcctctccctcttagccagaggagctgtgcaaaggaagtaccttttcatgggtaaaagactcatggtgcgctcactcttgctgggcttcagggatttttcatttctattgctctaaaagtgcctgtgtgccttccccctccatcccatctccttcctgcttccgagcccttctgtgggcagcatgggggccaggaatctggcttgttcctgcttttcctatggtggtctgccccaccattattcacacacagaggctgttgggttctcttaccattccctgtttacagagactcagatacattcagaagcgagctaatgctgggtgcccagctctaaggggagaccccagacaactccaatttcctgatgatttctcttcctttacctaattccttctccaagacccttgcagacactgctgtaccaagtggattctgtgtaactctctcagaagtttcctcttccatgaagcctgccttgattacccacccccatcctcactccctcagtgtttaagcccagtgtgtgaacagttaagagacgctatggtcttcccacactggtttcttctcttcatttgggtctcagcgaaatgtatctctgccagattctgaatgtatctgcccctgcccaaccactcacccaccatatccgccatttcctccacggcattgaccactctctcagatgattttgttcatttgtctgcctttacctctagaccaggggcatccaatctttcagcttccctgggccacactggaagaattgtcttgagccgcatacataaaatacactaacgataggtgattagctaaaaataattgcaaaaaaaccctcataatttgtgttttcagaaagtttatgaatttgtgttgggcctccttcaaagctgtcctgagctgcatgcagcctgcaggccacgggttagacaagcttgctctagactatgagcttcccaagggcagggaagacttcccatactcagcactctgttctgggggcttggaacagtgcctggcacatagcaaatatgtcatagtcatctcctgagtgcttgaatgagtggcctttggggtgttttgactagactgcaaaagcaacacttaagtgagctaggctttgcatacattgtttgggactggggaggattccagccaggaattgtcagggggggaggttcaagtctcactgaacatcgagatatgatgtggaagcaaccacccacagagccagaagacaaagcccccaggggagcagaaccacaaagggttgtgttctagtggggagggaggagtggctgagccccgcaatgccctaggctttctgctgggacaaggattataaataggagataaataatttttaaatggaggcaacatcctcactggggcaaaatattatggccctaaattctaggcattcaaatactgggccctgttgtctccctgctgtggttagaggatctggaagtgggaaggtttctggctctggcccaaggacaatattattgtagtcataaaaataatcagagcttggcattaattttggatgatgatgcctccttctcctgacaagccctttatgttttttggtggtgactgttggctgcatcctccaacttcctcaatgagagaccacttgaaaaagaaataataatttgtcttcatatcgcacactccgtctgggctgatggtgggaggggaatgcgtgtgggtgggctcagctctgttagctgcgctggctggaagagattcccagtttttattcagcgctcgagctgggctgcatgcttgctgacaagaggcgggaggccccttagacgtctttagacactccccctgtgctgggctgggcacaggcggctctactcagcagttcagcaggcagaaagccggaaggagagatcagtgctcccaaggctggtgtctcccgtgctgacaacggaggcagtgctgggaagcatgaatctcccagcatctctggatccagaagcctgaaaacaggtggtgctacccacccctccctaagccaatgggcaggaaaaagaatttcctgaacagatctcctcgctgcttaaacacactgctccggtgaacagtccagaccaggcaaggtttgggcgacagatcagaaaaatgaagacctgcacatgtggagctggagcaaggactagtctagtattagctctgtgacgggagagctttgactgtcacctggaagtctgacttgattttgccagcaagaggcaacaaccaaaggttcactttctctccttccaattttgggaggcgatctataggggtttgccagccacctctcatccttgcagaccccaggtggaatttgcaggcagccactatggtgcaaaatgtaattttagtgtttttccgcagacggctgagccaaagacctgccgtggaagagctggagagaagaaatatcttgaaacgtgagtagctggtgattcctctagaggttttccttcacgtgtggtgaggctgttgcacaaatcctgagttcccataacccagcccttctctgcaagcggaatgctccatgctcccagtaaacctgagctgctgctgaattctgaaagcaagccccaaaggaaagctgatatacctagaaacattttttttaatttaaaaaaactcctttcctcttagcataaagatgtttttattttcagggttagtcccatatgtctaagtgcgttaggtttcaagcaggtcttcctggcagtttgggtcggggttcttcatggctatagaaatcacaaagcatgaaccgcatgaacacactagagaaggacacgccccttgcctgttacacttgggaggaataaagcagtcagctcagggaaacggtgaagccatgagaagctttcctgtggctcaggactttgaggttccaggaccctctgttgctcccagccttgcaaccccttgcatttcccgttaggtggacaattatagcatatgctgagcataggtgttcatgagtaacctccatgctctagggcactatattccattaaatattccataaagtcagtgatttaggggtggccaaacctcttgaaaaagtgtttctccaatagttctttatctagtcattttcagtttttaaaacattttccacagaaagtgtcttctaatggcttggatttttaaaggactttttttctctttatgtgatgaatactgcagactttctctgagtttgttttcttatttgtgaacatctttttatgaagttataatggtaccaagctgactttctgtcagaaaataccgcagagccccttgttggtctgggtactgaacttgaattgattcctccctcctttctttgcctcagtgccttcattaactgcctaaaacaatcccctcctttatagattgttgaaaataaccctcagataaagacttcttcattttactttttaaacttaagatatagtgactactgttctatgttaactataccatctctgaggatttaaagaaaagctcttcattgataacatgcttaattaagtaggcagacagaaaagtcaagctgtttcagttgccaaatatttgaatttttaaaaattaagtcacttatttataaagcttgtaagttgcagatgctactaaaagtagcagtccagacttgaaccaggcaagttcaagacacaggaagcaccacattccaagtagcctgctgtcagcaacaggaagagagtactacagcccagacctttaacccaggaaccatgtcttctttcagtagcagcctcttccttcctatcgtgggcaaccaggtcttcccatcagcaagtacttctaattgtgttaatctttggaaataaatatcagagccttagaaatagaactatctttggtgaatagggagctagcaaatgcataactgaaactgactgcccttaccttcagtgcatgaaagggaaaatgggtttcctctgcggtggccatggcaatcccgccataaacactgtgccttcatcagtgaatgtaggtttgtccttagctcggaagccctctctagtgtcctgagtggaaggacctgagaattttactgctaggtttgtggtgggtgtttggttttacttttgttctgtggagatgagaatagggtaactatatatagcctagtatgaaacatcatactcataggctctagatacacaggacttcaagcactcatactgtattgtattttcttcttgtaaccaattcttagaatatcacttttgtatttgcttcaagggggaactcatgactaactgcagtcatatctgaggagcactcaaaactccgcccatataacactataacgtggatagaaaagcagaagagcaggggtccctttatatggtgatggtaattctttattaggcccaatctgtgccagggactatattcagtacttggtatatattccctcatttaatcattgcaacatatttgtgaggtttgcactttttaataaatgaatattgggaaaaggatagcactagagttcaaccccaggtctgcctaactccattgcccatcttcttaactactgcatcagaagcagtaatacatttctggatattcatggaagtctcaggtataactgtccaagctgctggagctatttccagaaaatatgagtatagcagtcctgattatgggtcccttgctttgtataatgcagagggtgttctgggtctggaaataagaaatccataaacatatcactaaggggagctcagaaggggaggtctgtgggcttaggctaacagggaggacttcttggaggaggtctccaacagagcgcctggcacaaagcagcactctgacaggaactttcaaagatcagttctccaaagaccctgctggtgaccttcgtagtaattatggcatttttcaggattaaaaaaaaaaaaaagatctgactttgtttcaatcttttcacatggaagctgcacttgggagctgcccatggcctattttaaagaaatctgaaacattttacgtcacgtaaatccctcatggcttgccttgtctggacactttcacaatgtctctctaattgtatcagctttctgatgataccttaaaagtatggtttcttctggtttctcacttgtataaagaattaagcagaaagaggatttcattaccttttctaaaacaccctaatccaagatgactcacttaaaaaaaattactggaaagcacaatatattaaactctcatataaccaatcccacaaatgtataaatatttgaaacgcatcttttacataaaggcagataatgtgaaattgtgttaattgcaagtggcaggatttcccttaccaaaacctaccagtgtttctaggagtgctgattgttgaaatctctttcctaggaatggagctatgttcaggtcagggacataaggctttatttagcaacagagaacaccagaaataggacagccattatcttgtatcccagggggaagcttacgttttatactatatctcagcactttcgtctatttttggcttccaagggtaggtgcgagcacagcttgaatgttaatagtcacaacttaccaagcaaagctaattttgctgagggacttgggctcctttaaaaggcactgtcatataacagtgttcacgcttcagcaatggagagtcagcgaggttcatagatgtgttaagatttgaaatatagtctgaacatataaattccaggcaagcatatgctgcccaggagctgaagaaggtgttccatgttttatgttggttaaaaagtctgtacgcttattaaggaaaaaaattagtggcagtgctatttatattgaaatgtacatatacatttatttacttagtctactacagctttttttatgtggcatctaagtgctagatgtaaatataaagatatttggggagaaagacagacacagaggtgtctacttccttaaacaaacagcagccatatctgtggttgtttctaatgcacagaagggctgaggagaccaggttgggatgacagcaaagctttgcttagtacaagtatttctgtgtaatgagaccatgatctcctgagcagtgactgacaaagtgggaagaaaacaccatgagtgatgtggaattaacttcagctcccagaaatatggatatcttgggaacacttccctgctgaagagaagaacgtttcaacctgtttctctttgttattttttttttcctattttaatctttcacagaaaggaatgatcagacagagcaggaagaaagaagagaaatcaagcaaagattgacaagaaaggtagtataagcattttattgcctgaataataaaaggtggtctagagaacagctgcttcggtagcaggtgggatgggtaatgctaggtatcactctgtgatcatgaataatgttctcctggacatcatggcatcagttaaatcaggatatttgctcagcaacaatgaattaactccctctgacgttccctatggacgaagtccttccctagcacggtagcacttggagaggtgcacaatgcacatgacattttttacttatgttcaggtggaagccagaagttgattggcattttcttaatttacagtgtctaggaaaagcatacctgggtatcagtgttttagtcacattttacactcatcgcttttgttcacctccaatatgtctagaagttcctcagttgcagaaagctttattagactcaaaggtttgttctctgtgactcaaacagttaacatttactatggccaatacaggtagcaactctataaatcttaatctacttttaaagccttgaccatttctaaattcaagtgttctggattccccttcttcgttgtgctgctccataataattctcttgaaattaacagaatatccttcctaagctggacatataataactttattagtacttttaaaaagcttatctaattgtatctgaagccagtgatgccataaaatctaagttaattcactaaccattccttgagctggtgctatgtactactgggggtgtgactccttctgataaaatatgttggaggaagggggattgtgatttaagagtacagtatataatttcagcccttcacattagagattgcttgtatttgggttatattttccagtttcaggttttttttgttttgttttgttttttaagagaagtgctgtttgttcagagtacttcaaaaaagctagtttggcatgtgatacttaactatgatgatctttaattttagcttaatcagagacccactgttgatgaattaagagacagaaaaattctgatacgattcagtgattacgtggaagtagcaaaagcgcaggactatgacaggagggcagacaaaccctggacgagactgtcagcagcagataaggtacctaactgcctgtgctggtggggggtgttggatgatataataaaggcaaaatatgtcatgccagggagtttattcatagacaatgggagccctcaactatttaagggtatactgcagtaaatattggtttctcaaagataattcagggtcagattgagaagtggttctcagctaggtgacagttttgccccgagggacatttggcaatgtctagagacatttttgattgtcacaactcgggatgctactggcatctcctggtagaggccagggacactgctcagcatctcacaatgcacataacagcccccacaacaaaggattatctagtaccaaatgtcaagactgtggaaattgagaaaccttggtataagggataaatcaaaggtgggcaaggctgccataagagatcaactgacaagtttaaacaaaaagagctacagtggggacaaagaggcattcaagaaagcctctacagtatagaaaaggttctagattctccccctggacttgtgcagtttgaggtatctctgagaacctcctaagaagtctgaactgaacagctagagaggcaggaagaacacaaggaggtagtaggtcatagagtctctgcatgacatttggtgagcacagagagggtcagttcttgtctgtgatcaaacacttgactggcaagatttaagcccaagagtgtccatagagttttgtcaccttcttgcttctattaattttcagaagacttaaagcctttaggaagagaaaaattatacattcaggcaaggaatttgctaattgttcttcattcttcatatgctgagtatgagtatgtacacagatattgcatcaacttggagaaatgtgaacgtgttggactaacttgcctggttctttgtgactgatgtgcccagaggatcacagtgatgcgaggagaagtatctttggtggtctgcagatgtgtttgagtatgagaataatatacccctaaagttcttaaagactttccttgtcccagaggctgtgtttgatgttttcagtctcatcaggtccctcgagtgtttatctgagaaagaagtacatgatgcaagtgggcctggggaagccaaaatattaatgtatgctgaagttagaaaggcttatttctagattatctctgattataaaattccaagttcaccaaaagctgaagtttactcattatcttggtgttcctgtttcattagtgccctaagcatgtgcttggtccgtttaggtatggagtgaacggagtttggggaagggttgtcttcccactacagttcagcaaattaatgaatggaacacttacataatactagtcctagccagagcaatcgagcaacagaaagaaagggcatccaaactggaaaagagaaagtcaagttatccctctttacagacaatatgatcttatacctagagaaacctaaagactccaccaaaaacttagatctgataaattcactaaagccataggatacacaaaatcacacaaaaattagtagcatttctataaactaataatggactagctaagaaagaaatcaagaaggcaatcttatttaaaataggtaccaaaaatacctgaaaatgaattgaaccaaggaggtgaaagacctctacaaggaaaactacaaaacaatgatgaaagaaattgaagaggccacacacaaatggaaagatatctcatgctcatggatagaaaggactaatactgctaaaatgaccataaaatgaccaatgcaatccctatcaaaataccaatgtcatttttcacaaaaatagtaaaagccatcctaaaattcatgtgaaacccaaaaagaacctgaatagccaaagtaatccttagcaaaaagaacaaagctggaggcatcacactaacttcaaaatgtattataaggttatactaccagcataatattggtataaaagacacatagaccaatggaaaagaatagaaaacccagaaaaaattcacttatttacagccaactgatttttgacaaaggtgccaagaacataaactggggaaaggacactcttcaataaatggtgctgggaaaattggatatccatatggcaaaagaatgaaactgtacccctatttcttactatatacaaaaatcaacttgaagaataaagacttaaatgtaagaccccaaactataaaaccactaaaagaaaacacagaagaaacagtccaggacattggtctaggcaaacattttatggctaagacctcaaaagcacagatagcaaccaaaataaacaaatgagactatattaaactacaaagcttctacacaacaaatcaacagagtaaagagacaacagggaatatgagaaaatattaatatctgcaaactattcatccaaaaagggactaatatccagaatatacaaggaactcaacagtcaaaaaacaaaacaaataatcccattagaaagtagacaaaagacatgagtagacatttctcaaaagatgacatacaaatcgccaacaggtatatggaaaaaatgctcaacatcattaatcaacagggaaatgcaaatcaaaaccacgatgagatatcatcttattccagttagaatagttattaaaaaaataaaaacatgctggaaaggattaggagaaaagtgaacttttatatactgttgatgggaatgtaaattaatgcagccattatggaaaacagtatggagactcctcaaaatattgtttaaaaactatatgatccagaaatgccacttctaggtatacacgcaaaggaaatcaaatcagtacattgaagagatatctgtactcccctgttcactgcagcattattaacaatagccaagatacaaaatcatccaagtgtccatcaatagattaatggataaagaaaatgtagtgcgtgtatatatgtatatgtgaatacagtgtgtatacacagccacacaaaatggaatattccaccttaagaaaatccagtcatttttgacaacatgtatggaactggatgttattatgttaaataagccaggcacagaaaaacaaatatcgcatgttctcactcatgtgggatcaaaaaagttgatgtcatggaggtagacagtagaatgatagataccaaaggctgggaagggtggcagggtttggggagagaaagagaggttggttaaccagtagtaacatacaattagaaggaataagttctaatgttctatagcagagtagggtcactacagttaacaactatgttgtgtatatttcaaaacagctagaagagaggacttaaaatgttcccaacacatagaaatgataaatactggaggtagacatcctaaatacttgatcatcacacagtctatgcatataacaaaatatcacatgtaccctgtatatatgtacaaatattatgtatcaataaaatttttacaaagacttccagaatattagctacatactagcttggtaggactataataatgagtatggcagttttaatgatgaaccaaaaaattgtttgtttttttctgtatattacataatagagtcaacaaggattaggaatggttaatttataaacacgatgctaatttcctgatttttttaatatcctgtaaaacaatgtcttgtttttaaatttcaggcagcaattcgtaaagaattaaatgagtacaaaagtaatgaaatggaggtacatgcatcaagcaagcacttgacaaggtcagatttgtttctgtgaatttcatggtacttatttttgaaacacacaccgccttcccccgtcccccgccacaaaccatgtatccagctatacaaattcagcatttttccagagaactctattgaacaaatagaatgtacctcaagtaagaatgctgcctgctcccattatttcctttaggacttggtgaaaggtgatatgtatggtaacaatatcggtttatttaagtagttaatgcatatttaacaaaaataagcctcaaggcaatgaaagtaatttttctgtgtatttaattcccctctaatattcagaattcctccaatttatagaactcacctgtttatacttacagatttttgtgaaattagtcactccccaccttcacatttactttttcctatcgtaaattattagtcacatctttaacacagccagcgttctcctaaagctgagtatttgtttcctcagtaaatatttgagtaagtgctgagaatgcaatagtgaatatgataaaggaggctcccatcttcatggagtttatgtcccattgggaatatattggctgattctcccataatcaagacttttcccattaagatgaatatattctctgtctatgctatgatatgcaagggatgacactgggcttcttagtgatgacgaagttgggaaaagatttaactctctttacttattgaactgcatattttttcagtatttccccccacttcttttccatggccatgaccggtagtaattatgtgaagttctcaaacatctctgattctaaagcagatgactgtgatgcaacaagccttcaactgtatcagttgctttgtcttctcctttatctgaagatgctcaaggcccacatacaaagagaaaggaaatcctgcatatagatactgccttaaactaaaataatagctttagttttctgtttgttccaaagtggccactgcaattgttatctgaaagatttactctgtaagattaatgtggctatagaacagaaactaagtacaatggaattccaccttaaccaatggttttagggtgaatatatcaaggggaagggaaagttggatgaataggaaaaaattatgcaaagagtttgttttttaaggttccctcccatgactaacatacttttggggaggaataggtcatatggaggaataggtcatatgaatgtttaggaaaaacagtttcagtaaatcatgcacaattacatttaatgttcattctgtcttaaatagaatgaatacatattctatatattgcaatctcaattttgtacattttccgattatacattattaaatgtttagtaaagatgtttattgtcctaagttgatagctttctaaaataatgactctaatacttaaaatgtggtataaagaccctaaaattatttcaacaattcaagagtcagaacggtatttttggttatgagattttaagagttttaaaattactatgaacatattactctacaaaaagtcataactctactataattttcaataatttattaacaaattcatcatttctactgatttagcaaagccctggcctttctgtgtacttcaagggcttttaactcacaggtttaaaactaagttctagatagtcctaagaattcagcatataacaggggcctgagagtggggagccctctgagactctaccctattttaaccagagtagctccatcctcatgttttacatatgggacttctgagaatctttttaatagcagcaaatttatttgtataaggtttttggctattttaactgctagaaatgaataaccttaaattctttgtcttttttataatctctagattccacaggccatagagattttcttctgagaagaatttgtgtttaattttttgataccaacactgaacattcatcagggaactttcctgaagttcagctcaagactaccctacctgctgtgtttgtgagaagagtaggatcacacacacaggtgcaatcttgaccacacttacctgcaagaggagtaaccagaggacacacttccttccttctttggtgtctgaggagtgtgaactgttggggtcagttaagacccaacataactctatcagaagaaaactgttgtttgcctttcaaccttgttttacagttctgcagtgtaatggaggacgggcaacgtgcatgtgcaggctcaccactcccaggcctctgacatgagggacatgtgacagtgtcattcagtattatgttcaaaagacatttttatcctgatcataattaatttgaaaactctttaagttcatgttatacaagatgatttactgtattatacttttccttttttatataatgtctaacaaaaaatacagctgcaacattttgattcctgttaattttgttctttaattaaatgactacttattgcaggaaattaa

SEQ ID NO: 377 - DNA, 84726 bp, Homo sapiens
gagccttaggcggagcgaagagaaccggtcgcggcaatcctagcgcgcagcagcagcagcagcagcagcagcagcagcagcagcagcagcagcacccgcatccgctgcgggagtccgagccggaaccacacccaagtagctgccctttcctcttctgtcatctcaccgccccaccacagaccgcgttccccgaggaaaccggccgcccacgcccggagcatcctcccctgttgagcgggcgctgacggacccggcggcatgatgcggctgcgaggctcggggatgctgcgggacctgctcctgcggtcgcccgccggcgtgagcgcgactctgcggcgggcacagcccttggtcaccctgtgccggcgtccccgaggcgggggacggccggccgcgggcccggctgccgccgcgcgactccacccgtggtggggcgggggcggctggccggcggagcccctcgcgcggggcctgtccagctctccttcggagatcttgcaggagctgggcaaggggagcacgcatccgcagcccggggtgtcgccacccgctgccccggcggcgcccggccccaaggacggccccggggagacggacgcgtttggcaacagcgagggcaaagagctggtggcctcaggtgaaaagtgagtgtctccgcgaggcgcaggaggcctcgttcctttcggggcccgggctcaggctgtgtggggccctgcggtggggcgggataggagccgagggtctagaaaagagaaagaaagaggtgccgggcggcctgcgccgtctgcgccatgtgattaggcccggccccgcccgcgccttccccgcccgcaaccctccgccaggcacccacttcccttctccgcccccggcgggggtcgccctggtggggccgcggtggggcctgatgggctcgcctggcgtccccagcgccagagaggccgctcccctgcccgcgctgcgtgctcagctccctggcttgcggctgcagcgcctggccgcccgccccagccattcgtgggcgatgctgcacgaacatctccaccgagtgacatttaggagttgggcgttcagcagagcctttaccttcctgacttgtcgcttttcctggctcgtttccgctctgcctgccctcccttggtttctgccatcatccggttggaagccagatgtgacagagagctctttatatttcgggagtggctacctcaggcacgtgtagagccatctggggcaccggaaacaatgtttcagaagtgagattaggaggaatccggtcatgtggccgagaagatggggcacgcagtatagaccacctgtttgcataagggaccagctttggcttgtcaggtcttccgtgagatggggagatttttagaaataaaagttaaatagccaagatgaaatgtgacgtaatacactaactcagtgaaaaatctgagttgagtaggttttgtgacttcattgtgataggatgttgactcatcctgtatgtgtacggcacagtagtttagtcttaaagcaaaactggtttttcttaaacaatatgcaaagcagtctcctatatatttttgtcttgtgtaatacaaatggaccactttgttttcccaaaatgggtaaaaatttacggatctgctttcattataccttactctttttctggctttgtacgctgacactctaacctgttttgcttcccttttatttctgctgctatttccagctctagagttccttaagtcaaactgaaagtgagaacattgttataatttcaatctcacgcctgcttgatgttttcctgtaattgaagttgggaccttccagaaacttttctaaagttcttctcccagactgaaaaagattatttgaaaaaaatcacttgatgatgggcgaaatttgtggtattttgtgatgttggttttgtgccacaaaatagcgtcctgaccatggacaggttatttaatatcttgggttagatgacttaaatcctttcaagttctaaaaagctatacttctgttaaatttgtacttctctcatgttttagggactagaatgataatttaatctcatctgggactcacttttactttaacatcatccggtttaccaaggaagtaacgagtttacatgcaagtgcccaaggtacagaattgcaaaatgcagtcacaaccgtttaaaagttcatcttaaaggctacaagatgggaactgcattctagtaaaattatgtcttcaggtctgtgtctctgcagtggctctagtgcctctcttttttttcctcttttgtcaaacaggaaattgagcttcttctgtgattcacttgtccagaagtttctggtttcattgcctttttaataaaaaatcaccttttagcaagggcctcaaggttgtgaagaaagttttttaatttggttaaagtttctatttccttaatgatctggtttccaaatgtagctttccctctttggctcctttcattttgcctttatgtgacaaacatttctcttatcctgggaggtaagctcccagttgatcctgttatcctttctaatgcttagcctgcaaagcataggtcatccctcagtcagcagtccacctggtatgctagcactcactcaggactgtgccagattttatgtagtattattaaaagaaataaccatgagaaaattaaattaacattttgtaaaaggcttagaacaatatttggcgtgtgttaaatgacacataactatttattaaataaatgagaaaacattgcttcttcattattgtaaagcctgttaaagagattggccttggaatttcaggcttgcacatgaaggtttttaatttttttagtttccacaaaaatgtttatcttgagaaattgctatacatctgtcttatatgaaactatgtgagttgcactgtttaccttttgctctgctgataaataagttcagagtaaatttaatgcttaaccacaccaatttcatcagttcacatggctgggatatctgcgtttcctcctttccttggtcctgagtttatattttatttactttatattctggaaggaggcgtgatataagcaagttactttacctttttttcacaaactctttgaactaatgtcactttagactatgctgtttccatcacgcaactttagtgtggtttaggatacgaacgtcttaatatcacatagaaaaatttaatgatctttgctcagttttgtctttagtgatcttatttaattttgttatggttcattctgttatcttgaaaaccaactttgcttgcctctcttcgttttcaaaattgttctctcttctttcctagttctttttgaatttcctcactgggtaaaaaccctgaggctgaggcctttgtccctttcccacttgtctgccttctcaacagcgtatcccttctttcagctttgactctcatctttgtgtaggtaatacttcacctcttaatccaaagctctgttcttaaatttgtcgccacatattcaatgacttcaaattttaagtctgtaccctgatattcattcttttctccaattcaacctattttgcgtactgttatgagagtaattttagagttttaatttgaaaatagcactctcttccagaaaaccagcaggatctggaatgagcattatattaaagtcacaaactatgttatggtttatgccagcacttgcccatatggacatttttatcatacttttctctgttaagctggttatacttatttccataaagtccagaagtatgtatcctatcttagtgaatggtccctaggaagagtcagagggatagaggtaaggggcattattaagtttttttatttggacatttattttttaatgagaaaggaaaagagatacataacagaaattgggctggaaaaataccagcatatgtatgttgttagaaaatagataattcatacaggatgcaatattgaaagtattctgttaaaacaacaatgaggtcactttccccttctcagattggcagatgttaaatcaagtaattgggaaaataggaactctagcattgctagtagaagtataaattattagttcagttactttaggcagtttggtagtttctgttaaaaactgcatagctgtgatgtggtagttggatgtttgcatatctacatgaagtcgtggcattcagaaatatttgtaattacacaaataagcatgctttaaaatatatttatatttaaaagtaaaaatgcaagcaaaaatgatttcagctagctttagttagtatggatttatgttttgatagttcagctttatgttttgatagttatggacaatgaagggcaaagaaaatcatcgaggtgtatactctgaaaattgaattttttttttttgagatggagtctcgctctgtcacacaggctggagtgcagtggtgtgatctcggttcactgcaacctctgcctcccgggttcaagccattctcctgcctcagcctcccgagtagctgggattacaggcacccgccaccatgcgtggctaatttttgtttttagtagagatggggtttcaccatgttggctgggctggtcttgaactcctgacctcagatgatctgcccgctgtggccacccaaagtgctgggattacaggcgtgagccaccgcacctggtctgaacattgaatttcaaagtaagatgaaatgcttatgaatttcagcgaacattgaattgggtagattgaacaatactagtaaggaagttgagttagtatttggcagatataaatattaagttttagaactgaatgacaaaacctctgttaaaatgggggcacatgtttttatgatccttcagtattgcatttggttttaattttaaaagctaacatatttacaattcacttaagctaaaatcaaggtggaaagtatgtttaattttttcctttgggcttctcaggcagccccttagttatttttgatttcttcattattaaaaatttttttctaggtgatgattatcagtgagttttagtttttttttttaaattttatttttatttatttatttatttttgaggtggagtctcactctgtcacccaggttggagtgcagtggtgtgatctcagctcaatgcaacctctgcctcctgggttcaagtcgttctcctgcctcagccccccatgtagctgggacttacaggcacgtgccaccacacctggctaatttttgtatttttagtaagatgggaatttaccatgtcagccaggatggtctcgacctcctgaccttgtgatacgcctgcttcggcctcccaaattgctgggattacaggcgtgagccactgcacccagcccagttttgtttttttaaaagcaagtgaaaaaggtaccaataactatatgtcataacatttttgtgacctaatatttatattgaaatgtgcatcagtcattgataactttgtccatgatctgtaattaacaaactcatgctgttaatttatagttttattaatatttggatgaaattcactgaaagaacaagaattagattctgaggggtttagtctcctggacttttagctgcatatttccagaccttactcttttatagagaagtctacctacctcaaagtcagctaatccatgaaatgactaccaaatagaattcagccttttttatgaggcaatatgtaggccagctaaaagggagggggggcactattttagtccaaagataaatgtcactttgaaagaaatttgctgaagatatttgtgggtttctttgagttttaaaaagttatttaaaagaaatcaggctgggcgtggtggctcatgcccgtaatcccagcactttgggaggccaaagcaggtggatcagttgaggtcaggagcttgagaccagcctggccaacatggtgaaacactgtctctactaaaaatacaaaaattagccaggagtggtggcgggcacctgtaatcccagctactcgggaggctgaggcaggagaatcgcttgaacccaggaggtggaggttgcagtgagccgagatcatgccgctgcactccagcctgggtgacagagcgagactcttgtctcaaaaaaaaaaaaaaaaagaaagtaatagtaaaaggctgtactacttccttcttgtgatatttgaaatgaagaaaaattatgaccatataagctgaaagcctaattatagaatttgtgtgagggagctcaatcatgttaaatcctatataaattaaggttatattttatagttgcctgtctgtgccttttcacctttaagtcatttgctagtaagagaaatgcttaagaaaggtgagtaaacagatgtatttataaaaatagttattaattactgatatctctcagtgaggtacatagctttcacatagagatactgttagtacagttttaccctgaaatctactcaggtgcaaaattgctttggttatgaaacacattacttgtgagtcatcactgcacttagtgattttctgaccccctacaacgtagtagaagcaaaatgttaatgtaccttgacttccatttgggagtgtcctctgcttgatatgttaaattcattataaagaaatgtttatagtaaaagcattactttcgaaacatagaactgtagatgttgcataatgaataaaactgatagctttcaggattaagaaatatatttttgcctatttatttctggtacaggcttctaaaaaagatttttaaaattgtcttcttgatgaggatattttgagtgacatagacccgtccttcaattcttgatggtaaactttctgaagagcaatttttaagctctatgaggaacttacaaagtattcatacctttttaggaatctaagttcacaaaataaactgaagtgttagaaagatttatttcctattatttttggtacagtgttatgcatactagagaaaaatggagaaaaacgcatgttcaacattagtgggatagttaagtaaattgtggtacattcatatgagggtctcttatttagtcatttaaaatgtttgcaggtactttttaggatataaggtaatgttataacggccaaaagttagaatacagaattttctatgcagtatgatctcaagctatttaaaaagctcagaaaaagtaatagaaggaaataagccaaaatgacattagcagttgtggtttatgagaacgagcattgtttttcctgcctccttttgttacttttaagatttcccccccattataagtgggaaacgtctaaaacagtaaaaaacattccatagttttgaaaatcaaaggaaccacatctgttaagttttgaacttgtaaatctctactgtctactcttctaatatcctgattctggttgtataagaacagtaagcaccattacattgaaagaaaagtatgaaaataggttatgtatgaatttgcacagctcctgtttatcagcattgtctaatcatattcactggtacccttaaacatcaaactttaaaaatttaaaactatgcttgatatatctccctagtaaatgttacatatttctctgccatattaaaacattgtaatcaatagagtttaacatttcttgttcaacttatgtgtattttaaggatgcattattatactgcactgtaatacagtgatgctgtaagacaagtgctggcacactttccctgaaaggccaaatagtaaatattttcagcttttggggttctctagtcactactacaacttctcagttcagtggtggtagcaaaatagctgcaaacaataggtaaatagatgtggcagtcttccaataaaactttatttacaaaaagaggaggtccctgctgtagtttgcgtagccctacactaaaatatatttattggtaagttctctcatgccttgattggttctgctttaaccagtactcttaagggtgggtttgttcttttgtggatttttgtatcttgtatcagttgactgttcttcatgtctctactttagctatcctccttcactcttaccttctgtatccagttctgcttagctttttcaaaaaattgtggttaaatatacataacataaaaattaccactttaaccatttttaagttccctagttcagtggcattaaatacttctgttagttttagaacccagatgaatatgctaatgtgtaaaataaaagtatgtaagttgtgagtgaataaagtttatgatctcactttagtgtagtgatttggaggacatctatttttagcaactcaaaaactgagaattaagcttggaagtaactttaaagaacatttaattccagctcattttacgtattatataagctgcccgcagatattaaatgacctaaacaagttcagacagtattaggacttgttttgattttttatttttcatctattagcagcaaactaattcaatttatagagttaatttttttagattgaggattataagagatcttacaaacccttctccccagctgctgctttcttctcttctgttacatactccctataggttgttgttattcatctctacctgaatactgccttcacaagggagttcactcccttagaaggcagcccattccgttttcatagctgtttcatttttccttatgtgtggctgaagtttttcattaacttctacctatatatgttagttattctgaacaagttgtctatagtggtatcagagtgattgcagtgacagaattcatatagtatctgtattattccatctagactgatatattaaaggatacttggctgaagaaatgagttattggaaaaactaacagagttggatgttatagacttgatctccccagatcctagtcttcccacccgagacagccagactgccttttgggtcaaacttctgaagttgtgcaaacgtatggacaaattaccatgagctgacaggggcagcctgaccatttcctcacataaagtggcttttgtgctttttactttggtgtgctattaaatgaatttgtgctataaagtccagtcaaaacagcagcactaattgaatataatctcatctttgctttgacaggatgcagttttatcaaggcagaccagtttagttctcttatgtgcattttggttagaaatttattattgtttaagaattacagatattattcctaaaatagagtgctaaccactgagagcatgaggtggcagagcaggaagagtctggaactgggaacaaaggatgagctttgtaggactaattctggtccagccacttaagatttatgtgacattggacattctgcttgacttggatactcttaaaacaaaattttttttaaatttaaaatttaaattaacattttctttctttttttagaaatggaatcttgctgtgtcacccaggctggagtacattggtgccattatagctcactgcagccttgaactcctgggctcaagcagtcctcttgcctcagtctcccaagtagctgggactgtaggtgcatgccaccacactcttctaggactctcttttatctgtacactggggacaattaacccaccttaatttacctcatagggttttaatatgatagaaagtgagagtccttttttagcagtaaagccttaaaagatgtaagtttttatttttaaattcaaccaatgattagccttggggcaaaatcacttggatgataactagaatttgtcaatttgttagacttaacattcattctcatatgctattttactatatggtcagccaccatcaattcaactttctatctaacaggtttattaatctgccagtttgctggtgttgatagacggttgttatcagtcagctcactataaattcaaaatgatacactgattttaaaacaaccctgaattatcatctgaaggatcattattcttaaatgaaggcataaagactagcaaatccttttgtattgtgttattattaggcctcattttttttaatcccacttgaaaagacagtttttcattgtctcataggtttaccatactatactatgtgttttaagagttatgcgaaaaaaaaaataagaaagacttgaccccagccttgaagctttatagtttggggaggttaggtaatatgaaatgttatttaacaaaataagaccatacagttggtttcaattattttcctctgttcattttgtagttcttagtaaggattttttttttattttcttcctttcatttgatagttttttatttataagatttttgaactgatgaagatgagtttgccttgttgctcctaattacagattagaaactttcttgatttcccctaccgattaaggcaaaattaaatacttcatctgtacttgctaataaaatactttttgaaaaacacttctaccatagtatttgtctcatggctttagtcatatttctcctagaccacaaccttactttagggatctttattgctattgcttggcatataataagtggtacaagaaaaggacaaaacttagtgataccagagaatgctaaagagtatagagaatctggtgggggcaaagtcctgtgaaacaattgaaatgatcattgatagcttaagatttagggagaggaaggttttacacagaaggcatgataggttaaaaaaaaaaaagatgagatagcacttatttacaggtcattgagtctagtcaattacattggggaattataaggattaagttaggaataaatagtgtaaaactaatttatagagaactgcataccagactgaggagtatgaattccccctttggtatggggaaactaatttggtcagtggggtaagcaaagacagttcctcttttcatgttgcagaagttggccctgcatttaaacttaatgtagattttggaaggtagtctcctcatttacctcagatatatatattcagaatatatatattctcaacactaaaaaattaagtattcatataatagcctataggtagaaacaggcaccttaattcacacattctgtgctctagctgttttttgttctttataaacactaagtgaatgcttactttcatccctttggtctgtttgccagaaatctttttctgttgccatgcttccagctcttacccatctttcaggtttagctcagattccacctcatctaaaaaaaagcttgaccttattagaccacagtgaagtagttttccaaagtctggatgtcatagatctattcttgtaattcctcattttatgtacatgtctcctacttcttctagactgtaaatgatgtctaacatgatgtcatacatggcatgggatttttcttctttttcattaagaaattattttttaagacagttaaaggctaaagtaggggaaggaatgggtaaaagaagaaacaatatgatggtaagatgatcttaaaggcagcatttagaaaggaaacgagagagacagtataagttggagaagaagtaaaaaggtgagaaataaggattttccttcagattatcttctgttatatcctatttgaattgctgaatatcataaccattttatgtttttctcttcaggggaatctggaggattcatttgggttattaataattgttgatgataagatttgaaagattgctataatcctatttgtcattaaaacttaaatacttctctcaaggatttcctagttactatatagttaccaaaagctatagtttttagcttttgaattttaatgaaaaatacattattgtgaagaattaccagaaagaattaatttagggagagaaaaggggggttaaggcatgaatgatcttgagtagtttctgccttgtggaaagtttgaggagaatatttgagtatgtttgttcgccagactgttgaagcgaattcattctcagatcaaaatctgaggtttcaaatgctgaaataggtagtaatttctttttatcagttttgacagcttattttgtgagcttattttttagggctggcttaaattctttcccctatagataaaaattaatttcttgtttaaaagcaagtaaacatttgtctttttttgctagctttggcaataacgtggtcattttaattttttttcactatgtgccataagctaaaaaagtgtatattttacgttatttacatagcttttaggcaaagcaaataccatttacttgtgtgataaatacatagaaagcttattctgcagttttttaaagtgacaaactaccactatctgaagtttatttgaccaaccatttgctgtaaataattggtatgttattatccactgattttttgacagctggttcagttttttctttgaatattaggtggtgagtattgttaagctgtgtttaatggtattaggtcaggataagacctagaaaacttgtttgtaccttataaaagtaataacaagctagtaagttagagagccagtataatgtagcagtagtttggattcagaaaaatccatctttgccattgtgtaaccttggaaagcttcttaacctctgagcctctgtttcctaatctgtgaaatggggacagaggtagtcatttttttgaacaaataacaaatttgttgagcttctaagtatgtaccagaaatcatactatgttttggataacagtagtacctctgtcataaaatccttggaggattaagttagaatgcatgtaaaacacttagcacagtgtgtagaatataagtaagtgatcaatatattgtagttattattactaaaacatcccaaatgtattttttttggagacagagtctcgctctgttacccactctggagtgtggtggcacgatcttggctcactgcaacctccacctcccgggttcaagctattctcctgcctcagcctcccaagtagccgggattcaggcgcctgccacaacgtctggctagtttttctatttttagtagagatggggtttcaccgtgttggccaggctgatctcgaactcctgacctcaagtgatcctcctgcctcagcctcccaaagtgctgggattataggcgtgagctgccacgcccagcttcaaatgcatttttagaagttgtctaagagcaaaaacagtttcagggaataattatgtatcaggatatgtcattaaatattttaatgataaagctatgtgtttttaaaaaacatttgtgtgacattcagtatttaaaagtttggttaatcatagcattttagtgttacactagtttagttaattaagatttttaatgcatacttattggtaacgtttttcttttaatagtctttatgatttgtagaatttgatgtatacagtcttgccttgtccttctgtatatgttaagagattggttccaggtcccccacagctcaagtctcttatgtaaaatggcataatatttgcctataacctacatatatcctcccatatattttaaatcatctctagattacttataatacctaataaaatgtaaatgctatgtaaataagtcttatactatcttttgaatgtacgtttttttattttttttctgaatattttttatccgtgttggttgaatctatggatgcaaagggctgactaggatatgtaaacctagatcactttagaaataataactacaactactgtcagtggagtcttactctctgccagacatgttctaaagatattgaatgtattgagtcaactgatcctcaccacaaccctatgagggaggcactgttttattccctttctcagatgaggaaactggatcacagaaaggttaattaatttacccaaggttacacaactatagtattacagccaggattcaagaacttgtgcacttgatcttaactactgtgtagtagttaattgctatctctcccagattttataatcaggttaactatttgaataatatgtaaatatagtcatcatatttagaaaatccccaaaacaactgaacagagtgttgagtcttatcggaacgtttgctgaactctataatttgtattgggtgattgtactggggtgtataggaaggcatcaccataacggatggctgggcattagcacaactagagttgatgatcagggtttcaaaacctgggattaaaaaatgtgttaatgattttttttctacttgtttttcagtgtggtttatagtggtactgatttgattttggtaaatcaacatttattatgactgtagtcttgagtatatgagctcagctgtagtctagtttagtggttatttaacaatggatttagttaaaaatccagtagaatgttcatacaaggattaattttgtgttctttctacctctttagtaaaataaaacagggtctgttacctagcttggaagatttgctgttctatacaattgctgaaggacaagagaaaatacctgttcataaatttattacagtaagtttttatatttttctatcttaacttaaaaaaatcaataataataaatatatacagtattattgaaatatagtcttaaaggtcgtctgacatgtagattctgactgacaatatttctcttattatgttttcaaatttttgtcatgctcatttcaaggtaatcagtgaaagaaaaagaaagaaacaatgagaaacttgtccagaaagtgggtaatagtgacactaagatgccatattcatgttcaagtgttgggtagaagtttttatatacaggaataaaatcttatagttggtataagcatatacattatttgcactatatatttacaaactcttatttttttaaaaacaggcactcaaatctacaggattgcgaacgtctgatcccaggttgaaagagtgtatggatatgttaagattaactcttcaaacaacatcagatggtgtcatgctagacaaagatctttttaaaaagtaaaagtttctgccaaacctttaatggtgatttgctatgctatacggtgattctgcttttaaaacaaaattgcatctttgaaggccactgcttcctgtgtaatggaaaaaggggatttataaacatcatttgtttgaagaacttggtacatattaggttctataatacaccgggctaagagtattctttctttaaatctgttctaagcaaatttagccaccgatgtttccagtttacagtacttggagattgcattcagtttgagtagagcacatcctttgtcctgtcattgcttatattgatccccaattcatctgcatgacttgcacgctttctcagcatggtctctagttcttttccacaaggtgatttaggtgacatcataaaatgagagggcttcagacagacctgtgttcctcacatttacatacctgcattgtctgctcctctcctctcttcagacatattgatacataggcttttggctattttcattttcttcaaaacagtaaagaactaaaggcaactttggcgattaaagccttgatttggttgaatgagaatttttactttgatgttcctgtatttgcatatatttattatttatcttcattaatgtgtttctattagtttgattacttaaagatttaatggacatgtgtgtaatggatcccaaagaatcaaatagtattttaaactactactatttaagtagaaactagtataaaactgtaaatactactataagacattggctttttccagacatggatccaaaaaatttctgcatctactttgaaagtttgttatgtatggttgtatttacttttgttttatcttcttttgggggttgggtgatttgttctagatgtctcctggagtatgaagtcatctgaaggtataagtatttaactgtggttctctgaagtttcctggcatgctgtgaagcactgctgacagcttgggtttcttatcttttcacgaggaggttcttgtttctgttaacttagctgaccttaaagtgtagactttaggtccgtgttgcagttggtattaggaattttgacttccagaacctgctttttaagagacagaaaaacatcatttctaaatttatttgtgtctttgcggtaaggattatttttcgtgttcatgaactgtctgcacaatattctgattaaagtgctttctgtgggcattattttgttgtatctgtgaatgaagttgttagagtaatggttggtagatctgttgataatcagtaggggaactgctttggaattttaagtggaagcagtattttacactttttttttttaagagacagagtctcattctgtcgcccaggctggagtgtagtgacatgatcttggctcactacaacctctgcctcccgggttcaagtgattctcccacctaaattcccaagtatctgggattaagggcgcctgccaccatgcctggcttttttgtatttttagtgagacggggtttcaccacgttgtccaggctggtctcgaactcctgacctcaggtaatccatccgcctcggcctcctaaagttacacggttttaatacttgaaaaaatatttatgttttgtaaacatgttgttatgtttaaatatgaaattaaaaacaatttaaatcctctgattattaagccagggaactgcaaacattaaattttctgcctgcaattaagagatagtaattattgttttaaacactaatccaatttttaaaaatctatgcttgtaatacaggcagtttccaacttgacaaatgttttatggtctatatgagcaaccagtagaaaagtacaagtctctagggcataattatttctctttattcttagaatgaggtggttcaaaacctccaactgttaaccttttaatagctttcagtcacctggaaaggtgattgcttcagagatgttcttttctctgttttcaaatataagaagttacctagttagtgttgccagaaataaacttctccctttcatgcagctagggaggagatgttaaaacatgggattcatttttccccagagaaataatttataaaggtgggtaggtttggttgaagcagtgtgttaatattttacctaaaatacattgtagattaatatttttagactttttcggtaatctgagaaaactattatgtgtgactttttttaacttgggaaaatacgttctaagcatactttttggagtaaaacctgttcgaaagttggagactgcctgtacccaggttgatagtcaattgtttttaatgctagtaaatcttaacactaatacaagtaaaaatatttgtgtggaaaactaatcctttctttattcgtgcatttttaactttataggtattaaaactttctttgtatgatcataattttttgatctttttgttttgcaagaaagtgaatggtagcctttcatttgtatgtttgattttcttaaaaatttcatatttattatgttattttacaaatgaaaaattatttgtgagaaatgttttgtcaatcattgtgcattagtttttagttataaacacttaaggaaagaaaatgattattcccggcttacagataagaaaactgaacaaaggacagagatatatataacttgctgaaaagcataagcacctcctcagagttcattttatatgacttctcatttcctagttagactcatggtatctatattaaaataactcccaagaaaaaccttactgtttggaatggtgatcggtatgcagttagatactctcctgagaggcaaaattggctttgtcagcctgttaatattaccagtgaaggctgttggaacagctttaccagcaccttctgctagagcagaacatttgtaaagtttcactgagtgtataattttgttaattataaatcctttttttttgagatggagttttgctcttgttgcccaggctggagtgcaatggcgcgatcttggctcaccgcaacctccgcctcccaggttcaagcaattctcctgcctcagcctcccgagtagctgggattacaggcatgcaccaccacgcccggctaattttgtatttttagtagagacagggtttctccatgttgaggctggtctcgaactcctgacctcaggtgatctgcctgcctcagcctcccaaagtgctgggattataggcgtgagccaccgtgcctggctaattataaattcttttaaaggtactgattaaaatagttaaatggtagtaggttaataatttaaatttgttcagcagctctcatttttgcatttataacttcttgaaaaatgaggaagtgcatttgatttgttgtagatataaatactggtttaagatcaggaattctatttttctttcctctgagaaaggtgttctttgatgtacatctcttgcaactctgatacttggaagttggattttagaagctatttgaaacattaaaaatattaaaataatggtaatacttttgagattaatattgaaactatctgaaaatgattgcttattgaagtaaatatttcttagctctggggtgtcaatactatataagttatggaaattaggactgtaatttttttaatgttgtaatagggggatccttatgactgaaacaatagtcatttctattaggattttatttttaaactgttaattttatattgaacaaatgagtatatattattctgaattcttattaatagttaaactgtgaaacctggcttttagctttaatttggtttcatctagaacaacttgaattaaaatattgacatttaaaaatttctcatttattacagactaaacaagaaatactgagagtatcttactcttaagatttattatcgttggtattatggcttaacaccgtgtttagcaagtcttcctttgttaattaaatattaattaaatattctattactgcattacagagacttaagaagctcagaatatacaattggctgtaatccatttgcaaaacgttttaaaggctacgttaatatactgattttctggcttaaattctttttagcaaaaagcagaatacagttcaaattattagatttcagaatatcatgctctcccatccacttggtttactatatttttaaaatacttttttaacagtgaaacatttttattctgcattatatttacatatcttacattaaatagcatattgtaatataacatttttggtgactcaaataatataaaattaattattacactacttcatatgaaattttatttcaaattagagattatttttacaagcatatcaacagacatttcatttaagacataaattaatctgactaaacaaagttgatataattaaggaaaatatgttataatgcaaaatgtttaatttttgaatgaaatgctagtaatagttatataagaactaagagatgtatttctgagattacttggtaaataaacaagatctcaaccttggcagtctgaattttgttaaccagatgtcgtcatgctgaatgttaccaactctgattgagtaagaagcttgtttcagatggtcttaatacttaaacctggtggaacgccttgtcttaatttgtgacacaattttaggcacatccagattaatctcttacacgttcaacagcttacaagcaactacttgaaagactgctagaaggaaagataatgtagaaagcataatttatagaatttagttgtataaaatgataaatttatctattatttaaatagtgtcctaattattactgttattaccaagttctgatatttgaaatgtacccagtttattaattatctttttacattctacagatgtgttcagagcaacattgttttgttgacacaagcatttagaagaaagtttgtgattcctgactttatgtcttttacctcacacattgatgagttatatgaaagtgctaaaaagcagtctggaggaaaggtaatgcttttgatgtacatattttcataaccgaatcacttaataaattcagcttaatttgaggtctagagagtaaattgtgtagttgtgttttgctaaagaaaacactttagcttcgcttaagaaatttaagtgaagccactggatttagtgtttttacggtattttaaatatttaactttgttattctggttaaagagaaatctaagggtaagaattttttattttcagatgatggtgatggattttaaatttttaagttaaaaaatcttattcagaatttctgcagatctgatatccttcagtattaaacgaaatgtttctagtttttaaaatcctgtaaataatactaggaactatttgattttcatatagaaagttttcattttcttttgttttaactttgggtagctttagtataatccagttggcccttgaacaaagcaggggttagggatgccaaacccacacgcagtcaaaaatctgagtataacttttgactcccttaaaacttaactacttataactactgttataagcgttaccgataacataaatagtctattaacacattttgtatatttattatataccgaattcttacaataaagaggataaaaaatggtattgagatcataaggaaaatatatttactgtttattaagtggaagtggatcaccatgaaagttttcattgtcatcatcttcatgtttagactgaagaagaagaggagggattggtcttgtgtcttgggggtggcggaagcagaaaagaatctgcatataattgcactgtttgaagtttaaatccatgttcaagattcaagtgtataacaacttcagtgtaaatacttactacttacttttaaatacttgattcctaatgttttagtgaaaccctactagcacccatgaccctgattaaataaatttacttttttcctgcttaaaaaaaaaaaaagttcaagttcctctgctagactctcctgctaaacatgagaaagaaagaatgcattggaaaataagaaataatagagactgagaaaagtcactttagatctcataattctcaagtctgttttgcctttagttttcatgagcattgttacagaagatagactatgaagccactgagtgttgtagaataactagtcattggtagaaggtaaaatgagataagaaatttgttggtggaagaaaatacattatttgtcaatattatatctattcatttctttccaatcttttggataggttgcagattatattcctcaactggccaaattcagtcccgatttgtggggtgtgtctgtttgtacagtagatggacagaggtaagtttatttcaaattcatgaaaaccaactctaagccttaacttttgtataatggtgagaatgacatggagaagatcatcttttataatggaaattagtcctaacaggatataatttcaaaaggtaaataaatttaaattttaatgtaatttttaaaaactcaaacagtaacattatattaagttttatgagacatctattttattcacagttgtagtcttgttttttgagtattattcaaatacctgcagttaccaatttgtttcagaaaagcaggcttgtcaaaacatgacactattctctaatgaactgactactaataaaattagtccctatttctcaacttaacattggtaacccatctgtcgttgtctttgttccttgtgttcctgataaaattagcatgagaattaagacagtgcaacataacgtatcccaaagttaaaagtcagttgcaaaacatgtaggatttcatgaagtccatgaaagcagcatttgggaattgcttacattgcaggcacagctgctgacagatgaggaacttgcagaattataaaaaggatagtgatgtgagggcgctttagaaagaatgatttgatttaaaaatcaaagaattaagagaggcccttggaaaatggtaaagttctagaatattttttcaagaatgaccgtgttcattgtgctgggaattagacataaagattgttatcatcttataatttggttttattagaaaattacgccaaagagaaaaatcaatattcttttttcactcatttttaaagacttagctcagagatatattcctttgttttttgtttttttattaaagtatttctgttttatcaaaatagaacttacataagatgtacaacttgtaagtgaacacagcttgaaaagtttatatcagagttgtaattttacctaaatttcgttaaaactactaaaagccgtttaacctagtaattttagattttacttttcaagataatgttgcaattaaaaaccttttttccttttatgaaaatttgatcttttatgttgcccaggttagttttgaactcttggcctcaagtgatcttcctgccttggcatcccaaagtgctgggattataggcatgagcccctgccccccagccaaaaatctgtgactcgtaaggaccttcattttaggtgattttaatttttttttactaattatcctcaagtacttacagtaaaaaatatatgggttagcccattcattttgaaagtaaggaatctgaggaccatagttgacatgatattggcaaaggtgaaatgaacacctaggtctcttaacttctagtctattttttctttcattattatatgcctttatcctcatttgggtcagtaaaatgtactgagcagtcaccatgtgttgaattaaatgttgtgtgctatgaagggacacaatgaaatgaaaaggcatggtgactttatcccttgaagcaaattccggtagggaatggtattcctgtttttgcattttaggaaataatttatcaagtaatggaagtctttgaatttgaagaaaattattatcatgtaatattgaatatgatttttctcttcttaaacattctctatgtctcttagtttttttatctagagaattcagaaagttgacttcagaactagaacatatgtatttttaaatccaaaggtagtaagacaagctcttaatcattttttagaatgattgtcaagtttgaagtaacaatcttatatagtataactatatagtttaagattatagttacacatgaataaatttgataggaaaaaaatatagtgcccagtttcattatgaatgactttcactatgaatgaatgctttgtgatgtgttgggacattgttcagggaacctgggaggtatcagtaagtaaatcaaagatctctgcctttgtgaagcttacattataattgggttggccagaactttttcattcccaaatcttttctctacttcatgtacttctcagtttggtggtaatataaagctttctttttgctctgttatttatctgcatggtaatgatgactgcctactgaacttagtgccagctctgtcatgtttataaaactggatgcttttttttttaatggggcccaggattgtgagtggatgtggcttgcaatatgaggcatttgtagacagggtcccagagaatagtattgaatctaaactgagttctgtttaactttttaaccatggtttagtcacagcttacagctctgagttgaaaaaaaggtgaataatttctaaaagggctagtttattttatgtgattgaatacacgtgggagtaaggaggagcatgctcttactctcttgccctcagaggaaaatttccacattacatatttattatctactttaaaaccattattctgttacgtgaatactttcatgcttttgctttttttcacagtatttctcttaaaataaacataggtcaattctgtatccatggggtctgcacccatggattccaccaaccacagatcgaaaatatttgagccaaaaaagatggatagttgtggctgtagtaaacatgtacagacattttttccttgtcattattccctaaataatacagtacacctatttatatggcatttacattgtatttggtattataagtaatctagagatgatttaaaacacatgggaagatgtgtgtaggttatatgcaaatgctatatcattgtatataagggacttgagtgtccatggagtttggtatcacagggattcctggaatccacctcccacagatatcaaaggatgactgtacttaaatttattctgtaattttgacataaacttgtggttgaattatgggaaaatttttgttggaattgttaacatgtaaaaagaataattccaactatgcagttacatttttttcccagttgatgttattttttaaaaatctccttttaaataggcattctactggagataccaaagttcccttctgtcttcagtcctgtgtaaaacctttgaaatatgccattgctgttaatgatcttggaactgaatatgtgcatcgatatgttggaaaagagccgagtggactaagattcaacaaactatttttgaatgaagatggtaagaattacataaacattggttgaaaaaagaaatgtctcattttcctatgtaaatctaagtcgttttaaacattttttgattaaaattaaaagtatttgtcatgtgatttctatataatccattgagagagtttcatcacctacttttaaaaatgattattttaggcatctcataccactgggaagtgggctagggagaacatgaacttctctcttcataaccacctttagggaaatatagcgaaatctcaaaatacatgagatttgctttaaaataatttagttaaggcagctgggagtgctgggtatgattattactatatgttggtaattattgcagctaaatgataggtgcatgggtgtttgtatattattctatctattatattgtatatagtagttgaaagttttattgtggccctggttgagatagtgaggattattatttttcagtgagtgtttttactttttatccttataacattaaaaaatttgaaagaaatgctttgtgtttaatgcttggttaacaaatctttttacaggaattcaaaagaaaaggggaggacaaaagtagttagtttgatctgatagagattttaagtctaaacatcatttagctgagtgcaaactaagttaaactagtcccatggtttggtttctgttttttaatcttctaagcatatgctgtgtttctgattgatgagttaagatatagaattgaagaaagtgagagcgaagtttgtagtaatggctgtgagagatacacttttgtactttttttttctgctgtataaaaaatgaaatgtgccttatactcattattttattagtttgtaagatgaagtcataagactggtattttcttatgcttctcatcctatttattttgagagcagttacattttctttcccattttaccgtaacctttttattctgatgctacgtttggttttatggacattactgtaaattaacaacttcaataaggacatcatatgcagaagcactttatttactaagctcattgacatctagatttaatattgaaagaattaatactgttattctaaaaataccaaatattttaaaagaaaaatttaatacttttccatgaacagcaaaggagaatagacatgtctagtgaattgatggatttcgagggagatatttaagaaaaaacaaatatagtaatttgaatgtttagaggatttcagaaacaaaaaaacaaaatgggcttggagcaaatgaaattaacagtataagtaatgaatttttttgccatatatatttatggttttaggaatcatgaattattgatactgtattctatataagaaaaaatgacaaatcagagatttagaattgtttataataagaataaaacataaagtttaacaagagattttgcctcgatattcatagacgttttctaagcctgagccaacaccctgagtcttgaaagtaacagtaaatacaggcttcactatattacaccttcctgaattctgattagagcctgtgctcttgagtcctgatttagtttagcccagcaaaaacaatttgaagatctcgttcatatttaaaattgcaagggtagatttttggtgaaaccatacactttttgtgtgtgtatgtatatatgtgtgtatctaaaataataaatttttaaaaaataaatatattactgttacaccagctttataagattgtgatgatttattaagactaatagggatatggtaaatagagaaattgtagtagttttttttttttttttgagatggtgtctggctctgtcccccaggctggagtgcagtggcatgatctcggcttactgcaagctctgccccccgggttcacgccattcccctgcctcagcgagtagctgggactacaggcacccgccagcacgcctggctaattttttgtatttttagtagagatggggtttcactgtgttagccaggatggtctcgatctcctgacctcgtgatctgcccgcctcggcctcccaaagtgctgggattacaggcttgagccactgcacccggcagtagtttttaataacagtagtttttttttttttttgagacggggtttcactcttgttgcccaggctggagtgcagtggcgcaatctcggctcggcgcaatctcggctcaccgcaacctccgcctcccgggttcaagcgattctcctgcctcagcctcccgagtagctgggattacaggcatgtgccaccaccctggctaattttgtattttcagtagagacggggtttctccatgttggtcaggctggtcgcgaactcccaacctcaggtgatctgcctgcctcagcctcccaaagtgctgggattacaggcgtgagccaccacacctggcaataacagtagttttaaaatgtttgcaacatagaaagttttggtaggaggtggctgatattttttatcattataagtgagcaaacaagttactttatggagatgtcagttttgcaaactaccatctcccagggaagtctttttctaccttgtagtgatcgggttaatcaacaaattatttatatagctttccttgtctgtattgttaacagctctggagggtacatgggccttgcttcttggaataacttttctgactacaggatacagaaggcaattacatatttctaatacataatgggagaagacatacttaagcattgaatactgttagttgtattatcttacaagtatgtaattgacaggtgccaaaatgtatgtgctgattatatgtgtggaggattgagaaaaaagaggagttgagttaatttacatgaggatgacaggactgaattgataggatgaattgtggatggttgggaagaatgtgagagggcactgcacattttttccaaccatcctcaatgggcactgcacattcttcgtaaccatatatatcccaaccagatggagaatattttctctatatctagagaatatattgtaaatgtgtgtaatgtcagataattgagtttccttaactccagtttttatttggcactgtaaaattccaatataataccgaaaatataaatatccaaattaaattggaaatcctttttaatatttttcgttctttagtatatgtattagcaaactttgcctcagcctcacctgtgaacaaaacccttgtaaggttcatatgcttagcagcttgaaaagcttcttttgatataatatgaaagaatgctgtgtattttattgcctttggggaaaataaatacttgttaaaattgatctttttttgcattatagtttaaagcatgttcataaatttcagatgtcacccatgtccattttgtcagtataacacgctctgatatttcgttactttaaatgatagcctttattagtgttgtaggttatttctgccattcaaaacttttttaaattaaaaattctaaattaaacccatcaactccatcttaccttaagacagagcagggaagcaagaaaatttcacggtcataggtcttaggccgaggttttatactgcagttaggctggtggtgtgttacattctctctggcgggtttccggatgttcagatgtctggcttttgagccaaaggcagaatgagcaattacatacatctgaaaattgggctgtcatgccttaaaatgatttagtgttctttaagacatcttgagtgtagtatatgtagcatttgcagagtatttatcatttggaaaatatttaatactcacatttatgtgataccatttggagtacatagattagcagtcttctaggactgtagagtctaagcctgataatgtcaaaagctctgaaatgacagataataaacatccatacaaataaaagtataaactaatttatactaatttaaactaatttaaactaatttgggataggcaaatcttgattgtaataatcagatataacacaaagattttattttaacttttgaaacttggcattatgaatacacccaaaatgtaggatatttttctttttatttatttatttttaattgacagataaaaattgtgtatatggtatacaacatagtgatttgaaatatatatgcattgtggaatggctaaatcaaagtaacatacattacttcatatatttatttgtaatgagaagacaaagtatgctttcttaacaattttcaagtacatataatacttgttattaattatatcatgttataaaatagatctcttgaacttattccccctgtgtaactgaaattatgtgtcctttgaccaacatctggcaatcccttctcccccctcccccacttctggtaaccaccaggtagataaattaagatgttgaggttcgcttgtaaatagatgttttcactgtccccaagattttatttttggtgcttgtgtcatgcagtgaatgagaatataatcagttgagttttgaaattcttatttattgtaagaattaggagaagaaataggagtttggattaatgtaaagttttaagtaactttaaaattatataagaaatacaaatatacctttattgtcaggaaatacagaaagcctaaaaatatcccctataggctgtgcatggtggctcatgcctataatcccagcactttgggaggccaaggcgggaggattgcttgagtcctggagtttgagtccagcctgggcaacatagggagatcctgtctctacagaaaataaaacattagccaggtgtggtatgtgcctgtggtcccagcttctttggagtctgaggctggaggatcacttaagcctgggaggtcaaggcttcagtgagccatgattgtgccactgcacttcagcctgggcgacagtctgaaactttggctcttaaaaaaaaaatcccttataattttattattctatgtaaatcacttgtttgtgttttgaaatccttctgtgtatgtgcttgtatataaagataaaaataaagcactaagaaaaaagcaaaattgagtacgttagctgtgctttttccaaggtcatttttagtatagtaatattactcaagtgtttaagtatttgaaataatggtattgcttttatattttacagataaaccacataatcctatggtaaatgctggagcaattgttgtgacttcactaataaaggtaaaatgttgatgtttcattttaacctagtaaaactttttttttttaacagctaaggcataaagatgaatctgggattatttatgtagaattatgaaaaattttctcttggtgttaagaaatttgtcttatggtatagtgttaggatctttatttcaaaataaatgatgtagtcatttcaaggcaaaattaaaacagatgactcattgtaaattccaacagtcatttactcttgacttgaagatctggaaaatatttaaagtctgctgaagaaaggcatagaggctttttttttttttttaaagttttgatatttttcctttcgtttccttttggttcttccagaatgaacagttataaatagaattaaaggcattttactgtatatttgttattagtatatgtgggaacaaatgttctggtacttaagacaaagtacatttaccctcaaatattctcaagtctttgatactctcatgagctgaaatcacagtttttattggaacttgtttcatttggttttacttaaatcatgccataattaaaataaataaggcttattccaattatggagttatattttcttatgctttgaaatttgcattgtaagggttttttttttttttagtgtttggtttgcgttaataattggaagatctagtattttaaaataagtatttgaaaatggttcctgtgtgatagatttttaaatctaccacacgattttagatgtttcagatttttaatttctaattataaattttatttatatttaaataaattttatttatgtttggaacatttgtatacttctttggtaaatctgtgcctatctattccaagttagaggaaagcataactacatggccttgtaaatgcattactgtggataaggtaccctggttacatgaaggatatttgagtataaatgatacccttggcccagttcacaaaatttcatctaacttgtatactagaaagcctttcttaacttttaagagttttatatctgtgagaaaaagcttttaaaatagaaggctggtatcttaagaatctatatgtttacttgttacttcaaggcaaattctttgaaagtattggcccatttaattcttataactctaatgaagtagatgttatagccaagtgtttttaaaatgtaactaattgtaataggatatggagaaagctgtcagtttgagctgaaagaaacttgaaaatgcgattatttgcaaggcacagtcctagctttaggtagcttactttgtagtgtgggatatgcaaaagtaaatgggtccttataagaaaattcaataaatgctgtgatgagagaaaagcctcattaataattgcttagatttgaacaagtaacttaaagtagaaataaggaaacacatactataatgtatgtgttaatgcttgatgacaaaaacaccaaaagtgtttcttcccagaaaaatatccacataccataattttacataaactttcaggtgttcactactcttcgaggctgatccatgggtcctagtttaagaacttttaaactgaagagagattaacatacactacgcatagtctcaaaagggcttatgtaaataattaatagaagacttccttcactgcacacagttaaaaatctttcatttaatgattcatgggtttaacagactacaccgaaatgctgcatgtgggaattgcatgtctggttatcatatcacactatcatttcattagtttcacttgccatgtttagtcatgagtcataaactatacattgagctgcattttagtatgagtgattataaacaaagttaaaagatacatacaacataagtgtggttcagtgttcaacagtgcaaaaatttaattgagtcatcttgtacctacaaatttgatcagtgattttcataaaaatttaaatttacaggcaaagttggaaatgaggcttcaggatatggtttatatttaaggtcactttctcctgagtttttgttttgtttttagcatgtgtttcacaagtgctttttttttttttttttttatgaagttcatacaaatcttggagagcaaagcctgatataaccctatgtaaaattgaatgccccagaatatgtaatatttttcttaggatcttttagggaaaggattaaattcatataaatatctataatgtgatctctgcaaattgtatgatcacataatatttataaattggtattggtttgaaatttaggtaataaaaccatagccaaaaggccttaaaaattgtcaaacccagttctcttactttatataacggaggaaactgagaacctggcaaggttgtaacagcagtagaattggacttgaactaaatctcctgatactcaatgtgctgttcattacaattcactctgccatatttaacgtaggtgtttgccatttctcttgatgacatctttaattttagttagcatagttatattgccccaaatgcagaagtactatttccttaatttgaactggttcaaacgataacaatttattggtttaaaagttgtatctcatttgatagcaagtgttacgtagtcattcttcggacattagtcagtaaagaaacaggcccttttccaagatgcttgcatctgagtacccaaagccacggatatttcaccatggctactagaggtgaattctgtttttagctcttttaattgatgaccttaaggctatttgtgatttttttttttctttcaaaattcaggaatttatcatggtgccattaaaatcattttcttcatgttaatccccccaccccaaaattaagtagagtctttagtaagactcttgatttcataattttgtagtattgatattttttccttgtaggattggtggtgatcctcaggaaatgggggaagaggcagagcaaatgttcaaaaggattagcagattgtggaaaaaaggagaatttggacagaaggagcctgttgcataaattcttaactactaagcttataggaaaactccaatatttaaaattttaaacaaagctatataggtaaatacctttttaaaaacaaatgtaattttatacttaaaatgcacataatttttaaaaatcataagggtattatacttcctctctttttctctgtggtagctactaactttaaaggaatactttttgttgtaatctgttttatttgggattgtgataatgtgtgattgcttgattaaaaggaaagaacaaaaataaatttgaaaggaacagttatttttatatgatgtagcagtatccttacgtatttgttttcttttcactggtaaaaatttcacgtagttttagtttaaaagttaagatctggtgataacttaagggttaggataggaaaatgaggacaacatactgcaaaataattgccacacttaatgctttttcatgttagaaatagtaaaagttacactgtcttctatgtttttacctctcagagttttttgttttttgttttttagagacaaggtctctctctgttgcccagtctaagtgcagtggtacagtcataacccactgcagcctcaaactcctgtgctcaagtgatcctgccacctcagactccagagtagctgagaccacaggcacaggctaccatgcagggctaattctttataaagctagggtcttgccatattgcccaggctggtcccaaactcctggcctaaagtgatcctccaagtttggcctcccaaaatgctgggatgacaggcattagccactctacttggcatgcctcattctagtggtagtttccagtttttgtcatttaaagaagttcaattttctttttaatcaaaagtatttttgaattttaaaaattagggttttttttctttctctttaaacaatttgtaatcatactcattgaaaatcaagacaagcttagttaatgtatatgtgatgttcagtttggttatgttagcaataacctgttaggcatgcttataagacaggtttttaaagtagtttgtgactctcagagtaatgcatgatgccttggacttgcaacattcagaagacaggattatattggtttatttacttcttgtttatatcagtttatgctttagttttttttttttaatgaaaggtagagcatttattgtcaactgaaaattgttctgttactttatttttagggttgatctatgaaaatactagatctagaaaaacattcttttttacctggagtgtcttattttttattttcctaatactctttagctttaaaccattttctatcataagactaaattaagagtatttcacaaaatcgtttttagttacctctttttgcctttttcctctatgatctctaatttttaattggcttgcacctccatactttatgaatggaatcaagtgcgatacttacaaaataactctgatgcattgattttaaatgagccattttattattaaatttattggcagatgtccttgttaacagtgtttttcacctgttataaagtataatacatgaatcaattcataaatatgttgtaaaaactataaaacattgcaatatagttacattaattttttaatagataatgttaaaactcagtgcctctatcaaattttcattcatacagtattcttcaaaggaatgtaaattctgtaacttgacaggcatatttacagaaaaattttataatttactttttttttttgagacgaagtcttgcttgtcgcccaggctggagtgcagttctgcctcccaggttcacgccattctcctgcctcagcctcccgagtagctgggactacaggcgcccgccactgtgcctggctaattttttttttttttttgtatttttagtagagacagggtttcaccatgttagccaggatggtctccatctcctgacctcatgatctgcctccctcagcctcccaaagtgctgggattacagacgtgagccaccgcgcccggcctaaatttgtataattttctggtaccagaatctgattacccttttcaaacaacccatatgggtttgttttttaaaaatcatttggtgagtggattagaaattttgataagtatatttcttccaatttggtttattttaaaaatgtttctactgtatttactacaaatgattatagctttttcaaaaataatacagtatctaataatgcttgtacagtgatcttcaaactgggataaatatatctttggattccatacttggaattctttccaaggaataaaggggcattgacagttttaagataagtcagtttcaaaatctgtttctagatgcgccttttaaaaaattaatctgcctttagtccaggtgtcctcctattttccaaaagaaagacatagtctcatgtctttcaaattttagtacagtgcactgcttcacattgtaaaaacctcagcccaccagcaaaagaggacattttgaaatattagagtcagtgttattaagggtgtgaaccattgtaataactggtaataagtcctgttatatactaggttgtttccagttctttggtttcagcaaaatcgaaagggaatcttaagttgtcagtcaataggagcattagcataatttttgaggctagagtactgtatgacttttggcatgtaatgagctggaggcatataaagaactgagtaacattgctataataaaacttttaaaatttcaatctacttgtctattataagcaattcacacctctgtaaaaattaaaaatcggaagagaattagtcctgagttcattctagcaatagaagatatccactgatatatgaactaaaaatcaattactgtttcaaatgggaaagaaaaatactcaaaaggaaaatcttacaaattagtatgggaaattattagcaaataaatatttttcctttaattttttattgtgaaaaaattcaaacatacaaaatacacgagtatgaccagctctcatttatgcatgcctagcttttatttttgttaacatctgtttctccacccagctcaccccactactccataatgataaagataatggattttttatcatttttagttttgattttgcattgggggtggtttactctcttttgtatatgtaggcatgtgcttttcctaagagctttgcaaataaactttttactgtaactttttcagaattaatatgacatgttaatgattattagatctcatctatccttggggtacatggagtcgttccaagagatacacaagcagatatagtttattgacttaagttaaatgccatttccagggtaaataatatgaacaaacaataatcaaatgcctttacatttaaatgaggaagtatgggggagaaacattctttagtcaatgcaattattcaatacaggcatacctcagagatattgcagatcacctaactaaagtgaagattgcaaaaaagcaagtcataccaattttttcgttaaccaatgcatacggaagttgtgtttatactatagtaagtgtgcagtagtattgcatctaaaaaaaaacagtgtgaataccttaattaaaaaatattttataggtaagaaatgctaaggatcatcggagccttcagtgagttctaatctttttgctggtggaaggtcttgtcttgatgttgatgactactgactgataatggtggtggttgctgaagattgcggtggctgtggcaatttcttaaaataagacgacaatgaagttgccacatcaattgactcttacttttatgaaagatttctctgtagcatgcaatgctgtttgacagcattttactcagagtagaacttctttaaaaattggagtcagtcctccaaaactctgccactgctttatgaactaagtttatggaatgttctaactcctttgttgtatttcaatgatcttcagagcatctttaccagaagtagttttcatctcaagaaaccactttcttagttcactcatgagaagcaactcctcatccgttgaagttttatcatgagattgcagcaattcagtcatatcttcaggctctacttttaattctagttctcttgatatttccatcacatgtgtggttacttcctccacttggacccctcagtcatccatgaggattggaatcaacttcatttgaactcctgttaatattgatatttcgaccacctatgatcatgaaagttcttaatgatatttagaatggtgaatcttttccagaagattttcagtttactttgcccagatccattagacaaatcactattattgcagctattgccttatgaactgtgtttcttaaatagtaagacttgaaagttgaagttactccttgatccatgggctgcagaatggatgttgtgttagcaggcatgaaaacaacattatgctccttgtacgtctctatcagaactcttgggtgactggtgtgttgttagtgaacagtagtattttgaaagaaatattttttttttttctggctggtcatggtggctcacacctgtaatctcagcactttgggaggttgaggtaagaggattgcttgagcccaggagttcaaaccagtctgctcaatatagtgagactcccatctctattaaaaaacaaaatctttttgagccgtaggtttcaacagtgggcttaaaatattcaataaacaaggttgtaaaccgatgtggtcttatctaggcttgttataagcccaggcagggtagatttagcataattcttaaggactctagggtttttggaatgatgaatgagcattggcttcaacttaaggttacaagctgccttagcccctaacaggtcaggctgtcctctgaaaccagacattaacttcttttggctatgaaagtcatagatgtcatctttcaataaaaggctgtttcatctacatttaaaacctgttgttagtgtagtcaccttcatcactgaagttaggtagatcttctgggtaacttgctgcaccttctgcatcagcccttgccattgtttcaccttgtacttttatgttatggagacggcttctttccttaaacctcatgaatcaacctctgctagctgcaaacccttttccgcagcttcctcaattccctcagcctttatagaattgaagagagttagggccttgttctgaattaggccttggcctaagggaaattgtagctagtttcattttttttttatctagaccacacaaattttctccatgttaccggttatgctgttttgttttccatcatttgcgtgttcattgaagttccatttttaatttccttcaagaacttcaagaaatgcaaaggaaacttcatttacaacttggctaactttggtgcaagaggctcaacttttggtctgttttggctttcaacatgcctttcttactaagcttaataatcattctagctttttaaaagtgagagatatacaactcttcctttcacttgaacatttagaggccatagtagggttattaattggcctgttttcaatattgttgtgtctcagggaataggggtccccaaggagagggagagagatgggaatgaacaatcagtgaagcagtcagaacatatacaacatttataggttaagttggccatcttatatggacatggcttgtggtaccccaaaacaagtgtaatagagcaaaaatgactgatcacagatccccataagacatctaataattatcaaaatgtgacacagagacacaaaatgagcacatactgttggaaaaatggtgccagtagacttacttgatgcagggttatcacaaaccttcaatttcttaaaaaatgcactatctgtgaaacacaatgaagtgaagctcaataaaatgaggtgtgcctgtattttcttttgctctatttacataatctgtctagagaatgttgagtacccaaaatgttatactgtataatgctagacattggtaaataccagttgtttcttaaaaacaacgttaagagcaaaacttaattgtgctttaatttagtaagtcacaaaatagaccaattatgtgaccatagtctagagttgaatggtttttatttttgtgtattaaacatgacagcccaatgaagaaaacttgtaagagttttatagggtacagtttaggtcacagaatgaagttcaacataacttgtttattttacattgattgtttaaccagtaattatccatatgacatcccaatgcaaatgctgacatccatttccaaaagagttgtttttttgtgctttttctaaggttacaaaggtttttgtggtttaaatgttgttacatattttacagcattaggatctatggaatattttgacaactgcaacagttcaatgaagttggtaatttcttcttttaattatttttcattgaacagctttggagttacatttctacattttgatttctggtatattataaggaaagaaaaaattatgtcaaaggatactttagagaaaatacatagatagtgattacaatatggctgtaattaaattatccttaatcttgttgaagttttgttagtgcctaattttgatgaaatagtatggtgttccttccagctactgattgtatatatgtgattgcacatctttcttaaaaaagtggatttgtaggttttcacatattgtcagccacactctaatcctcttgtaaagaatgaacctggctttattcaattaaataattctctggtacaggttttcctcccataatattttaaagtacaatgttttgggttttttgagggtaaagtaaaagaaaatatgttttaaaaactttagttgtcaaattattttattttaagcctattttagaaattagagatgtattgtttcttttgggtgcatatcaccaattaatacgtttgatttcagatctacaacttactgctttgtaaacttcgccgaggtaaaatgaaaccatttggctacttgaactgatctacattacatagatttttcctattgacatttgcagtagataacatgtcagaaatgaaagtgatgaaacaatacatcttccatattctgaattggcataatgctaaatacaacagaagctaattttttagagactgtgaaatataattttttttagttcaagtatattatagcaagtgagagctattaagaatagagctttctctgcagtagtaaaatgcaaccagaatgtttgcatatactggaattaaaagattagttttgcaacataattcatttttctaactctgatattagtttaaggatttaataaaatataagtagattgttcttaattgaaatattttatatatacttaattcttttcgaagggtgaaactttattttaagtttttttaaatataagattaaataaataacacattttagcaaattatgtgctgtcatgaaagataagggaattcatggtaacttgtatttaaaattctgtaactttgggttgggtaaagatatacttaaaataaagcattccctttgtaattctaatgcattctcaacatatgggtattaaataacatgaaaaaaagtttatataaatgttaaattactttagaactatttcctagatttaaaaatactaatgcagtatattataatagtagctttgaaattttgatattggcttgaaacttaactgtagtggtacctatattaacgtatttatgtctcttatttttttgcagcaaggagtaaataatgctgaaaaatttgactatgtaagtgcaacatgtcattcagttttcatgccacattctctatatatttgttttttgattactaatattccctacttttggtttctaggtcatgcagtttttgaataagatggctggtaatgaatatgttggattcagtaatgcaacgtgagtgttttaaatactgttttgttacgtaaaaacacacaactgtatttagaattgatccactctcttttcattggagggaaatgaatgatttctaaattacctgacagaaacacttaaaaatactttaaatagttttgacaaatttcttacaggtaatcatacaatcagaagagaccccaagtttatctcaaattactggtgcttattcagttttatctttgcttgtaatacctgtcttacctctcttctatttctgttccaggctatctggatttttaccccaattttttattttaaaatttgtgagtctatagaaaagttgaaaaaataaatatctggaatcttttacttatattttctaatattttgtcttacttgctttttctcaatctctgtctctttagatagataaaaaatatgtatgtatacctctaaacacaaatatgtaaatatatatgtacatagattttttttccctaaaccatttcaaattaagttgcaggcatcatacttcacccttagataagaaagcacatacagtctaagaataaggacattctcctacataaccacaataccattaacacatgtaagaacgttaacgttaattttaaaatatcatgacattaatcaatatgtaaatgtccccatctcttccccaaatgtcttttacaacttttattattattttttagattcaggaacaaatcaaggttcttacattgtatttattacgatgtctgttttgtctctttacttagaacagtccccgtgcccttgctttcacaaattttattaaatggcttttatttttaaagagtgcaggctgcttgttttatagaccaggggttgctgactttttctttgaaggaccagacagtaaatattttaagcttgtgtaccatacggtctgtgttgtaacttctcagttctgctgtttagtagaaaacagccatagacaatatgagggtgtgttataaaaaactttataaaaacaggcagcaggccgtatagtggatgtttcccattttgtatttgtctggttccttgtcattagaaacactataatgttaaacgttatcgtaatattattatgttaaacagttttagcatgtatactactattttattcttattttgcacttcctgcttcgcatttcaggggtaaacattttcaggttgcatggcttcccaacattaattcatcagcttaagtatcttttccaggaagtattccatgaatctcaacttgcctcttttctgtgctcttctgttaccatattttatcaaacttattacatgtctctctttgccccataaccaccattagactctgccctccttaagacctagatggaatgttgtgtcttccagttcatttctgtatccctgttatctggcagataataggcacttgagatagtgttgaagaactatgtgtcagtcactgtgataactgctgactagttagtcatttatctaaactatgttgatgttttttttaaaagtacggcaaattgataagaatttgaaatgttaaaatgtgcaattagaaggggctgtccacctcagtgatataaagaacattaaccacagttcctctaatatcagcagcccttttagacttgtagggcaattctcaaatataccgcaaattaaatctgtctaaatcaaaactcattctctttctttccaaactgctctttgctctagagatagatccctgtatcagttaatattattatcctctcaggctatgttagaaattcaggctttgtatcagtctttactctgcctctcctttttctcatcaggttggaagattatccaactacttgcatatttgatcatacctctccttccattcctatcacagctgcctaaattcaggcttttgtagctctcattacagtattctcttaatagatcagtcatcacttctttttcccctttttcaaactgatgtcagagttatctttccaaaatgcagatctgattaggtaacttctttgtaagccctcaggcttttgttttgtgggtagtcaggagctattaattatttggcatctattggttttgataatttggtcccagtctcctttgtttgtttgatgttttcccactcctctccatgtgccattccccagttacatcagaatatttgccattcttcagtggagccctgtctatatacttttctaacccgttcatgatgcatggaatttgccagtgcctaggcctcaccctgaaatctattagtccattgagtcctgcaagatccattttgtgtttcccactctcagtgaaagttccatgattatgtcaagttccctgattatgtcaattaaaatggactcttattgtacttttgggtagccagaggattctgcagtttttcagtgtattttaatggtagaagatttgagaattttaaaattagcatttttgtttacaaaatatgaagactagaaaggacctgaattcgtttcagtcattttatagccaagaaaatgaagattgaaagaattaccacttaaatgacttgtccaaagtcacacaaatagcctattgacagaattgattggaactctgtagtcctgaatcttagttcagtgttctttatgctgtacattgctatgcaaatgaaattatgaacaatcacacttttaaagaaagtacatagagcaaatgtttttttttcttcttccaggtttcagtctgaaagagaaagtggagatcgaaattttgcaataggatattacttaaaagaaaagaaggtttttaaatttttgtttctatttcaaattattctttcatttaataaaatacatgaagatgtatgctaagaattcaacaatagcctttaagcaactacctattactatttaaggtgcagaagtttttgcagagtgctcgtgagtcagtgttatcaaattgttaatgttattgttaatttgatttgtatctggcagcatttaaatatttgactcatattatttattaatacaaattttgtttgaggtttagtctattttttcaaaagcatgatgcctgattactgttaactactcttgatttttttaagtggctggtctagtaacttgatttataaatcatgaatcattttatcattgtcagttaaactagtatctagaaacttacatgatgtgataaaattttgcttttttatttcatgtttatactcttttagaagttacatgctattttattaattaaaatgaaacacttgtgtacatttgaaatttttcatatatttctctacttatgtgcattcctgtgtgcctgaatttttaattgcctttctggtttttttagtgttttccagaaggcacagacatggttggtatattagacttctacttccaggtaatctaattatgtaaatcgtatatataaatggatgtgtcggctgggcacggtggctcacgcctgtaatcccagcactttgggaggccagggcaggtggatcatgaggtcaagagatagaggtcatcctggccaacatggtgaaaccccatctctactaaaaatacaaaaattattcgggtgtggtagtgtgtgcctgtagtcccagttacttgtgaggctgaggcaggagaatcccttgaacctggaaggccgaggttgcagtgagccgagatcacgccactgcattccagcctggcgacacagtgagactccgtctcaaaataaataaatggatgtgtcacattatgcaaaatatagatgtctcagaaatcttggttctaggccatgagaaaatacattttccattgactttcaaaaatgtcttcataaaaggcagtctcatgtccatgcatgttgcctaaaaattcatgcctcaaaatgtaatggggacaattttttctgtaaacatatttaagaattgtcaaaaataatgaacactcccagaaattggcactcttaattataaactgggctctaaatttttcgtagcttttacattttgtttgggaaaagctttattttttatttttttattttttaaatcagagggctcttattcagcatttaaaagtgtcagtgtctcagctgacttggtatcttgtaatttctttgttactactctatcctggcttaactggtgctagttcatttctgcagtgtcatatgtcgggctttcttgtaagttagagtagctctcaatattgagggggtggggttgagcgagagggaccgtgttacgcacaatgggctatggtatagaactcaatttagaatagccttcctggagatctcttctttcacccacattttcagctcaatttattcttacagatttaacacagttggtgccactgatggggctgtaatgtgaagccacataggaggctacattattgttaatttctagttcaccttacatttgcctgtctttactattaaaggttccttaattttaacctttcagtaatcttagagaatatataagggaggttgataatgagttagattttgatagatgtccaggttgcagcttttcatcggcccaatgtgaaaaaccgtaaattgggaatccagaccatcaatataaaatttaaggtctagcctggccacttattagccatgtgacctaattttagttactgatccctagtttccttatgtgtagtatatgcgtcacctgccttgccatattatgtggaagataacatgagatgatatgtgaaattcctttgaaactagccttttttttccccctggtctgtatgaattttttccgtaagtttcttttcctttggaatacatatttaaatttggctgttatagaatctactgtaatgtgacatttctatacttcattgcaaaaatcaagaaacagccatagaagtggtactgacttttttggagaagggctgcatcaaattgaacggccattgagattagcaggagagtacccgagttggcatttggcaaattaagaatgtgctgccttatgacaaacaaaattccaattaatgttaagtataaattaggaaatgatcattggaattcagaaagccttgcatgattaagtcgaccttatcacaaatctttgctatctggggcagtattgcaagtcgattctgtcgtttttgagaaatagggaagagattttttatataaataggcaatgtagtcaaagttaaacacacaatgttctaattcactgtacttagttttcctccttgctatttccaaacccctttgtgcctcttgtagatcttggagtatggctgaggaaaatttataagttgaactcattcttctcctatccactttattttttgaccccgtctcatcccaattttgcttactattagctaaaaataaaatgtggaaaaatttattttcattttatgggtaaatttgggtttggtacggtgaactattttcattattttgattgtatttaaatgcaaaaattttatcctagagggtattcttagcacccatagtaaatatcaaataaatattaataaatggtctaaaggataacattttggtttaggcttacagagcatctgagacagatctgctttatatttttcttcccctttttcctttgcctgttaccatatagatggggatgccgaactttgttatgggtgaaatgtcaggcactgtagcatttttttctaaaatggtgatttctcatgtagacactatcataatcttcatgtatggtgctttatcttaaaaatatttcatggctctttttttttctgttgagttaaaagtaattatgcttgtgtattccacagaaagtattaatatttaagcaaatttgaatatcacatgggataataacaaatcttagtgtttagaggctggcacttcctagtctagttctgccattaaaagactgagtatctttggccaaatcagggtaaatcttaaaagtgggtaggacttcggtcaactaaaatcttcagaatgtcctcaagtttatattaaagtaatctctttggaagaaatatttcagatctgtatgaaataccaaataaaatagattatcttaaaagtgaacagtaatattaaaagtagtatgagaattctgctttttctttgtgttagctgtgctccattgaagtgacttgtgaatcagccagtgtgatggctgcgacactggctaatggtggtttctgcccaattactggtgaaagagtactgagccctgaagcagttcgaaatacattgagtttgatgcattcctgtggcatgtatgacttctcagggcagtttgctttccatgtaagtaattgtttaatcttattttctctggcaagaaactagtctgaactggttcttttaaaaatgcagtttgaactttgcttctaaagctgtatattaatttttgagagagaggcttgttttcaaggttaatttgttacaagattagtaaggaatagagataaggtctaccagatgttcttaagaacttggaagtttgatttatagaacctcatcccttctgcttttaaggcaatccagtgtacaaggttagtacagtctttctttactttttgtttttaatgtttagcattatgattatgtatcttaagaattctctaagttcagaaagattgcaaagatgtgacgtttcacatctttggttacggccatagctgttttaaggactaaaagtgtattaaagttaaaacttaacaaaaatgtactgctttaagctctgttgtgcatttgccacttgtaaagtatatagactttttttatttcattctgctcatgtcaagtcataatgcccttctaaaagctttttttattttggaaattttcaaacatgtaaaacgagagagagagagagatacatttaatgttatccatcactcagcttcattaattatgaatacattactaatcttgtttcatctgtatgtgcatctgtttcccctatccttgtcatatttcagtatgtaattctaaataaggatccttaacaaaacataacaataatacagtttttacatataaaaattaaatattacatatcaaaactttaatatcattattaatatcaatattaaattgaatatcaaaatatttagttagtgtttagatttcctggattatcttgtaaattattatttctttttttttttttttgagacggagtttcactttgttgcccagactggagtgcagtggcacgatcttggctcactgcaacctctgcctcctgagttccagcgattctcctgcctcagcctcccgagtagctgggattacaggcgcctgccactgcacctggctaatttttgtatttttagtagagatggggttttgccatgttggccaggctgttctcgaactcctgacctcaaataatgcacctgcctcagcctcccaaattgctgggattacaggtgtgagccattgcacctggcctattatattattttatagtttgtttgacttaggatacagatgaggtgcatacattatgattgggttttgtctcctttttttttttttttaaatctattggtcttcttttgacctgtctctctttttttcttgttatttttggttggaaaaactgggtaatttagtctatacagttttccactgtctctacattgctgattacctctgttccattgtcccttgtatttcctataaatttgtagatccaattcaggtgtgttttttttttttttttttttttttggtctgcttgttttgtttagttttgtgtaaaagtactttattggtatacttcttttatttttgtttgtttatttatttatttattttgagacagagtctcactgtgtcgcccaggctggagtgcagtggcgtgatctcggctcactgcaacctccatcgcctgggttctagcaattctcctatccagaggtactgactgactgaatgttagtaagcaattaatgaacactgctctaatgacattaatttttttttttatcatttgtcaagttttgctaatgtaacttaaattttttgaggaggagtaatttaaattaccattttagaaaatcttttaagaatatataactttttattgttttctagttgtaaaatatttttaaaaaataatttgttatatttaaaaacaatacgtttatcttagaacaattagaaaatatagtcaggaagaataaaagcatccatagcctcacaatttagatgtaactgctataattccttagaatgtatctttaaacaatttttctatattcatatctatcccaaactgtttcataatttttttttttttgagatggagtcttgcttcgtcacccaggctggagtgcagtggtgcgatcttggctcactgcaacctctgcctcccaggttcaagcgattctcctgccgcagcctcccgagtagctgggattacaggtgcctgccaccacacgcggctaagttttgtattttttgtggagacggagttttgccatgttgcccagggtggtcttgaactcctgacctcaggtgatctgcccacctcggcctcccagagtgctgggattacaggcatgagccaccgcacccggccttataactttatttataaacatgttgataaaaatttatctacaatatttttaatgttgaaattctatggtatgtatatatatatattttttttttcgagagggagtctcactctgttgcccaggctggagtgcagtggcatgatctcagctcattgcaatctctgcctcccgggttcacctttctcctgcctcagcctcccgagtagttgggactacaggcgtgcactttgggaggctgaggcgggcggatcacaaggtcaggagataatttttaatttttaaaccaatttcccaattgtgttttttttttttttgaaactggatcttgctctgtcatccaggctggagtgcagtggtgcgatcatggctcactgtagccttgacctcctgaggtcatgtaatcctcccacatcatcctccagagtagctgtgactactggtgtgcacttccatgtctcactgttttttgtagagacgagatctccctgtgttacccagcctagcctccaactcctgggctcaagtgatctgcttgccttggcctcccaaagtgctgagattacaggagtgagccatggtgcccagccccagtttccctattgttgaacataacatttcttattttaaaatgtttacctgaatactcttttactgaattatttttaggttggtcttcctgcaaaatctggagttgctgggggcattcttttagttgtccccaatgttatgggtatgatgtgctggtctcctcctctggataagatgggcaacagtgttaagggaattcacttttgtcacgtaagcatattttcttaatgtaaataatggtgttacaagttgagccatccaatgattcttttttttaacccattttccatagttcattaactcttggccctccgcctatagtgtgccagttactagggagccgtggaaatactcccagaggagcttcaagttgtctctgtcagacagctcccatttaattattcccacagattatatttgttagatgctaatattttaattttcatggttataattagtatgaattttcaaaagctcaacaaaaggtattaaacttggagaagtaatttaaaagccagtatatcttaagaattattttggtttattatatctttaatctgcatggttaaatatctttatccattgactacctttaaacatttttttgaggaaataagcactgaaaattaaaaaaagattaaaccatttttaaactgttactgctcttgatagttctgtattttgttgttacccagttcctgctaatgtttgagcttctagttttagttacattgattacttgcttgagttcatattaagtaccatactcaattaaaattgttttattttccagtcttttatattttacaaaaactagagtatgaccttggagtgcatataaaatatagtagattgtaaccagagtacttatttatattttaatgtggctttacacttatttgatagaagaattctttcatggggccggttataaaccctattttgtagaagatgaaagatgatttgattggctgagccctaggatcatgttagtaagcagtgttcttaaaacttatatccatatcttactctgattttagttctcttcttgatgcattatactactttattagcatgtagtgatgatttctaggctggacgatataagcagagtttgttaaaatatggatatatataaccaatgaatagccaatttcttatacctgctctgtataactgtttacaggatcttgtttctctgtgtaatttccataactatgataatttgagacactttgcaaaaaaacttgatcctcgaagagaaggtggtgatcaaagggtaagcaaaattcttatttagataagtatataaaatttttaagaagagaaaaagtgagatttgcctgtataaataaaatcttagtttgttagtggcctcgggtctttgctaatcataaatgagtgtaaacaaattgttgacatataaatccgggatcaccagtattaaatacttaaagattgtttaatagatagttaatagatacagatatttaaatattgctgttttgttatttaaattgaaactagttagcctagtgtcagggatttccccttccattttctgctattttaagcaagatttttagaattgattctgttaaaaaaagaacaaaacaaaacattggaatgtgctgcatgctataaagaaagcatcgttttaatatttgttcgtcctaaattgaagtttaacttcttgcatactgtgtagatggatatgtaaatggaaaaggattatcatattagtgagagaccgtatgaagcctcaaaagttttataagtcactgtagatgaaatatttttttccaccgtgtttaatgcaatattcctaataatcttacggtcctatttgtttgttacgagtttatttggcttcatactattgtacacatatattcctttttttagaagtagtattaagagtcaggacttaacttttttggtctatatagtttttcactgtaccaaggggcttgtgctgagaattttgattcagtttctttgcgtaccatattgaaaatgtttgtagtaaaattacctaattagacctcaagataatatgaagaacttctaagtagaaaatatttttaatacatactaagtacattttctgtagtgctaaactaaatttttgttagtttttatcaaattaatttctgttactatgtaagaattatgcaaaaccaacagaatagaaacttccatgggagtcgacctgagtaacatgaagcaaaatgtcagaggtggtggtttaaaatgttaacattttaataatgctcattgaaaaataccattttatagcttggacctttcttcactcaagtgcactaataaattatgtatgttgcttgaacaactagcattcctttggaccattggactatgaaagtctccaacaagaacttgctttaaaagagacagtatggaaaaaagtgtcacctgagtcaaatgaggacatctctacaactgtagtatatagaatggaaagtctgggagagaaaagctaaagaaatgggttctagtttcagaatgtttcttcatttaatctttcaaacatctttagcttttttttgcaagttataaatatttatttgaggtattttttgttctcaatcttgggtgctggagccataaagcttttttttccttttaatctttgtataaaggcagtagattaagaagtgcatttgttggtctttaaaaagtatttacaagtacataaatttgctttatttttaaaaatacaaaaaggaaaaatttaaattttttttgatgtaattaaaatgttaactatgtggtcagataatcccattttacaatagtaacagaaaattgtaattcttagttctaaaattcacaaattaaactcataagttttgttgcattttgttttttcttttccatttttaaaactaatgtgatgtctttagtggcaatagaaggtacttctatgctaaatacaaaactaaaaaggcaaaataatgaaccccaaattattttatttaaaatagcagtggattataaaattagcttgtgtttacatttatgccatttttggtgatagattggctttacattttaaaaaatttatttaaaaatttatcaaatgctttaaaatatgactcctactttttttattttgcaactcctctgttctgtcagagttgttatatacaggagtgtcttatgttactaaaacattccagccaaagaatttcagatgtgagataatgatgtttcatcaataaaaagctataatggttagttactcagaaggagaaacagtgagtgtcttcaagtgaattgttcacctaaacaattttattttcatattatccacataactttttctatgttatatttaaatatgaatggcaaattttggtttttagcttttacattttattatcttaattttataaatgctaatatttcttttgtgataagttatagcatctcataaagtttgttctatttgaagttttttagagtacttgagaaatgaatttagtctgcaggtagtaagtatgctactaaaatacgttagatctaaatccttttatttggtataaaaatgcaatattgagaatcaaaacttgtttttaagagaactatagattctacacaacctgatttcaagtaattattcatagtatttatagttgtcttggcaaagtgattgtaaaattctgtaggacctattcacacttcttccttcttccatatacttctctggttttccccatagttcccctataatttcaagtttgttgaaacctgttaattttagtgggggattagaagaaaaacttggtggtttcttagcatgatggtgtatgtatgtggtaatggaaagtctgtaaaagtaaatatagtgtagcaaaaaagatttcactgagtattttagatactagtgcaaataaagatagaaaatcttgatcataatgtcttaagtttgggaactgtgatattaagaaaagaaattcccttctagaggtgctggccaaaaagccttttgggctaacttaagtattaaatttatatatttaaataattatattttaagttgtagaggattttcccaaggattttatgcttacttgaatgttctttgaatgttcagatgcatatcctaactggatgcttctcaaggccttactgcatatttgtgttgcatatttatgttagttgcaccagggccatttgtagtttgggcaaccgaatgccttaattggaaaaaaggcattgtggtttcccctatgatctaaattgttacattttaccatttcattccgaagttggttttactttattaaatgaagatttagttttcatatcgtatacatagctgtatagatttcaaaattaggttgttaatttgtgtcacttactatttttgtgttggtaatgctttaaatgcatacttaaaaatgaagtactgttatctaagctactgtgtttagaaaatgttaagaatgagcagaaatttttatagaaaagtataaacggaagaagagataagatactgcgaataggccctcaaacttaaaaaagaaaaaactttgccagttttaaggacatattttgattctttcagtattcttaacacctttttaaacaaagttcttgatagtacccactattattgggtttgttttatgccattattgattcttgatattcaagcatttacaatgtagcatatttgattttcttttttctttctttttttggcatcattaacatttcatttgaaatgcatattgttcttgaagtactttgtttttagcataaatgttgtgcattttatcttagtgtttggatgaaaacatttgtgttgtttagctttcatttgctttgtatatttaataatgtacctttattttccagtatgcctacattttgtattgcacaataaatttattttaagctgattttattgttttttttgttttgttttgttttgtttttataaaagcaacttcaacattttaagtacaaatacagttgggattttaacttagaaaaaattattctttatgaagatactgttaaagtgtttgctattctgaagctgcctcaaagtaaactagaaatattcaaaagggctttatttgattttttaaaatgcaatatagcattagtggtttttttgggaggaggacttttcttattggttgtactagaagtatttgaataaaaacttttctctcaatttttttggtggtttttccatttggtaactttaaaaaaagtgcaaccctatttgtaggttatttctgctttctgaggaggaatattgttgttattcactatgtaactctcattttatctgttgttgcctaaataataggaaaaacattgctaaaccaaatgaagagtatcatcatattgctttagaataaaactgttaatctcagtagaatttatattaaacagaatgacagtgatacagaaattcaccttaactggtttctgaggggattacattttcagaaggaattttgtatatttccacagcatgatccaaattatagtacaaattatagaggctccatgtattgtaggtcaaatatagtactttacatttttatgtttaattaaatctgccattcatattctggagattcctgaatatattgtagaagttttaaaactatttgaaaggggaaatactgttgtttacatgaatttgtattaatctgtgggatttttaaatgaagttcttttagaattagttaataaggagttccagtataatgatatattcaatatatgtaacagtttatgattacttgcttttaaagatttttttaaaaaatttatttgaagtaaagagagaggagacttaaaatacctggtgatcttgatctgacagtgtatatttaataggcatatatttatgtggaaagaactgctgaaatatactgatatgtcagcctatatcctgataatttatatataatgtgtgggttgcatatgtttgtgcatatgtatatacgtttgtgcatacatatatatgatttccttatctatgtaccttaatctacccattcatattctgaaaatgatgagcagttcttttcacattgtgtactatgtataaattattcattgatctattcctgttccaagctttgacacaaaagaacccctaaaatttttgctgccctagaattggtaaagtataacatactttacttcttcaatttgactttaaagatttgtggtttctgttaccattcccattcactaccaggactgccagggtaagagagtaactaacaatattgggggaactctggaaaagtgaaaccaagaatattagatttcatgtggaatttaaagcactttccaaaatgtattataaggaaggattgtattttttaaattgtttttgacttaaaagaagtaatgcacttatattgagcagtttatggaacagttttatttagttactgtggtacagtttttagttttaagaatctgttttactattcatctgtaaaaagtttggtttttctcctacatggccttgaaaatgctagaaagcattttttaaaggtatacgatcagaatacttaacgtgtgatttcttctcaattacttctctaccattttatatttaatgttgtatttgcattgtgtaataaaaccaaaaccagatgttggagatgtagcataaatggaaatttgttaccatgcatgatggccttatgctcagattttcatttagacttactgagaatggactttaccttactcggtcttttctctgtcatgtagttcaagggcaaaattatacataaacatacactcaagtatatccaagttcaactatttttcttttatttcaaattgtaacaaagttaaaaacctttgtttgttaacattgcttagaaatggaaggaatttaattagaaatggaaggaatttaattgggttgggggaagttcttttattttataccccaacctccagctagtagtttattaatctgaataccataaaatgcacatgactttgagaaatttagaaaactactctaagaggatctgaggcaatatttatccaacatgaaacagcgggcaaaatgtgatgtttcgtagagttcttaactttttaaatagtaatagaaaaggtacttatttttaaaatagtatgttaagtagactgattataaatgcttatttaacaaagtgattctgttactatggtcttaaaatgttttctattttatgaacataggagaggaagagaatttaagttgactttgtttgccatttctattttgtagattgtagatctactttagtaatttttgtaagttgtagctaatagagattttttaaatatgccatgtatagaaaacctgttttcataaaaaactttataatggcttcctgatccattaacccttaaccaaaatgaataggatactaattagcacttggattgcattgcttttttggcggaatctgtgggtttttttttttttttttgtaaatttcattcaccagtaaattacagaatacttattattgaaaaccatcatgtattgctttaaaacaaaagttataatcttgccctcaaaaggcaagcgttagaaacaggtgagctggtgccaactgcttctgtcggttaatcttgtaacatttttactatacatttaactctaaatctcatttactaattatggaatttttttaaagaaaaattatataccacatctcaatggcaaagaataattcattgtatttatttttaagccatatttcaatatctgaggatatgatttttctgtacatagtatgattaaaaataatggtattttttcattaggtatttaccttgctgaaacactttcaggccttaaaaccacagataattaaaattatctatttggaaggcttagcttttgaaagaaaaaattcttacccaaagtagtttttaaatttctattttcatattatgtttctggtgatttatgtttatataatgaaaatctcctctgcacagcaattatatttggaatcctgagctataattaaatttatattctgtaaaacagccgaaggctttcttttgtttttaaaacatagtccaacctttctagaattttgatgtacttttatttaccataatcttatatattttttagaatcacagatttgaatttgaaagtaatcttaaatgttacctggtacagactcccaccccactcagcccccttttccaggtttcctagcactttgctttttctattagcatatttagatttttttctcttgagggggttggtctgttttgtgttttgttaggatggactttctgtttgtagatgtttctgtttgtggtttagttttaatgagagaagcataattggcagtagttaatgtgactataagttatttggcagatggtaccatcagcatttattaaaactaattgtatttttctagtaagcagtcttatgtcccagttgttaaaaattagtaaagttagaagtaaatgttaaagttacacagtagttctaaaaataaaacattaccctgcaatctttgaaagaaaactgtagcagaaatgtaaatctaaaaataaatgttacatcactggctttttaaaataaattcctttgaggttagattaaatatataagtaaaacgattttaaataaatagaagactagtcaagttctaaacaaatggtttcttaagaaaaatttgttttctttgcatgttagctcttggaaaacatgcaaaatatctagctacttcccttgtttattttagacatttggatctgtgagtggcccccaagtttcctaatttgtctgtttatttactctgtctatagtacatgttgtcttcagtatcaatctccatttcatagttctggagttttaatatttatgaaggactgtgtgtattgagttcttgaaatatgttaacttttgaaaggctttgttgacttacaaaatgttaaaacttaaatattgttgctctcaaaatattatagtattggtttcttaattctgaaaatttaaactgcctgagtagctcttctccctacaagtttcagtataaactcattcaatataaagtctgcttgcttttatattatgcattccaaaataaaaatgatgaaatattagtatcagttacacaaatgtaactactcacatttgaaccattttattgtaaaattcaactttcaattatgataatcagtctcttgctgaactttttagatctagatgagaattataaatttttgttattttatatgtgttatatgtgtttatatatgttttatattgtgttatttcacaaatcatcacaaaagggcaatttcaaagattcttttgagaggacagcttaaagcttaatccttaaggcttgactttcttctattaaatgagattgatacctaaaatcatggtataaattattaattgaattccacccaagttctgttgttttgttctttctcacagtcattccaaattaaagattttagttgaaaaactcagaatatattatctaaatttcaaatattctattttttattgtttcatattataatttattttgggccaaaatgaggtaatttaaaaaattatatcaaagttactcaggaaatgggttttcagttccgtatctttatatatgttcacttccaaatcttttgatgttgacatttgccattgtagtttaattttctttaaaaagttcgaaagaaaaccacacatgaaatgtaaaagtccaaatttctcttcttcagtataatatagcttattctttatttattattttacttagatccttgaagtatatgcatcattgatccaggtctatgcacaagatttataatgtaaataaagaatgaactaaataatactgtttgagatgaatatttgaattgagatgaataaacgttgcatctaatgcacaatgaaacttcattgacatctgatgaaattacagtacaagtgattttgttaacattctatggtgactaatactattaatcctttttaatcataccaataaaatatttctgccttaatgtctctttttactggactatgaagaaacaattctgctgttaaaggataaccaaaaaaataacttccacctatctgaatgcccttattctggcaaattagcagttttattgtagacgtacccactttaagttgctctgcttctcttctagaattgcttttgtaataagtgtaaatttgtagtcagataactcattgcttttatgaagttgctttcccacttgtgtgaccttaagaaagtggctgaagtccaggattcttctggcttcctggtttccatttcaatattttcaatccctgttttacttagttagcaaacttttttttttttttaatgccttctaaataggaattttgttctcctcatgttgttttcttctcttcatttctggtacccaaccaatatccaagattagatccctctatataaatgaaaatgtataacctttaaaattattttcttttggtctttttttctaccaagtaagaactaaaaaagattaccatccccctcagcatttcactagtttttgttcaaacagcacacaaacagaattatttcaagatatttagctaattaaatttgattgtgcaattcagatctatataaattaaccttagcattattcctgtgctttattattcactgataggttcttattcaactaatgtttatttcttgcctaatatgtgccagaaaccgtgaagtgtttaggatatgcagtgagtggttaatgagacaagtatgatccaacttgtgtttgcaattaagcagggatacaggtactgaataaatactgaaaataattaaaatggtaataagtgatttgttaatactgatgcatgtagatctaattcattttaaatgttacaaaataagttacaaaatggtatatgccatatgatgctatttttgtacatctataataaactttatgagacacaaatatgcaatgtagttactaataaaactataagaacatgaacaccaatctttagataaagcttactgccaggagggaatggaatggatgcagagagcatggttagctgtatctttaatgtttcatttctttaaaaaatatttcagcaaatataatgataatgatagaaaagtaaaaaaatgctaggagagggtacaataagaacttgttttgtctgggtggttaaatatggttggttttcactggaaggtaatacagtgtgtaagttttgaaggagtcagaggaaatatggaatagtgttaataggctagtctgacttgaaggccccagaacaggaaggagtttagcacatttgagaaggggaaagaagaaggcaaatgcgctgaagaagagtgaggtgaggtggatggagattggctgtggatgactcctaagagatggggccatattatgtagagtgggccttctcatatttcgatgtacatcagaattgttagagtgtcttaattttaaaatacagctagcttcctggggcccattcctacagttggattcaaaaatctaaatgtttaatgtgcaccccaggtgcttctgctgtaggttgtcctcaggacacagtttgggagacatttctgaaaggtcttatatgctatattaagaattttggactttattcagagtttagtgtgaaactttgaagacttttttttttttttttttttttttttttttgagacggagtcttgctctgtctcccaggctggagtgcagtggagtgatcttggctcactgcaagctccgcctcccgggttcacaccattctcctgcctcagcctcccgagtagctgggattacaggggcctgcctccacgcctggctaattttttgtattttttagtagagacggggtttcaccatgttagccaagatggtctcgatctcctgacctcgtgatccgcccgcctcggtctcccaaaatgctgggattacaggcgtgagccaccacacccggctgaaactttgaagactttaaaaaaggggagagaatgatttggtttttaaatactgctctgcggagaatggattaaagagagagaaagttgaagttttggactcgagatgtgttggtggcttggactagaggtgagagaaataggtaaataagagatgtgtttaagaaataggattggcagcacttggtgatcgtttttggtgggtgaaaaggaatgcgatatcaagctgactaccaggtttttagtatgagcaacagggccaaagctgctgcattaactaagatggagaacactggaaaagcaaaccttgggagtatgggaagaaattagtttaactttggctattgtaacaatgaaggatctgtttgattgtggatatcaggaggttgattgacagtgctttaaacatatgggggttatttttctaatataacagaaagtctcagggactatcagggaaaccaaccagggctagtgccattagtaaggtaaacttctgttacacaagccttaagtgtgttgatcttagaaatcacgcctatcaacttagagttgcaaggtggctgtttcatctttagcctcacctgtatggccaaagtgggagaaaaagaaaagagtgatatctaaatctaaagaaagaagctttactggaaactcacctgacgctcattgaccagactaactgcaagggaatctgggaaagtgtttttaattggacacaatactacctttaacaaatagaggttctgttagtatggaaggggtgggtagtggataatggttagacaactatcagtatgtagaagctagctaatgtttgagatatttgtgagatatctaagtagtgatgttgagtaagcagtcagatttaggcctaaaacttagagcagtgtaagttggagctataattttgtgagtggtcagtatgaagagtagtatttgaagctggggtggtgtgtgagattgcttaaggtgatagtataaagtgataaggaaagtgtatcaaagacagaaccctaagaaaccatcattttaaaggtaagatagagtaggagaggcttccactagggaaaggtggccagagaagagaaaatccagcatagtgcaatatcagcagtcaaggaaagagtattttaaggagtttggagcattgaactgtatgaaagcatagataatttagtaagatgagggttttatatttacatgatgtcctttctaaattttttttagatagaacaattgctttattttttagtgtcttaaaatatgcttttctccagcaattttctgtattatatgttggaggagcctgctatgtaatttgaataataaagtggctatgaaagtgctttgaaaagttacagcattagagaaacatactgttattacacctcttctgtgagtatgctccataaagcacacatgttgaacgtttcacaatagaaatgtgaaataaacattgaagaatatagggagttaagtaaggctctggagaccagtgaaaatgagggatttcttttctaacattaaagcaattagtaaagattgtgttagtattgtgggttggaataactatagaaaactcaagtccatgtgcctggctttgttatagtagcaggatttgaggcatgctaagagaaataggaccttaaactctgaattgaaaccataattcttcctgtatgaatgctaaaaccgtgttgtttcacagcaggaagagaacctcatctattttcagggaccttgtttgtatttatttatttttaatttacacaaaatggtgtctttgtaagaatagtttgattccaatggcctggattttttttttttgtttaatatgtgtatttggtgatgaatgtcttctcttcctgtcttaaattcgcttttaagttctttgacttttgggttttatgtacttgttttttaaatatagcactttatcattccagaaatgtggaaccttgtcctctatcctaacacactaatgtaatattcactaatgttcatgaacttttacaaaaacttgtttgtataatagtgggagaagaccagaaagatagtgaatgagaaactttgatagttgtctgtgcaatacagatatgcttaaggtctgcagttttgttctttggaggagtagctgtctttgtctttgctcattgctatttttcttctcttctgctttctggcttattgattaggagtgctgtttttcagaccacacaaagatatattgttagctacttttataattggatatataaagagggatgcttatgacctcattggtatctttttagaccattcattggtgtttactggaataatatgccactgagaaaagaagttatttatttgctgccagtagcgtaacagtcatatttgcttttattcacattcacccaactcacatttcatttttaaagttttaaatgcaaagaataaaggtaataactttttctatttgtcatttgtgatattatcaaattgaattatttcttttgttcttttattttcccttcatttaaaaaacacctttgggtagcacctcaatataaaattaatatctctgatttttctataaattgtttctttgttgctattttctgatttcctatcacaacatatttctgtcttggtattgtattattgaggaagtcccaggttttgttaggaaattgcttgacccagtagatagtagttgcaagcactggccctggcatcttccagactgggtttgagcccttgttcttccacttaccagctctgataccttgctgaagttgtttaaatgtttcctgtcctttaataacagaaataacatttggagcacttagctgagtcgagagagtaggtgcttcatattaactattttgttgtaagtaatatataatctttaattttttgtcttcataggttgtcagattttttgacatgattatgactttttagtttacaaatgagtgaaattatttcagattaaactggtcattgaaaaattttgaggctaggcatggtggctcacacatgtaatcccagcactttgggagggtgtcaggaggattgcttgagcccagtagtttgagaccagcctgggcaacatagtgagaccccgtctctacaaaaaaataacaaagaaatcatccaggtttggtggcacatgcttgtggtcccagctgttcaggaggctgagttgggaggatcagttgagcttgggaggtcaaggctgcagtgagccatgattgcagcacggcactccagtctaggcaacagagcgagagcctgtctcaaaaaaaaaaaagaaaaaaaaattgaaaattgtatgcttttaagggagtttattacttagcaaagtcaagaacagaatgcagttcttggaggtaccattttgaggttgtatttttaaagtgaaatttctgtaaaacagagcttctttcctttatagtaaaatttgctatttgatttattcctctctattgaaattactatatgagaacctcctgcatttgtgtaagtttggaaatatgggcatgaatttattgaattgctattcctataaaagattttttccccaaccctccgaatcatatcagtttggattagttttgtctatatatagtatattaataactgtgtctcagtaaatctttggaaagcttaggaatatgtggcctcatactcagactgtctaattacaaaagtagtataatttttttttacacatccttaaaaatattaaataagctcagtagtaaaggaaagaggaaatatcttcaatcacatacacaatacacaggtttacttttacccttgggcaaggtgattaatttacatatgatggcaacttaaaatttttctttagccacagtataataggtagtatgcctcaatttgaccttaagaaaatataaaagcaggctgaaagcttattttcatttaaagactataatctgccaagttggagtgaagcctttaaaacaaaattggatctggagtcatgatggtttatttaacagttgaagaaaagtatctattccatgacaacagatactgtactgagctggaaatgagagcagcttatctcaaactagaggtggtagaaacagaaggatgttttttcagttacctgcttttttttttcattatagcagttccaaacaggctgaattcatgtttatatgaagacagaaactaaagatgaaaaacagaggaaattttggtttggcagttggtaatggagttagaaattaaatagttgaagtaaagtgtaaaaccagtgaaccaatttttcctccgtctctccctccctccatcttctccctttcttccttttctcccctcccgctttggtcccatctaggcttccttccaatattgagtaaagaacttttatggattagagctaaattgatatttaatccgttggtttccttctgtgctttggataacaatctgagatctattaaggactcacatcatcatggtctagttgtacagaattgggaatccagatacctgagttctactcaagctccatcactaattcatatgctgtgtgaccttgagccagggtccttaatctcagtggtagtaataaataaaatatatctatcaacatattttataaccagcctgtcagggatttttaaaaacaactataactgtttaaaatgttgaatgttttagggtcatccactatataaatacagagtaatgtgagtatataattctaataattgctacttactcataagtacagaattattagggcatttacagaagtcacacaactcaacctttaaacaagctcaaactgagtaggataatgataggattaaagacttaggaatgccatgttttagatgtgtaaaactgatacactccccacctgcttctagctgttttggaaaaaagtgagatttgctatgccaagcatgccagtgttaagtgaactcatgtgaactgtaacattttttgtcccactgttgtcatgactttgtacaaataaactaagataagattgtctggttcgggcagattctgataaagagacttgataagaaaaatgcagtagtgctggaaaatctacaagatgaaggggaaactgttaacagttaatttataaattttaatggctctctgcccaggtgcagtgtctctttgccatggggaggtatacattaaacatcagagcccttaatttaatagctattattgcggctgtgtatagtctgtttctttatagtaaggaattatttatcaaaacatagcttccatgcctctggcatttactgttaacccattattttctggactttggcctccttgacaggtattttaaaatcaatgtaactcaagtatccagtggggaaataggggaatgagctttgatcaatggttagcacacctacatcctttgcaagtattggtgtggaggtggatgactgatcttctagagtgcccctctccttcagtttgtttgctatgataggcattccagagggtgtgtcagcttagttggaaatactcgtggcgctctttaacagaccaggaagcagactgtccctaaatgaaatactccatctgttgtctcaaaagtgttaaactagtttcattttcttttgtggcattctacccacagctcatttcataatttatgtaaacttaaaagtatagggggctgttgatgctagaaagaagaggaatttgtggttttgcttttaaatagtgcctgtgcatgggctgcctcctagtgcttttctgttttggagagaattacactcactttgtgttcaagcacctatcttctggtttggactaaatccagctccatagctagccttttgttttcatgggaagaataccaaacttccatgttagtctttaataattttgttaaggcgagctagtgtttttcccttctgattagttacaaagcctttgtacattaaagtttcctgatttttttttctcatgcttttgaataacaatatactctgaataaaccaagtatattctaaaatcttctattttgggccttattaataagaaatggacttttagaacgtttgaaatgttgaataatgaagtgactaagtgctacacacatactataataaaatctcttcaaacgagcatggtctaaattcaaaattttaaaggggaatgtgtagttcttatatccagtcactgaaacagatgaggctttattgcttagaagtaccaacatagttttaaaaataataactgggtaattaatatattaatggtatatacaggggaatttggatttttcttagtggtgggggaagtaagacacacaaatgctccatgtggtcatgtgttatagtgccatagtgcagcaaaggtagacggagattacttttgatttaagagattggagcagagttcacaggaatgggtaagaataacatatcagtgagaaatgggtggggaaaaatgatttcaggagaatagtatgcactgtgggaggaagcaggaggtagatccagggttgtggtgggagtggaggtatctaattgactctgtccctagcacatgctgtcacagggcactgtgtgggcagctggcaataagctacatagataatgaatgctgggctgggatggcctggggaagactgacagcaaggaagggactttcgggctagtctttgagggaagggaaggatttgattaggaatctgggtgttcttaagagcatagacaccaagacaaaaacaagggcagtaagaccaattttgctctattgaggttgagaagaaaaattaagttagctggactgaagaaccttgaatacaaggctgaagaacttaaatgttatcaggaatgattttgggtttcttgatactccgctgcttagaaacctgtagtgattagagcaatgttttgagaatatgattagaagtatgtggagaggttttggagggtggaagaaggaccagaagcagaggcatcagttaatgattgaataaatcttgtaatgatattcaaagatgtaaaagttaaggtagatgggctgggcacaggggctcacacctgtaatccctacactttgggaggctgaggcaggcagatcgcttgaggtcgggagtttgggaccagcctggccaacctagtgaaaccccgtctctaccaaaaactacaaaaattagattagtggtggcacatgcctgtaatcccagctactccagaggctgaggtgggagaatcacttgaacccgagaggcgaaggttgtatgagccgagatcttgccactgcactccagcctgggtgacagagcgagaccttgtctcaaaaaaaataaaatgcagggttgggggccgatagaggaattaattttgcaatttaatacccaaaattgaatatttgatgccttgagggagaatattcacttagtcaatagatatttaatgagcacctattatgtgtgatagacactgagtttacggtggggaacagaaagacaagtggtctctgcccacatggagcctatatttaatgagagagacaaaaaacaagtatatataaaaatatatatactttatatatagttatatataacaaatatagttaaaaaggatatagttaacaatacaatatatatatatatatgaaggggaaaagcaaggtaagggataaggagtgatgaaaagaggggagtgttttagagtcttgagagaacatttgaatggagacctacccaaagggagggggagagggagcctcctgacagcctggggaaagagcatctctagcagccagttgtaggccttgagtgcctgagaccagccagatgttctgaatggagtagagctggaaagggaagagtggtaggaatgatatgtgcagtgtaaccaggaatagagcctttagggtcctgaaagccatggtaaagagtttgattttcctttagatatgatggaaaggcacgggagttccttgatgtttttaaaagatccctatggcagcagaggtgataaggtggtggttcagatgaggcctaaggcaatagtgatagaggtggtgagaagtgataggattccaaacatattttgcaggaaagaggatttattgatgagctagatgtgggctgtgagagaaagaatagaatcaaggactaccccccatggtctgtatggtgaatttgtctgaattagaaaaagctaattctgtctctggccagaagcagaagcacttctcagcaccactgggtaaagaagctcccttcctcccagcacatgtacctgggtgctaggacaccttggtgggaagagcgtgggctggtaacccgtgttggccctgtggccaggcatccttgtgaaggactcaacctgcataagtgaatgcagcagcactggatgactcctgagtttgtggcctgagcaagtgggtgaattgtagtgtcatccccaaactggggagactagaagaggagctgactgtgagtggcagaagacagggcaaagcaaattccattttgggtataagtctgagatgcccattaaaagtcctggaagcaatgtcaagtaggcagatggctatgaactggagccagggtgagaagccggcaggactgttgctgtttttgagtttgaagtgactatcaagtggagctgtaggactggagcttaggagaaagatttagattaaagatggggaagtcagtgtgcccagaggaatagatgaattctttgagggacattatattgaaaaacaagaagattggactgccttgggagtagtatttggcagtggaaagtgggtaatgaatctgcaaagcagcaaacaggaggaagattagggtgatggagcagcatggaaggcaagtcgtgagagggtggagggtgctggggggatctgaaggaatcagggcttaggaagctgctggagctttggagagcgctgtttagaggtaacaatgagtgtgaaggtaattttcagggaattaaaaatatactttcaggaaataagcgctgaagggagaacaatagggtcaagtgttgctttttaaaaataggatgaaattgtgtctgttttaaggtaaactgagagaaccaatgaaagaggaaaagttaaagatgctagaaacaaaggggatcagtgagggaacaagaacagggcatctagaggataagtgtttgaaggaatagataaaaagtagtctcaaaaatgaggaagctttttactttgagcgatgaaaacagtttttatctttttagcaaagttgtagttaggatcttctgtctgtttttaggggtctccactggtattaaaggcctgaagaaagtatggcgggaaccaacaagaaaaaaaaattgtcaagcagtaatgagagaccaggtggaaatatggagaataatctgtaatagccagtcagtattctgtggtccaagagcaaaaagggaattgagaattcagagttgaccccattaaaaaagaaagacattaaggacacctgaaacagtggtttataacccagaaaagtgcatatcaaagtcacctggagactttaaacaaaattatgggctgagcatgttggctcatgcctgtaatcccaacagtttgggaggccaaggcagaaggattgcttaaggcccggagttcaagaccagcctggccaacatagtgagaccccatctctataaaaaacaacaaactctatgcatttacctcctttccctaaaatgtatcggattgaggtgtaggagtaggacaacaagaaatgggagagatgtttatgtatgtttttagaacattctgggtgatgttcttcagttctttgttccacccccattccccattaagaaaactgttctggactctgggcaggaatagaaaaggatggctggaagggaagctaaaggactaagtggaaagttttttgaagtggtatcaacacaaatagtaatagtagtattttgggggtgtgctcagctagttaagttcctgtactgcagacctttacagagtctttcatatgctcatgaatctccaagagggggattgaatattttaagatcatatacaaacacaggatccttattttcatgggccatcttacggactagtttctgcaaattacactttgaaaatgatgaattagagaactgcagcaatgatcagttccagttaatttggaaggttcatgggttttggaagggggaagccatactggaaagggagaatgtccgggttaagatcttgaagcacagttccaggctgtggctttgttggtggagagctgggttactttccattccccagttaaacttgttttctaccattgagtccagtatcagttgagtcatcaatatgaatgttgaagttgcaaagtgtaagacaaaatggggaatttatgaagtatttacaaatattctatggtcaatagtttaatttctcatagatagggatggataaagtctttatgaaagcagaccaaaatccaatggcttttcaaataactagacttttcctcttaactataagaaaaggaaagtgggtaactgtcaaaagtagatacactttgaaatcttggagcacttaatagaggtgacttaatattttggagttgagaaacttttaaacacagcagtgtcataagttctgagaatgacccaatttgtaccacctgggcattgaactgaaggctgtctttccagtgaagtaaagtttaagatgacagttaacactgaatgttctctcttaagatttgcaaagaagccagtgattggtgaggatagtgattcttggcagggattagacatttatatagcatgatttaatttttaataatgtgaattttatcagcatacagacttcctcacaatattgagacatagaaaatgggaaggcttctaaacaattttcagttgccccaactgtatgagtttcacaaaattccattctcttctgccaagtgatattattccattccttcccttgtgtatcttatctttattattgaattttccctcacaatccactgttaaaagaagaaagtatcacacacgtgggttcttttggctatggaagtgtccttgagatcactttttgcacgtgactcagctgaagtgttcaaagcacatggaaatcacttgccagtgacaggtggacgttgtatgtgttttctctctcctaaggatgcctaaactttcttttcttcacaggtaaagtcagtgataaatcttttgtttgctgcatatactggagatgtgtctgcacttcgaaggtatgtttacaggatggattagcatgcactttacagatatttatgaagttgcttctgggcgagcagccattttaaggttaaagtctcacttttctttccctttgataaaaatgaccccaacaaaatttttattaaataggcacttccagtgccttaggcctgctttccaatcttgtccttttctgcctcctataaaaaagaccatatctctgtttccccaagtagtaactgttcagctaatctggctaattagtaccagtggcttactggaattggacagtgccttctcactccctgtctaccctccattcccaatctttgatatgtgtgtgtgtgtgtgtgtgtgtgtgtgtgtgtgtgtgtgtgtgtgaagcagctggggggtttggtgtctggcagatcatcaggattagtaaggccatatactgctgtatacctaaggtcttttgtgtagagttgtaacttattttcttttttttttctcccattaatacctcaaataactgattttcaaagtggaaaaatgtctgtgcttcccccccttgttttgaagtctgacaagtactagtagactgtgaaatgtttaagaatgggagtcttagtaaaacatacaactttactatagggattagtttcttgcccttatgagacataaaccttggtacacagttgtgccataattcttaagttgcgaacaataatgtaataaagtttaattctgtgagagatggttaacatttaatcttacctaaaaaaaagcaaagctgaggaagagaggtgaagtggcatctacccaaaacacctgtgtactggttaataaggtcggtagttcccattaatgagcttgatgaaggatggcacctgacagggccttaaatgaactgatggagtgaatgttaccagtgtgaattaaatttgctttatatataataaatagctgtgcttacacattttcagatttgctttgtcagctatggacatggaacagcgggactatgattctagaacagcactccatgtagctgctgcagagggtaatacaggaactactcctatctattttctttccagatttaatttctacttagtactaaaatctgctctttttttgggggtgggacggtataggtcatgttgaagttgttaaatttttgctggaagcctgcaaagtaaaccctttccccaaggacaggtgagcacttatgttaccttctaaatatgtcagtattttattatgcaggactgtaatattcaagtgatgataatatttcaacctactaagacattcttgaacctgctatgatatcttataaaggcaataaaccttgtttctactagataggtaattctgtctcccatatcctgtttcttatctaagaatggtgtcttatttagaaattttcaggttgatttgaccattagtcaatacactgtatgaacaaaacaattttttttttgcatttgggaagaaagaattggaattttatcctcatggattttaaaaaaaaaatttttaaattacactttaagttctgggatacatgtgcagaacatgcaggtttgttacatgggtatataagtgccatggtggtttgctgcacccatcaacccatcatctacattaggtatttcttctaatgcgatccctcccttaccctgacccccaaacaggccctggtgtgtgatgttcccctccctgtgtccatgtgttctcactgttccactcccacttacgagggagaacatgaagtgtttggttttctgttcttgtgttagtttgctgagaatgatggtttccagcttcacccatgtccctgcaaaggacatgaactcatccttttttatgattgcatagtattccatggtgtatatgtgccacattttctttatccagtctattatcgatggtcatttgggttagttccaagtcttttctattgtgaacagtgccacaataaacatacatgtgcatgtgtctttatagtagaatgatttataatcttttgggtatatacccagtaatgggattgctggatcaaatggtatttctggttctagatccttgaggaatcaccacactgtcttccacaatggttgaactaatttacactcccactaacagtgtaaaagcgttcctatttctccacatcctctccagcatctattgtttcctttttagtgatcgccattctaactggtgtgagatggtatctcattgtggttttgatttgcatttctctaatgaccagtgatgatgatatttttttcacatgtttgttggctgcataaatgtcttcttttgagaagtgtctgttcacatccttcacccactttttgatggggtttttttgttgttgtaaatttgcttaacttccttgtagattctggatattagccctttgtcagatggatagatcgcaaaaattttctcccattctgtaggttgcctgttcgccctgatgatagtttcttttgctgtgcagaagctctttagtttaattagatcccatttatcaattttggcttttgttgccattgcttttggtgttttggtcatgaagtctttgcccatgcctatgtcctgaatggtattgcctaggttttcttctagggtttttatggttttaggtcttatgtttaagtctttaatccatcttgagttaatttttgtataaggtgaaaggaaggggtccaggttcagttttctgcatatggctagccagttttcccaatacctttccccattgcttgtttttgtcaggtttgtcaaagatcagatggttgtagatgtgtgctgttatttctgaggcctcagttcttttccattgctctgtgtatctattttggtatcagtaccatactgttttgattactgtagccttgtagtatagtttgaagtcaggtagcgtgatgcctccagctttcttctttttgcttaggatcgtcttggctatgtgggctcttttttggttatatatgaaatttaaggtattttttttctaattctgtgaagaaagtcaatggtagctttatggggatagcatagaacctataaattactttgggttgtatggccattttcatgatattgattctttctagccacgagcatggaatgtttttccatttgtttgtgtcctctctttatttccttcagcagtggtttgtagttctccttgaagaggtccttcacatcccttgtaagttgaattcctaggtattttattctctttgtagcagttgtgaatgggagttcactcatgatttggctctctctttgtctattattggtgtataggaatgcctgtgatttttgcacattgattttgtatcttgagactttgctgaagttgcttatcagcttaaggagattttgggccgagatgatggggttttgtaaatatacaatcatgtcatctgcaaacagagacaatttgacttcctctcttcctatttgaatacctttctttctttcttttctgagacaagagtctcgctctgtcagccaggctggagtgcagtggcaagacctcagctcactgcaacctctgtctcccaggctcaagcaattctcctgcctcagcctcccgagtagctgggattacaggcgtgtgcccaccacagccagctaatttttgtatttttagtagagatggggtttcaccatgttggccaggctgctctcgaactcctgacctcaggtaatctgcctgccttggcctcccaaagtgctgggattacaggcatgagccactgtgcccagcccctttatttctttcccttgcctgattgtcctagccagaactgccaatactatgttgaataggagtggtcacagagggcatccttgtcttgtgccaattttcaaagggaatgcttccagttttttgcccattcagtatgatattggctgtgggtttgtcataaatagctcttattattttgagatacattccatcaatacctagtttattgagagtttttagcatgaaggtgtgttggattttgtcaaaggccttttctgcatctattgagataattgtggtttttgtcattggttctgtttatgtgatggattacgtgtatcgatttgcatatgttgaaccagccttgcatcccagggatgaagccgacttgatcgtggtggataagctttttgatgtgctgctggattcagtttgccagtagtttattgaggattttcgcatcaatattcatcagggatactggcctgaaattttctttttttgttgtgtctctgccaggttttggtatcaagatgatgctggcctcataaaatgagttagggaggattccttctttttctattgtttggaatagattcagaaggaatggtaccagctcctctttgtacctctggtagaatttggctgtgaatccgtctggtcctagacttttttcggttggtaggctattaattactgcctcaatttcagaggctattaattactgcctcaatttcagaacttgttatcggtctattcagggatttgacttcttcctggtttagacttgggagggtgtatgtgtccaggaatttatcaatttcttctagattttctagtttatttgcatagaggtgtttatagtattctctgatggtagtttgtatttctgtgggatcagtggtgatatcccctttatcattttttattgcacctatttgattcttctcttcttattagtcttgctagtggtctattttgttgatgttttcaaaaaaccagctcctggattcattgattttttgaaaggtttttcatgtctctgtctccttcagttctgctcttagttaattcctgtcttctgctggcttttgaatttgtttgctcttgtttctctagctgttttaattgtgatgttagggtgtcaattttagacctttcctgcttactcttgtgggcatttagtactataaatttccttctaaacactgctttagctgtgtcccagagattctggtacgttttgtcttttgtcttattagtttcaaagaacttatttatttctgctttaattttgttatttacccagtagtcattcaggagcaggttgttcagtttccatgcagttgtacagttttgagtgagtttgttaatcctgagttctaatttgattgcactgtggtctgaaaaactgttatgatttttgttcttttgcatttgctgaggagtgttttacttccaattatgtggttggccaattttagaataagtgcgatgtggtgctgagaaaaatgtatattctattgacttggggtggagagttctgtagatgtctattaggtctgcttggtccagagctgagttcaagtcctgaatatccttgttaattttctgtctcgttgatctgtctaatattgacagtggggtgttaaagtctcccactattattgtgtgggagtctgagtctctttgtaggtctctaagaacttgctttatgaatctgggtgctcctgtattgggtgcatatatatttaggatagttagctcttcttgttgcattgatccctttaccattatgtaatgcccttttctcttttgatctttgtcggtttaaagtctgttttatcagagactagcattgcaacccctgctttttttttttttttgctttccatttgcttggtaaatattcccctatccttttattttgagcctatgtgtgtctttgcacgtgagatggatctcctgaatacagcagaccaatgggtcttgactctatccaatttgccattctgtgtcttttaattggggcttttagcccatttacatttaaggttaatattgttatgtgtgaatttgatcctgtcattatgatgctagctggttattttgtccttcagttgatgcagtttcttcatagtgtcaatggtctttacaattttgtatgtttttgcagttgctggttacccctcgtggagtttttaacaacccagggtagacaagacaaacctttagagaagcataaactttaagatgataattaacactgaatgttctctcttaggatttgcaaagaagccagtgattggtgaggacagtgattgctggcagggattcgacatttatgcagcctgatgttgtttttaataataatgtgaattttatcagcatacaaacttgctcacaatattgagacatacaaaatgggaaggcttctaaacaagctaaaatgtataagaaaactgttaactctaaaatgaatatattggagtttgttgaaatttctgcatttggttggaatcagtttcagaaggcttcatgaagttaaattttaatcagtgctttagggaagagacgagactgaaggcacagaatgaaaagaagggcattctatctatagtgggaaaaatatgcctagaatatattctgctcctctcctctctctcctggtcgacatagcaaactgctattcatcctgcaacaaatgatgtcaacaaagtggtcagggaagggataagaatgcagcttacacatatacatgtacagtaaactctagattcatatccttggacattatgtactggagtagagtatatgagtcaatgagtaatgagaataaaagtttagaatgggaaaaaaacgcatacttgatggtggtttgatatgtattaggagtttggattcatttgagaactgggagctgtattaagtttggagcaagttgattactctttagctgtattgtgtttctgtttattaagcttcaattttttttttttttttttttttgagactgggtcttgccttgccactcaggctgaagtgcaagtggcatgatcatagttcactgcagccttaacttcccaggctcaagcgatcctcccacctcaacctcctgagtagctgcaatcacaggcaaacaccaccatgcctggctaatttatttatttattttttattttttgtagaggcagaatcttactatgttgcccaagctggtctccaactcctgggctcaagcggtcctcccatctcagcctcccaaagtgttgggattacaggtgtgagccattgagcctggccaactatcttttttaaaattagggcttgggttttgttggttcagctgttagcttgcaagaaatgcagaaaagttatgtcagtgtctgacaaatgttagcaattttgtaagtttgctaacactttggttatctaactttattcctatagttgtaaaaaagcactatgattaaaaactcctttattggcagtattctaaaacctcatgttaggttgacagtcttcttccctttccccaaattttaatacccaccccaggtttctaaagcaaaaaattgaagagcattttcctcctgtgtttataatcccaactaaaacactatgtaatacatgttggaaatattactgtgctttgtatatgtattaattttttttgccctaaattggcctctaggaatgtgaaagtagatgtacccacctgataagaaaaagtgagctaagtaactaacttgataactaggcattcaacaagtctttttctctatttcatagaatcagtgtcaccttaaattataataggtttgcacagaattcgtgaattcttgagatagagtcttgctctgttgcccaggctggagtgcagtggcgtgatctcgttcactgcaacctctgcctcccaggttcaggcaattctcctgcctcagccacctgagtagctgggattacaggtgtgttccaccacgcccagctaatttttgtatttttagtagagaggggtttcgccatgttggtcattctggtcttgaactcctggcctcaagtggtgcacccaccttggcctcccaaagtgataggattacaggcatcactgtatctggctgaaattagtgtattctttaaagttcatatttttcattaattcacagaagaattgtaaaaaaggtaacacgcagttgacattccatttttccagaaagacagataattacatactgtagaggatgactcaaaagtctgtttcaagccactgacttcctaaactaatgaaggcctattcaaagtcacttaattcagctgttttttttttttttttgataaatacaaagatacatgtaaagttttacttacctgattttaaaaacaggctaccaaaatttatccaaatatattaaaaaatgagactgttttaaaaacctttcgtttccatattgtgactccactaagcgggtaaaaagttcaggacagagatggaaaggaaagaaggaaacaggaagaagtgaaactaggaaggtggtgccagtggcacatggatgaagaaagagagatcatcagccatggagaattttgtaatgtaagtagagagagagattgggtaggaagacaggcttcacagtttgtaaagtgtaagggaactacccatcgtaccctgtcattgactagggctgtgagttatgtagttctgtctcctcttgcaaaagacttaccacttctggcaagtgattaaccacttctggcaactcttcatttcttcttatccttgaatattcatctacatcactctaaacagcacagccccagaagcatggaaaggggagttattagtatggaaaggggagttactcttctggtgtagtggtccgattgagtccatggcttcccagccttaccagaggtgataaaaatgtcaattcctttggggccaatcttgctcctccagtgtgttttagccctaatgaggtcatggttatttctagacttctgagacttactgtggctttgaattgacacaaacactaattttctgtcaaaggctagagtgatggatgttatatgcctgaattttctttgaacattttattttaaaagagatactttgggcttttcatgaaactaaaattctggaaccctagagcagtctattatatctgtcaccacaaggactttccttaaaaagctccctccataagcacttggatgtgtaaacaagatcctttcacagatctttttctcttcctctccatatcccaacttgtcttggagactactttttgaattataaatccctttctgcatttctattattaatttttatttgtaaaattgctaaaatagctaaatttggccatttaacctgcatttaaaatctaggaatgtggggtgatcatctttgtacataaattacctaatgaccctgtccatgctgtgctacgtgtttaggtggaataacactcccatggatgaagcactgcactttggacaccatgatgtatttaaaattctccaagaataccaagtccagtacacacctcaaggagattctgacaacgggaaggaaaatcaaaccgtccataagaatcttgatggattgttgtaatggtctcaaatcccaagatttaaatcacttacctatttaattgtggaaaatgattatgaagaacatgtgtatttctatctggtagtgatgtatattttacatttgtcatttcagtgttactggagttttcttcattgtgcacacaggacaaatctgatctctttgggaaaaaatagaaataaaacaatctccctccataatgtgagcaatattacctcgtgcattgtataatttgatgtaaaagaaatagttaccaatgctagcttgtgtggtcttccatgatttatttgtgttttgtgaattttcaatttatggtgatgatctgctgatatgcatttataaagtaagctctgttgtacagtctgtccaaatgggtcaaggttgcctttagaagcaaatagtgtgattttcaagacttcaaatacaaatttagtttaagtgtttgaacaactatatgcacttacggttgtgtgtttaaaatgtctctctcaccccctagcttcatgatgtgactcttaaaaaactataatagttaacaactgttagtaagatagaccaattctgattagactttatcagggaatctgtttaagatatgtttggtgaccaaaacgtatgtgtgaatgtagttataatgcttttgaaaaattttcctttttctatatccccttagtccagcctctcttctcagacatttagctatctgcctctttcctttagctgggaaagtgagagctggcatactatgcagtttttatgttttccatagtaagtcagaaaatgcctcctatttctggcatcagaactttgccatttgtctacagaagacgaaccagagacaaaattactaagtataaattagtcaagtttatcagtctaaaaaacgaagggatgtgcaactgcagctctttaagaagttttttttttttagcttctagggtaaagataaattcagaaatgctctaagctaccaaagttattctgaaagtatgggaactgctacaactaacaaacatttgtttccaagcctgtcattaagagtctgcatcaagagatttgtcctccttgggggaccactggatcattccagatttcttgtgatttttctattgtgtaattcttggtgggctctgtagtttaataataagaaaaaggccatttcattttaaattgtgacctataattctttgtcttgggttggtaattcaggattcatttggaaagtgggtaaaaggggcttcaaaaaacggatagaacaggattttctaggagttacacatacattttatcctgtcatacctcgagataaagtggcatgttagtgaggagttctgatattaagcacacacacacatgcacacaaatggacttctctgaagctgtgtttagtgaaatgagctcaagtacatgaatgttagttgttatcacatacagcaaattcctttttttttctttttctatgagcacactctgctgcttctaaactttacatgcctgatggcaccttactccagcagcctccaggtgctttcattttcacttccagtctaagccagtggctcctgccactgccctcccattacctagatggcacctcctttggtgaaaccacggccaatgttccttagctgcaccaggcccgaagctgttcccatgcttgagcttccatggggaggatgctgagtgagcagtttcctaccccgtggatctagcaagccatggagacaggtagcatttgtaagatgctgcacaggagcagcattatccccaaagatattacagggtagacacgttttaactgaaatcaatcaagataactttattcaaagagcagcccgctttgtgtgactaaaatgaaacaagacagttgaattgtgtgacttgaagattaccaatgattttgaggcttttctataataaaaagaggttctaaccattatttgggaacaaagagagttttcatcttttttcagatcaaaaccattctgtaaaatctttgttgtttaattaaatgtgccgttatttacccctgatgttatttatgactatgtgccgattcctgctcgggctgtttgctgttggctggtaataatatatttgatttaaatgctgttgactgtgctattaactgctgccgtcagtaaactccaaagatctttttgttttggctttagtatcatatgtgctttttctgtatcctgagcgctctatatgatcatgttaatttaaagctttatacacattgttgtttttgctggtctcatctttggtaatatgctataccccactgctgcccgacactgccctttagctgcagagctggattagctgttgaccatttgatgctgttgtctgtctggcagggactgaatgacctgatgtcagatttagattcttcctggggattacacagctatgaatgtatttgcttctaaaacctcccaaagtgaatctaatcttaaaactacaagttgtaagtattctgaaattgggaaacatttattttaaatgcaatcaggtagtgttgctttttacagcataataaatatatgtatcaaaaaaaaaa

SEQ ID NO: 378 - DNA, 172434 bp, Homo sapiens
aaaagcggcctctcggctgagggccggggagctagcgctcaagcagagcccagcgcggtgctatcggacagagcctggcgagcgcaagcggcgcggggagccagcggggctgagcgcggccagggtctgaacccagatttcccagactagctaccactccgcttgcccacgccccgggagctcgcggcgcctggcggtcagcgaccagacgtccggggccgctgcgctcctggcccgcgaggcgtgacactgtctcggctacagacccagaggtaagagggcctggctgggggcgtcagggatgagctgacggcccatgccacggaagagaggtaagaagtgggggcccgcgcctccacccggcacagggtaaacgttacccgcctcagtttctgtttgtctgtccaccctgtgctgtgcagtctacctctatctgtctgtttgtccatgcgtctgttgatgggcacacgctcttggcactgtcctctgtgggatttctctgagatcttgtgatgctttacaagctgcaggtgccggggggcgctggagtccccagagggcatccagagggggcagactcctgctttccgtagattttcccccttctgaatggcaccgggggcttgcgcccgggagagtgtctcgccgaggagggagtaccacaagggtcaggtctcggtgtcctgccgactgggagccagctcacgccgagctctagcgggcgtgcgcctagcaacaggtctgcgccctgctgctcctgcctcagcacgctcttcctcccagtttccctcgcctcccagtgcctccgggacagcgctaggcacccagcgacgcgctggcgcggggccgagctgaggcaattgcaatgttagatgaacccggggggctctgctgatgtttagactgagactccaaacgtggcatcgctggaagaaggtctggtggtccctggcaaaggacgtcggctccaagaaaggtcgcgttaggttgtgaggaaaggcagagagtcctggcagaacgctggccaggtctccagctcgccgctctgggaacgaaggccagtgacattctggaatggaccccaagggatgcgtgtgctcatgagagaggagcgctgtgcgccctgggtcctcagccgcagacactctctgcgacagccgctgttccccaagggtcggacgctacggcagtcccaggagttccgccagctgccgggtttgaggtcctgagtccttctccaagcagccaacgctacccacaggtgagagctccctttaaaaactaatcttctgatgtgtgagccagtgcctggctgcagccccataccagggacggtgagccggggagcgcgtctctccatccctgcggtctggaaagtgatccagggcgcgcccgagggcggggagccggcggctctgcgtgcccaggcgcgacgccaccatggacagctcccagccacttcctccactcggggtctgtggccctgggtctccggggaagtcgtgcgctttcttcccagacccaaggcgttggggcgctgggaaagaggaaagggactgagagtccgctggggccctcggtattaccactcaggaggcagcccagccctcaggagtctgtggtttgtgaccaggtcctagctgagccggcagttctgcaggacctcccgggggcactctgtggttctctggcttttctatgacaccacggagacccctcagagctgttaggaaagtatggcccctgagaatccgacccaggcagtgagataatgccagatacaattacgccagacataattagggatccagctcaaactgttttctgtgtagggcacaagttcatgtgttccatcaaattaaattatttatttagtacatatgggattgggaggatatattagttttacgattaatgatagaatggagaagaaatcaaatagagcaaatttatagagaaggcaatcggatgcatttgcaaaagcaactatgcggttttctgatcctaatagttttgttcaaagcccatgactttcttaaagcaatttccaaaggctcctttttagcccagtagatgacttttcaagttggtcacttgaaacagggtggaaaaacctgtagggtttaatctgtgcaccaaattaaagatctcccttctctggtaagaaacgacactggatggggctctttttgtcatttccacccatactgaagtgtgtatcttcctttattttaaaattacaagaaacgcaggtctgctttttttgtgtgtgactgacaaaggccgacggagagtaaaaacaagtaaacacctcttataaaaaaaaattttgagacagcatctgtgactttgggaaagttgctcaaatgttttgtgcctgtttgctgatatgtaaactgggaataacgcaatgccatcttgcagggttgctatgagaattacagtaattggtacaatgtaaagcatttaatccagtgctgagcatagagaaatcgttttaaatggtagcaattacaggtatattttaaagacagttgtgcatttcttttgaattatgttcaccatccctttgccctctctcttaacctagtaactgtttgatagggactccatcttcactttatttttgcatccgagaacttgttgatggaattgatgaaaatgctggagttgatcacaatgaaaaaaaaattcttatttaaagacaaatggaagaacttttatgtgataaaaatcggtcaactgttttcccctacctacactacttggaggaaagataaaagtaagttgttttcaaaatactctcacagccctctggttcagatgatcaatttttcctgattgttctctcacaagaatgcaaggtcttctaagtggctttgttgtctttctgcaagtgaagtactcttgggtattgatggagagtggcctctaaggcctggtttctagatcactccaggatgaagtaggggttagctttatggagtggaactttgcccaggggttcactgagtggtcattgccaagcaggaagcaccttacttcatgcttgagccttgcttaggtgtgagattctgaccaagatacttgctctgcccagagcagtgagcacttatttgatcccagctggactggagggtcccttccagctctgcatttcagggttctgtctggtagacatcactaatacatgacacaccacagaagtttggagaatggaattgtatagtacccagtcttccagttagagttttctccccccacaaaagtgtgtgtgtgtgcgtgcatgtgagtgtttttatccctgtcagttttacattctggtgctcttagatttttattcttctcctccttctgctcttaatagctcagaaggaatcttagcttcttccgtctaaaaggattggagctgaagaatacatgctacagatgctcagaatctttctatgagactgctggtgacatgaacagagcaggaggacatggggccttggatgaccttgaattcctggctgtcttctgtggactcccatgcagattccagtttccagcatacccatggctttctggtaagaaaactattgaactacaggacactcttggagtgaaggccaatgaggggaggaactgtcatgtaaagtggtagaaacgagctcttcatcagtcctgtggcattctgcctattgcaacagtatctgagtcctcaggacagacagagcaaatggcaagagtggcattcagtggggaaggccagcagagtgaaaggggtgaattcaattattctcatcagcctcctttgaagcctgctgcttaagtgacctctttttagtaccttctgtggtatcggcaaagcatcacaatttgatggattaaatgcaatttgcatttgcagttatagctcaaaagagaaatgcaaacatgtaggttgggttcctaaatgggaacaaagttgtatttgtgagttgcatccacaagatagcatatctttgaaaagtctggactacacatctctttctacatgatggcacatacccaggtgtttgatcttatcagggtaaagcatcagctatctctcactgcttgttttttaccattatctggaggcagtttcagtttcctttgaacagtgaataggaaaggatcacattcttactctcttgtatctggttgggttggcaggaggctggaagtggcagtgggtactgggggagacttctcagtgctgggttcctttctactgttttgcaagctattcagctgggcctgaacctcctttccctaaagtctggcatgtagaaactttgctaatttgagtaggatggtgactgtcatggtgacttttattaatatctgcacctctttgctttagctactttcttcaggggccatcttatcctctctggcaggcccctagtccttctttttcttctctgtgccctggcaccaggctttgttcaagcttggttcttcagaacggaggctgcttgcagagaaatgtcatcaaatatacatttgctgtctgcttagttcccttggtgttaggaaacacacatggccacccagagggagaggagctgctactcctctctgcccctgttattttttagggcctgtccctagactcagcttggctccaggaatctgaatccatccttgcctccccacccctgcaggtgagtgagccctggggagcacaagcagtcaggccttccttgcacaggcacctgctcagagcaaggagctggacagcctggctccttgcactgggatatctttgagtcttctggaagggcagtcatatcaggggtttagatgcaacttcagtttaaagtgctttgcccagactttgaaaacctttgaagaccaggtctttgaaagccctgtgaatttctttctctcctgtcagtaggagagctgcaccattagacattttctgttacggagaaagcatatctagatagttgttctggcatggaaggtgtccatgccagattgctgtcttacctgtttttagacatcacacggaggagggagggccacaggcttccccaggagcctgctgcactctttggccctctctgaggtgaggagttcatgctgttctccagagtctttatggctgtaaggtatgcactcagcccttgggacgaggaaagtgcagtggcctggaggacaggcacatttttctgtggctctgccagtcaggaaaggtgggaaccattggagtgttccttggggactgcttgctgcttactgtgactgtactccttgcctggactatcagccaggacctgggcaggttccttgacttctctagtcctttgtttaggggttaggttagaccagtgcttcttagacttaaaatatgccagcaactcacaggggcacgtgttaaagtgagagttctgatttggcagatctgaggtagggcctgagagtccacctttccaacatgctcccaggtgacgctgctggtgcacagagctgccttcaagtcgtgggggcctatgtcattatgacattgatgactttctgtgattctgattccaattcttcttggtgtaatttaagtcagttcccgttgtccgagttgaggaagcccagctggtctgtgccctcctaatgaccttataatgacccttaaaattcttggagataattattgtcgctcctaagccatcttatcagcagactaaatatcttggccccctttaagtttccacttttccctgtcataataaattttccaaagctctctggaccgagctacttttaagcgcaagatcgttgtgcaaatggcaatttatctttgcctggcagaggcatttgaatgtaattttggtggtattaagagatcacttagggaatttcatctaactctggctccagacactgagaatggatgtttacatttaaacaacttttttagactccaaagatcacaatttcttcttttttgaacctgaaaatgaaattaaggcccaattatcttcctcaaccccctccctgtggcactcctgggaggatgaactggtcatcaccagtacattctgggtagcccaagatgctggtgtgcaattgtgttccgtcacccaccgccacaatcggaagcagaaaataagttgagtacaagtttttgatcatcttctatgaggcaggccctgaatgagtcactgagaaggcagttgaatacatggttcctgctctcgaagagctggcagcctggtgagaggacagacatcccagtcagaagctgtcatacagggtgatgggggctaggacagattagtcaagaggagtggagggcgtgagacctgctggagaaatgaagaagaccagtaattcagccagaggagatccaaggaagcttcactgagggcatatgaggagagtcagaagctcagaaaggcctaaaccccttacttcctgcaacctttcagatgcatgaagtttcttacctgcctcagatgcataagctccctcacctgtccaggtccataagctcccttacttgcatcatgtgcataagctcccttacctgcccaggctttgggctacactgggcgcaagagagtgcttctgagcagctgttaggcctctttcctttaggagacctttagtcttctagactagtaatttaaaaattacttgaaccacaaaatgctttttttgcgataaaatcttagtaaatccaatttaaaaactagataagaagtggctgtggttggggatgggagctgatttttgtcttgagttctctcaaaaagttccacagagctctgtgggttccaaggagcacactctgaaaacttcggtcctgggtcatttcgttttgcttttggcagtcatatcaatagtgttagcttagttttattgtggtttgtgttgctatgtctttttgttttgtttttgtgacaaagtctcacttttgtcacccgggctagagagcagtggcatgaacacagttccctgcagccccaacctcctaggctcaggtgatcctcaagccccccaagtagctgggactaattttagctaattttttggactaattttaacatttttgtaaagatgagtttcatcgtgttgctcaggctggtctcaaactcctgagcccaagatatctgcccaccactgcctcccaaagtgctgggattacaggcttgagccattgcacccagcctgctatgtctttaatattctggatgtcttgctgtgtgtgtgtgtgtgtgtgtgtgtgtgtgtgtgtgtgtccatcaacaattttcagtgaaaattgaaaaccagaattaaaattaaaaacggaaatctggaattaccacatgtgtgataatccaacaaagatggggtacatggaggaccagtgagaagggctgtatatgataggtgcaggaaactccaacctgtagctgagcatgggagggacaaacaaagttgtgagctttttgcaaaaatgggcttcttatttacaacctggtctgttaatcttgttaaacctcccaatattttttatataaaacctggtaaggaaaaagaaatcttattttcagggtttaaaatttggcaaggtctatccaggaacttgcatcctttttcattgatgtcaaaaagccaaatttgattgatcgcaagatgttttgaaggtggggcttgaaaagaggaggcaagtcagatagacaggaatggaagagctctgctgcagaggcgcagggttgcgggtggtggctccaatttttagctgtggcttctgtctgcctcctacaaagctctcctcaagggagaaaatgatgccctgaatgggataacacccgaagagaggctgcccctcactgatgagtggtcccagtccttagaaagggaactgaagagccccttctgggcctggagccagctctaaaaacataatcatatgaattattgaagatggtgagagtaaggcttgttcagtctagagagtttagacaataccttcacctctggaagaaccctgctaggtatgtgaggaactctagcagagggaaggggccccctggcagatgggtttccctccaggatgggcatttgcagttgcctggggctccttctactggccataccaaaacacttgccctggacagtgtcaaagaaggctgagtgttggtgggtgatcagcagcatctctttctgggggaatccagccccctgtctggaggcctttgcgtcagcccacatcaccatagcaactggaacatactaaaacaaagactgactcccagaccttgggattcagcctctctctctcctacttcctagatttttcctcaaagctggacttaggttggatccttggttgcgctgatctcttagcactggtagccacagatgccggtttctaaaatcccatggaactgtcttagggggctggccagtggtgaacctgagccatccacttgtacacagtggctgctgcctgggctctcaccatgtgtgggcccttctctccagcttccagaggaggcagtggtatctgcagcgaggagacaaaaacactgatgctcagagttacagagatggtataggctgatgcccttgggtgtctgtctggctcttagtccaaagcattacttgtttgccttctctataggactcttgtcatgccgtgagggacttattcccagcttggtctcctcaagccccctaaaggctcgcctcaggagtcctactgaatcctgggtctccagtgcctcccaggcccctgtcggtgtgcaaagtcatgctccttcttgtaaagaacagtaggaatgagccccaaaaggagtgcatagaggagctagtttgggtgaaccattaaaataaattttttttaaggccgggtgaggtggctcacacctgtaatcccagcactttgagaggctgaggcagccagatcacttgaggtcaggagtttgaaatgagcctggccaacatggtgaaatgctgtctctactaaaaatacaaaaattagccaggcatggtgacacatgcctgtaatcccagctactccggaggctgaggaaggagaattgcttgaacccgagaggtggaagttgcagtgagctgagattgcgccactgcactccagcctgggcagcaagagtgaaactccatctcaaaaaaaaaaaaaaagaaaaaagaaaaaagaaaaagaaaaagaaaaacatttcttttagaagaaaccggtggtttatgacaagcctatttcaaagctgattgtgttacaggcactgagtaattcactctaatgctagttttccaaaggtttgggttcaggaaaacctcaaacatagtggctaagtacttttcctttcctttccttttaaaaccctgtttattttcagaggcgtttaatccatatgttttagatccatttgcatgttactcagcaaaaggttgttttgcactaacgttgctgagccatgagtgagcctgctcatctctcttccgctccaactggtgcttgcagctgagccccatgctcacggccagacgactctaaagctttatattagacacaaggaaacataagcactagaggcaaaaaaaaaaatcaataatattgaccctatctttatttagaattttgatatttcattcatcatgaaatttttggtgctaattttggtttttaaagtgttgcattgcactattctttatattgattattgagttttttggtggcctcttcagttttgcacccaaggcgagtgcctttcttatctcactctcatcctgtccctggtaaacacccacttccagggcccattctgtttggaaggttagcatcccagttggtgtgggttctgctgtggtctcccaggcagagatcagtaccagagacaaggcagacaagccctttggtgatgctaaaggctcctctgagccctgttgatttgaatttggggtgtggggcttccagagaaagtggagaagacaggaacgtgtgtcctcttcagacttgggatctgacgttgctctcttcccttctcccttacttcccttccttttcggagagggcaggaattgtggtgctccgtagtagaatgttttgcaaattctgctgggctgatgtgtcactagtctgtgactgcttaagaagccacagagttcatcagatttctcaattcagttcctggtagtgagagagaaagcagttggaggattttggctttgggacttccatatgcagagatttcttcttgcttaaatgattttttttttaaataaaaaggcgtggtcatctcagtggtgtctgtttagttggtagctttgaagaggcttggagattcctctgaccacataattgtgggttatgtgtatgcctgaactttccaggtgactgagaaacagctgaaatctgttctacattttaaaatcacagtgtaatgttacaaatggtgacacattaacatatcctggagttttctgagaatgaccatgtagtgaagttcatttttactttaaacatctccatataaaatttatttaaataaaaagctatttttgacatacaaaaagatgatacttccgttgaatcttgtgtaataagcatgaacttgagcttctgctctgttgaggttgtttgaggacatcacccctctgagctcagggggaacgaggggcagagaggcagagtcactatttgaatagagccctgctcatgaagggcccttagtggccattgtgggatacgtggtgcagaagtctgtggtttccctcagtggagatggcttctcatctcagccacgtcccaatacaataaagagtcctttcttcattcagagacaggacccctacttggctcaaaggcagagacttttcatgttctgttttactcccaagggctagcacatagtaggtgctcaaatattttttaaatattcaaatgaatgagtcctgcgtctgaacaccagccccccaagcatgtacatttctcactacatttgatgttcactcttgtgtattctgctctggtatttgaatgagactaaagcctgactaaagtcaatttctcagaggtctgtactcctgtggctttatggttatttccatcagcatcattaatattcagtgcttattgggcaactaaaacattcagactcacgcagacagcattgcatgcatcatcttatttaaacttcctgacaactgtgaacaagacattgtcctgttttgcagatggagaaggtcagtgaagccgcatcacttatgcagctccaggtgggggtcactcggctcaaggtggtggagttggaactcagacctatgtcaccgtgagtccaaaagctcttcataataactaatgttgctcaaatcttgacttttgaaaaaacatgttgaggggaatattagaattcacagtagatcagactcatagaacagtattcatagagttgaattcgttgagagtaattgtaacccgaatgcactcatcattgacccgcccattctttctagatacttgggtttcagagatgactccgttgcatttccctgcaatggaaaagctcacagtttagttgaggagacagacatacattcaactacctacaatccatgctgtaacagaggcataaacaaagcaatatggaagcactacaaagtgatggtaaactactttgctggggaaagagacaaggtaacatggaggaagtgatatttgattgggccttaaagaaaagtacaatttctcccaggccagagaatggagggttaagaaggaaggaatatcttgaactgaatgcagaggattaaaaaaaaaaaaagatatttagagaagaactagaagtttcctgtggctggaaatgagatcataaaggtggggcagggctgtagatccttaaaagctgagtcagggagttcagcttttcacctgagtgaagtgtgtgatcaattggtgggtgttaggtccttgtacctggtggcaggtatctaaggttgggcttgtcttcctccctcccaagggtggtgttcttggtaagaaatgcattccagaatcccacttctcactctagattatcggataatgtcactgctagggctcagtaaatacccttcagcaagaaggataactgcgctgtccgaagtgaattgttggtaccagggtaatagggcccagaaggtgatagagagaagattaaatcagggacatttcaggggtcttgtggttcgagtcgctgccaacatgaggtttcttcccgctgcaagtagaggctccaagcccttgaggaaaattttccgaggctcctaatcccaggcccttgtctcacaatatccctttggaccgatgcatccctgtttgctgtatgcagtctcagggctggggtgaggagggtttatcctgtggcctctgtgctggctttttgtgagctgtgcagatattatgattttttcataattcttcatgaattcttggacacatttctaactgccttgttgactgacctgcagcagaggcggcagagggaaagtgggataaagggacagcatttcaagtgagactcccctttggggaggagggagtagtcaccacgaaggatgcagattcagctcaaatttcctcaaagcttaactggatgagatggatactctgaatgcggtctggtctgccgatgccccctgggtgaccttccgtagtcctcatctcttctctgcactgtagttgtcatcagacatttgggtgattttagcaaaataaacccacccacaaatattcttttagtgccatccctgtatgtggtcttaaagcaaatctgagtatgcccaccaagtagccagaggagagaaagtcacaaaggctgggttcttccattcaacagaaacacattaaattcagatcaccaatatctccaagatggttctaatcagacaaaaagagagaaataatgaagtattccaggaagggcccagttaggttttgttgactgcaaaataaactgttctccatattctttctccaccagtttgcatgctgtctactttatatcttccttgggttgtagaatattagagctggtgtaataaactgggaaagggcataagctttggagcccagcagtcccagttataaatctacctcctgcactggttagctgcttgactttggacaggttacttcacctttctgtgcctcagttgcttatccatcccctaaaataggatgattatatattattctgtgtactatgtgaactaatacacggcaacttcttagagttatgatcttgtacatactaggtatacaaaatagcatgtctcttccaattgtcaatgtagctgattgaattagcagacactgtatgtagagatggccatgctgtgactttgggggaatttacaaactttaaacctttggcaagctatgggcagtagctggtcctagaacaagaatctgaatggccaaggcatgtgctctagtgttcccttgcagagatagagattgtgtctcctcggtgtggtgtctgtcaagctcaacactccatgagatcaggaactagtccatctcagtcaccattgtatctccagaactgagacattcaggcatgaatgttgtcctgagaggagagctacttactagcatttcctgagacctactacttacagtcactttataagtgctttacatatattggtaggacacagaatagagaaaggtagtccaggtcttctgacttctgatgaaaatacagtttaagaagtgtaaaaagcagacttgctagtatctctgtgccctggctcagaatatcacattaagagggtaagcgttggagctgcaggttttgagattgacatgggtggcagcaggttggtgcaatagtgaaatttgaagggcacaaactccttgcctagcttggctgtgtaacctgtccaattatttgctttcattcaggacgtctttcccccttctgctctctgaaactggaagatgttgagaggcacataattaatttgggtgtgttagaccaacgccctcaaagttccttatttacttgtcattatgcataactacacacattatcaacacgaggttaagtcttctgtggtgggtgtttttctcttacccaaagtgaaggggagtggttaccattgaatggtggaactctggttatcacagctgggtttcccacaggtagggttacccacaagatcagaataatttatcactaattacggttttggaaatgaagcttagatgagcccttcctaaagtgcatttcttgggagcatcgcttccttgagctgttactagatattctgaggtcaaacaagtttgagacaaactgggataaacaaagttgacctgttttcattttccaagatcttctcaatggctttgtaaaccagcatgcaccatgtctctcagggagaggtgcatagtgtatagtatctcccagacgtgttggtctagggaattccctttctattttcacagaggactttctgagacttgggtgctgtgggacctatgttggggaaacactgagctaaatattcattagtgggataggatgaaaaacaaacaccacatgaaactgggcatccccgccagaaattcttaataggtgctcattacagttttattaacactagggtcatctttgaacttaagtagaatgcttttgtcaagttgtttttgttatttatgattttatttttaggtcaaagtgttgccaagtgggttcctggttttggggatttgaaaagtgggacaacttgaggtcaaagaccctccagcagtttatctttgcctttctgttgtctgtgatttttatctggtttaaccacaggtgacctagtagtcccatctggcccctagagagggttgtagcttgttccaaatggtcccaaatcagaaatttctccctcacacaaaataacagtgagcttacaaacttgtagtatccatattcatatgactatttttttaaccagaagtttttcctttgcttgtctgactcattcactcatttattccctcatttagcagtttactgaagtcagcttataatattgcagaggctgctaggctctggggatgcagcagtgaccaaaatgagctgagacctgcctgcatggagattacagtctagagcagtgctgtccaggagacatacaatgggtgccacatttggaattctgagttttctagtagccccactaagacaaagtttaaaaagaaacaggtaaaattaattttaataatatactttattttcacctcatacatccaaactattgtcacttcaacaggtagtcactataaaaagtaatgagattgtttacatttttttatactaaatcttcaaaattggtatgtattttctgcttacagcatatctcaattcggacctgccatgtttcccgtgcttaatagccacaggcggctagtggaacagtgtaggtctagggagagagacaaatataaaaaaatagatatgaaaaaatcacgggcgtatgtgattccaaactgtggccagtgatatgaagaaaagttgaaaggtttgaggagaaaaaataggggatctgctacaagtggctggtggaagtagaagtgggagcagggagagaaagcctcttttgggaagcaacataggcagagcctaggaggatagtgagtagaagctagaaagaccaagagtgggggcaaggatgtcctaggtaatgaggatgcaaagaggcctcaagacagagagtgagagaagcccagattggctggggcagggaaagtgaggtgaggagcaaggcaggactgaaggggaggcaggggtgagggggcaggaaggggatcatgcagcatcttttaaaccatgctcaggactgtgaacatcatcctgaaagcaatgggaagacatgaaatttcaagcaggggagttacattgtctgatttttctgttttttttaaagggatccctctggctgctctctgtctgggtaggtgggggtgataggcaatagttagcaaaaataaatgcaggaagatggcaggggatgctatggtgctgggctagggacctggtgatggtgggttggagtggaggcagtggggaaggagaagtgtgggtggatccagctggtgtttaggagatgcaatggacagacaggatggtggattggacatagggtaagggagagggaggtgtccaggagaactcccaggtggtgggatgagcatctaggtggatgttaggaagactagagtgggtttgggctggagattatactccaggacacactgggcacggccaagcaagaaaccttgcatcttttcaacaggagttattcattgctcttgaaaagccaggtgcagtggctcagacctataatcccagtgctttgggaggccaaggtgggaggatttcttgagcccaggagttcaaggccagcctgggcaacacagcaagacccccatctataagaaaaaggaattgccaggtgctgtggctcacatgtatagtcctggctacttgggaggctaaggcaggaggatcatttgagcccaggagtttgaggctgcatggagccatgattgtaccactacactccagcctgggtgacagaggataagagaattttaaatgatatggagttttttgttattatctctgaggaaatgatacaaaattacctctgattcatgttgcaatttattattgcagtaacacacagcttgtaccagaaaatattttcataaagaggtggcttttcccataactttaaactttaaaaatagcatttaataagagcttaccaggattttattttgatttcttttttgtttatttatttagctgtttttgagatgcgggggcgtctcactacgttgcctaggctggtttcaaattcctgggcccaagcgatcctcctgtgtcggcctcccgagcagttgggactacatgtacatgccaccgtgcccagccttagcaagtattttaaagagggctttgaagtagcttctctttgtggattacactcagaactatagagtgcttagcaaatggatggggctgcagtgaaatccactgtcactaatgtgtgctctcagtgggtccatttttcatcctggagagctctgatggagaacttgaaacccaagatgtattcgaaaggagactgccaggaaatgaatgagcagactcagggtattctggatgaaatgctcttattacaagactgttggtgcatgttccatgtcccacttatgtgtgtgataagccaccaatacatttatcagtctgacctgtttaccgaaaaagatatcaaggcttgagagctctgagtcactgccaggtagatcaataaaaccatgagatattgcagttgcttagaccatttattcagcaaacgtttattaatcaaccactctacaccagacatggagaatgcaaaacccagtaacttacgctcctacctttcaatctgggagcgtggggtgggtgactggggtcaggagaacacatgagattaatgcattttatgtccatataaggcaaagagtgggcagaaaagtgggacctcattattcttgggggaattaatctttgacttgaaccttacaaagtatagtaagaatttgtctgttgattagagagggcattttaggcaaagggcaatcagataacctggtacattaaaggagctatgagtggctcagggtggctggggtgtaaggatgaagctggatgtggagagagatgaggctctggcatgaaagatgtccagagaagtcttattaggtaaggttggaaaggttcgtgtgacacttcatggcaccagtttgacgaacctggccagaactgcctacgggaattgtgcacagcaacctgtgattgtcagaaattgagaagtggaggtgattgcagatcattatagatgattataaatagagtacaatgtgtatttgaatataatctgggatcatgatatctttggtgtagacacaacctccatcgctattcgatgccacagggagcacctacagtgtcccggtgctttgccaggcatgagcagtgctggcgtgtggagggtagggagagtgcagggaggacagaggcgtgcagggtccagctgctcctggggtgctcatggtctaaggggatagagagatgtgtacacaagaaaagcagcagtcacactgttcaccaacatccagtccctctttttttctgggcacaagggaggctaatgcattccacactttcgatgttagttgtggtcaagtgtcttgtcttagtcaatgaaatatgaacaaaagttgtgtgtgtcatttctagaagaaacgtacaaaaactaacacacggttctttagctcctctcctctgctgcagtgactggcaatggcctggatggaggggccagcttgggtacttaggtgcccataacagcccagggtcctccacacacccacggtggacctgggaactagatgagaaagaagtcctgcagcttcgggttctttattaccacagcagagtataacccatcctcactaggaagcaatgccaggccgcctccactgtgttttaggccactgtgtagaaaggaaatgctccttcattaattaattcattacacaaacatttgggtctgtgctctaagcactgtgtgaaaccagcctggttctaagacttttggaggaatgagcaataactaggagttggagtggtcaagggaggtattttattactttttaaaaaagaatgtacatggtgcatgtgtatatacatattacacatttttccattatataagccatataaccgtgtatttccttatcacttggaaagtacagaaatgaaaaagaaaaacccataatcctactactgaagatagacactataggaattttgatgaatatttttctagtgttattactgtatattttttacataacgttgatagaattttaccttatacgtaacacatcttaaagtttattcataagcattttcagttttcaaagtcgtctttttaattgctataaaataacatcaaatttttctaaatttttactattaacatttaaaatgaccgttttatatgttttttcccaagttttgctgatttccatagaatgatttctagaagtataagtaaacaagaaaatggcctccaaagatttattcaaattaacagtctcactaattgtgtacaacagtgttatttacactgatatttgatattactataacttaaaaaatcattttaacaggtgaaaattcatagctaataggtttgtatttctttgataactggagaggttgaaagccatcctatgtatttgtttactagttatttttagtttttggaattatgtattcatatcatatacctattgatggggtattcatatttttcttatcagtaggtctgatctcattacatatttgaagttttctctcccattcttccctttcagttattttgaaaaatatgtaaaatattttcatgcagttcaatgtgttgatcatttacatattgatttattttttaatgtacaattctagagtcttctagaggttccgtggattgatttttaagttctttgacctgtctcaaatttacttcagttcatagtgcaagaagaaactctaacacacttttcccttcaatttactaacttgctatcccaggacagcttcatggaacagtctttcctttatccgttgatttgtcctgccagtaaaagcttatttgatccagttaccagtgtggaagatgacaggaatgagataaagctagcacagtgggaattcagccagacatttgatctgaccatctgggcaaacttcacagattccatcttagcagaccaggcctgggtatgtctcaggttttgcagagatgtggtcagcttagggatgttctgcactaaggatttagccaagtgaggattagcccagagtggcacaatgggctgccagccgccttgtgagcacgagatctaggcagtccctgcgcagcactggttaggagaggaaatagatggctcttccctagggcctcgtctgtgtttctctcaatgagttgaggcctgaaagaggccacactgggactcccacttgtggcccaggctagggaaggcctggtctggagagaagtcacaattttgagagtcatatatagtttcttctgcaaaatgagagcttatgaaaggtttattcacaaatagtgtatggaatagaactaccctgcacaatcctgttactgagcatctgcccaaaggaaaagaaatcaatatattagtatcaaagacatacttgcacttatatttttattacagtattattgacaatagcaaagatatggaatcaatctaagtgtccatcaatggatgaatggataaagaaaatgtatatatatgcaatggaatattattcagccacaaaaaataatgaaatcctgtcttttgcagcaacatggtagtataaccagaggtcttcatcttaagtgaaataagccctgacttgatcacaaattttgtaaagaaatttattattttttattttttagagagacaaggtctctctctgccacccaggctggagtgcagtagcatgatcatagctcactgtagcctcgaactcctgggctcaagcaatccttctgcctctcagcctcctgagtagctgggactacaggcacataacaccatgccagctaattttatgtgtgtgtgtgtgtgtgtgtgtgtgtgtgtgtgtgtgtgtagacgggatctcatcatcttgcccaggttagtcttgaactcctggactcaagtgatcctcccatctcaacctccaaaagtgctgggttacaggcatgagtcactgcacctggctggaaatttgttaatagcctatgttgaaggggtagctgaaatcacctcaccatcctctgggtttccagagcacctccattcttatagcccatgtgagtcgtatggtggggtgtggttctatgtcctttctcgccctctgtctgggactgccgagagagcaggtctcatgtcatttatttgtagagtctcagggcctattgcaggatctgacagagtcaatgactgctacctttgcggaatgaatgaataaaatcattaatggctgaatgtggctggcttttccacgtcttcccacagctggggtacttaatattggctgaggcaactacttttaaactgttggtatttctctttaataaaatcttgggaaaaccttgattttcatgtcattttactttgggactttttccaaaatccaggctttatttttcatcaaacacatgtcatgatcatgctcttagggagtctttacaaaccatcatcatgctcttgagggaatcttttgaaaaccttactttagatcagagttagagaagaaattcacattctaatagatttgcagggtaattgatattctcgccatctctgttcatatttgaaatatttcagtactcgatgtaggggcaaaaacattgagtttacaccttctaataactttccaaaaacctgttataaagtaaaactgttgattcagaggtttggggatctctggggatacagctcagccttggggcccagggcctaccgtagctgggctacaccttcctctccagcttcttgtccagctgcttctcccttctgttttagactctagcaacatcctaggattgttatggtcctgttgatgcaatgctgcttcttgccatcttgctgctgtaaatgctgctttctctgctcaatcatctagcaaactaccattcattcttcctgaccctgctgaggcatccccttctctgtgaagagttccctctctccttctccaatgtatcagtaagctattgctgtgtaataaaccacccccaaggcagtggcttgaaacaactgtgtattattgtcctgtgggtcaaccagctggttctgctgatccggacaggcttggctaatctcaactctgttttgtatctatcggcagaacaactggaggctggctggtctaggatggcctcatttatgtgtttggcattggctagctctcaattcagtggatgagggtgactggaccatgcgtctctcatcacccagtagactagcctgggtttgttctcgaggtgactgatgctgttctgtgagagagaaggaaagcatgcatggcctctggaggcctggatctcaaaacccaatggcacaccagcacttctgctgctttcttttggctgaagccaggtcagttcatgttcaaggggaggagatttagactctaccttttaatgggagaagctgcatagttacattgcaaaagacaaggatctgaggggaggagagaaggatgagtggaatggttgattgatttttgtgatcaatccaccacacccacctttgatagaggtacttactctgtagtacaattggccttccatactgtgggttccatacctatagattcaaccaattgcaaactgaaaatatttgaaatatgtttgcatctgcactgaacatgtacagactatttttcttgtccttacaggataataatacgggataacaactattgacaaagcatttacattgtattaggtattataagtaatctagagatgatttaaagtatacaggaggatgtatgtatgttatatgcaaatactacactcttttatattagggacttgagcatctggagagtgtggtatctgagggagttcctggaactaatgtgcagatgccaagggacaactgtactattgtacttggaagtactcatggggtcatattgcattgtttctttgagtcctaattctgccaacatggcctggtgcttgcattaatcagctttctaatctctgagtaacaaggcacagtaacaaggagcagtaacaaggcacagggctggcacctgagagtggaggtacccaggaggcagacaccataaggcgggaaagggacatatgtacagaatcatggctgcatgtcctgaagcctggcttaagccatcaacggctgctgggcaggggccaaagccctgttatccctttcgcccttcctgatggctctgcctctgccttcagctgggcgtgggcaggccccacccaccgaggctccagcccttacccacagtgtcagcaatgcagcctccagaggatgtgctcaggccctgcccacacacccggatgttgacaggggcatgactccagcgccagctctaatggatggtctcatcgcttttaaaataatgaccatggggcgtgggctggcgagagcagtgacatcactttcctgcaattctgggtcagttcctgctgcttttctctgtatgtttgaatgactgaaataaatctattggttggatatatttcctggaagacttctgacatgttcacatgcctatcttggaatgtggtcaggagagcaatggctttggacttagaggtcctgggttcaagattctgctactagcttgctgtatgaacttggactagcaacttaacttctccaggcctgtgttttctcatttgtacaatgatgggaggaatacccttggttttgtaaaggaatggtgaggacgaactgggatctcttgtcagagacactgtcttagtcagtttgggctgctataacaaagttccacagattaggtggcttgttaacagcagaaatatatttctcacagttctggaggctagaagtccaagctcaggatgccagcatggttgggctctggagggctcctaaacaccattattcttcattcacgcttctcagagccctaaggaagagagtgattcctcagctcaattgtgaactgctcctgccactctgtacttcctcgtgtaaagaaaccagactttacatcatgggtgaccactcccgcagagttgtacagaacctcccttggggccacaggatggctggattctgtcccctcatatacaaggaggttattgggacagcatttctccctagaacaagagtgtatatttcagaaagctatggatgacttcccatggtcatcagatcactaggcaggaatgctattctcctgatagatgtgtggaaagtattcaattcaattttgacccaaagttctaggcactggattaagaaatgccaaacccaaaacgtttaactttagaattaaaaaaaaaatgaaaaagaatcttagaagcagcaaaatattataatggaaagttccctggacgggaagacaaggtggtgaagatgacaatgatgatgctgatggccagacaccgtgatgagtatttgcattcattatctcctttagacttcccaacagctccatgcagttggttctagaccatccagattatctagctgagaaaaaaagggtctgagagaggttaagcaacggttctacagacacatagctaatctgtggcgtggaagagatctgctgtctgagctcaagtctgtcttgggctccagacccacaggtctctactttgcctctgactcattttctgttgtgggtaaatggctgtctttggactgcaatgatcccatctggaatataaatcagatggaccctgtattattctgttctcatgctgctaataaagacaaactcgagactggataatttctaaagaaaagagatttaatggactcacagttccacagctggggaggcctcacaatgatggtgaaaggcaaaggagaagcaaaggcacatgttgcatgccagcaggcaagagagcttgtgcaggggaactcccctttataaaaccatcagatcttgcgatacttattcactttcaagagaacagcaccggaaagacctgcccccatgattcagttacctcccaccaggtccctttcacaatgcatcggaattatgagagctacaattgaagatgagatttgggtggggacacaggcaaaccatatcagaccccaagatctcttttcagctctataggctgatccctgtgacttgcatcttgcagaagaaaacaatggcttttcagtgccttttttgtaaataatatggctgcatagtcagagaatatgggagacagtgtctcctttattttgaagacataattgtggtttggtggaaagagctctggactaagagacagaaggcctaggttttacttttagcttcaataccatgtggccatgtgaccggaggaaggttgactcttctgaacttcagttcctctacctgagaaacaagaagcttggactggactggctctaggctcttgtcagctctgacatctgggcaaggatgccaggtgcctcacctactgctccagatgtcccaggagaggtttccatgcaggatttcaacttgctgaaagcacgtgcgtctttcctaatgaatgactgggattccttcacaggtgaaaatctctaaacctctgggaaagtctgtaatgtcacagcaaactcatcttctttgtatgataaaaccgaggtctttcctctggttgatgataaggggagacagagttcttgtcatagtacttgaactaggggacaagcaaaagggccacataggaaaggcttttggttgttgcttaataaaagcaacaataaggttttggaaaggctttaattcatcgctcatgtagaaggtagccgggcctgaatttctagaagatccaaagctgggagcaagtcacatggctgcacggagaactaccatggccaccctggaactgcacgttttcccctttgtgcatttagctagcacgagagggccccaattcctgtatcaacacctatcctcccaccaggtctcacaaccacatgaaagcaggagaggcggatttatgccttaacagcccccaaaacaagctttgtgcactgataaaatcagtggctggcttagagatcacatcagccctggagaaactgcttcatgatttgacaaggctgctaaaggctgtttgcattctgtgagtcaggtccgaagcaaaaggaatacacagaagaagatgattatgagtgttttgaaaacctgccccttcctgcccgcccgggacaatatttacaaagcagacatgcaaacaagcagaccttcttttcaggtttaaattgcctactgagccaggcggttcccgtgctggggtgcttgcccagcactaagttaggtgtttaaaaaacgcatttgccagccagctgcctgccttccctttggtggttaccgtgtggttaggaagctcaggagtagtgttgttcttacctgagtaagatacagactctttttaagggaaaacattcccaaggatgtctactgttgaattaattaactttattattatgttatttaaatatatacaaacataaaactaggtataaattcctcagcttatagttcttacacatctataaatctaaaacaaatttacaaatgatatgcaaacaaaactctaacatgaatcaaatttaaattgcttacataaacttgatatgccaaatctaccaatgttgggcttcacaggaaaaagttttatctctccattttgcatttcacttgttttggtctcagcttatttaattttgtgtataaaggaccattgtttgagtcatcctgtgtcactttttcccactttttaacactgaactcattgggacatgaatttattattttattaagctggttgctttaaaaggaaatctcccaataccttacactaaaagaaatttcaattgctggttaatggaatattctacactctgtatttatgtactggtaatgaataactgaaagctggtgagggcaaagacaaggtatgtaaaatgcgtttgtgagcaaccagaatatcttataacacattttattggggaggctggcatgcccataccaacgtatgtcatgtgatgactcagttcttctaccacttaattctaattactgtgaaaactttcgaggtgcctaggtattgtttgaccttgacttggtccaaggtattcactaatgcagatggcgttgaaattgtgtgcagcacttcattacaagggcttatccagttgatctagaagaaaggcttgtatgacagagcccttgagactatgtccataggagtctttggaccccagttctgaaaaatattctggagagaagctcatggtgagcgctcatagaagaaaaaggtctccttgcaatatgggatgacccaagagaataattttcttccaggaaccaggaaagaggaaatggggatgaatttgtccatttgatcatttattcactaaatatgtgtgaaatcccacctgttttacatacctagcagaggggatggggaaagggtcatggtaaaattaagtataattgctcccctggacagctgattgagagagtttgaaaagctctttgaaattgctttctgaactagattataagctccagaagaaaaataatctctaacctttggagttatgccacactttatgcatagcgttatcctgtttgatcatctgctcactttccagttttcttttcaaatgacctccgtctatttctgggaattaaatcctaagacggataaaaatttgccacttttaagcacagtcttgaggatgtgctgaaggctttaaggtccctagctcctccagagggtgtgttagatgagataatcatctgcatgtctaagttctgctgcgtttaagatagaagagcctcagcttacaacacaaagcaacacaagaaatagtgcatggaagtcaatcggtgatcaatgtcaaatcagtgtcagaaacaaaaagtattatgagtttgggtgagagactaaaattgtgggctgggctttcttaaaacaggtttaaagaaaaggtgggactagacgtaggataggtgagaaataaattgtagacagtagggaaaggggcatttgaggttaaaggaagagtagagacaaagtatctagagaggattttttttttttttttttgagacagggtctcgttctgtcaccaaggctagagtgcagtggcacaatcatagctcactgcagcctcaaattcctgggctcaagtgatcctcctacttcagcctcctaagtagctgggactacaggtgcatgccactatgcctgctaattaatttgtatagaaacagagtttcactatgctgtccaggctggtctcaaaccactggcctcaaatgatcctcctgccttggcctcccaaagtgttgggattacagacatgagccaccacacctggcctgaggagaggatatttgtaagaattagagggaggataagtctggaaagacagattggatccaaattttggaggccttggaggccagaacaagagtgtgcatggtactgtagtcagtgggagccactggatcaactgttgagggacagtaagacatcatagctaaaggctgtcttaaaaacattgagtcatcaaaaggttagcagccagcacagtggccttcatttaaaaccttttctttccatttcaatatttctgtcagtgctctgccattgcattgacatttacaaagatctgtttgtagtaggggtagtttataggttgctgagattgtgtcctggtgttcgtaggcacctgtgtgctctgtagagagcatgtgtcagggagcacctgtgtgctcctggacagggagcacttgtccgcaggctcctgctgacagcgtccacttgatcttccctctctgtgtctcctctctctacccattgcagccccttgccaagcttcattctgaatataatacttaacccaggatttgtgggcagtttataaaactctttgacacttgtgtcactcttagtaaccctttgaagtcaggagactaggctaggtatttttctctttatagatgaagctaaggctcaatagggagaactaagtcatccaagatcaccatggcctgttcagtatccggcatgttaggaatggtgagtggtgcatagacgctgactgacaaggaggcagacctgatgctggggatggcccacctgcagccttccactgctgagaccctcacagctgtaaatggaaggtattacatacagcgcatctgccccccactgcccccacttaggcagctgcattcttgagctgggaatataaactggcatcaaccaccctccatcctaacttcaggtgggcaggcagggttctagcagcacccatagagctgacctatgagattcagagcatctacctgtaccacacctgtgaaaaataacaagccaggatacagtggcatcatcacagatgaataaattatatgaaaaacaacaaacaaaacttaggcccatgaaaatgttatggaacagaaaagaaggaaataactatagcatggaaaggtagagaaaaaaacaacagaaaaaattgctataggaaatagaagtagtttgggtagcatctgctttgaacactccacaataaaaaaaaaatcaattctatgaaataagagataacaggttcaagcgaaataacatatggggaagccaaaaaaaaaaaaatacctgtaaagaagccaacaatgggctaggatggtttaaagcagaaacagaaaaaattagaaagtagaactgactttgctaaaaattgtcagtgatttaattgatcaacaccatatgctgtcccagaattgcagagaaatagaaagaaatgccagtgattggggacaagatgataaatatgaatgctcgaggatgaagaaacaagagtaagttattgatttttcttacattacctacttgtggtcagatgtggggatttgcacagtttcatataatgtccgtgaaaatatcaattatattgaaagatttaaaaatgggtactatattaaagccagcaatttcacttctgacacctgatgttaaagactttatcagggaagagcacaggaatgcctctacaataatttttattatagtgatgtttataatagtgaataattggaaacctcccaaatgcccagctgtaggggaaaggttgagtcaattattgtgtctccatataatgtaatcatacgtagctatttaaaatcttgcaaaagaatgtttatttatatgggaaaatgttcatattgtgaagtcagcatttgaatctatctgagacggagtgctgctattaaatatttcttcaatcaactagaagaaaatataacaattcagtttctataaagtgtgaatttccttttatggaattgttctggatgaaactgataggttaatttcatggtactacataacaaattgccatacttaaaacaacaccaagttgttagttcacagtcctgtggataggaagcatggtgcagagtgacagggttctctacccatggtgtcaccaggctgaaatcaaggtgttggccaggcttaggtcttgtctagaggctatgggggaaaatccgcttctgggccctttcttgtagtttgctgaattcatttccttaagctggtaggactgaagtccatttccatgtttgttgttagctgggggctgctgtaagcacactgaggccagctgtacttcttgccatgtgttcccctctgtcttcaagccaacaattgtgcagcaaatattgtttgtgctttgagtatctaggttctctttctgcaaccagccagagactactttcttcttttaaagggcccatgtgattaaatcagactcacctgaataatatccgtatcttaaagtcaactgatttgggactttaattacatcttcaaaatctctgtactgcagtacctacattagtgtttgattgggtaactgtgagcaaggtatgtgtgtataccaggttctgggaatcttggtggggggatcttaaaattctgcctgccacacaattgatacattgatttttttcttaactaataatatggatgtgcaatatcgtgacattattgagaccaggcttcataagatttcataaagtcttatgaagcagaaaaagtcttacaaatatagcctacaactatgtttcccttttgatttgagtaagatttgattgagtaagatttagactctcctgaaggacaactttccattttcttttttgagtcacctgtgtttttttgtttgtttgtttgtttttgagacggagtctcactctgtcacccaggctggagtgcagtggcgcaatctcagctcactgcaagctccgccttccggattcatgccattctcttgccttagcctcccgagtagctgggactacaggcgccctccactgcggccagctaattttttgtatttttagtagagatgggctttcaccgtggtcttgatctcctgaccttgtgatccgccctcctcggcctcccaaagtgctgggattacaggcgtgagccaccatgcccggcctacctgtgttctttaaacttgtacttaaaatggctcactgacttggctccttgagaacttgtctgctccttgtctattcacctatccacccactagtctctccatctaccaaatcacccacagtatatctatccatgttatccattcaaccatccatccatccatccatccatccatccatccatccatccaaccagccactctcacattcagccatccatgtcctcttccaaccatctggctgtccatccagcaataaaattaccatttccccatccattcgcctactcaaccttctgtccattcatttgcctgtctatttaccaacctacccatcacgcagacatcatgcttctcattgatttaataaactactttgaactctaactacatgctgggccttgtagtagacaccaggatactaggataaagcctcttcccccaacctacttacagtctagtggagaaatgagacaaaaaactaaatagaattcaacatgaaaattcctataatagaagaatgtcaggtggtttaggagcccaaagtcgggtaggaaatctggaaatggtgaaaaaaggtatataaactggcccttggaggatgacagttgtccattgctgaatgaaatcctgcaagtttttactgcatccatcatggagcctggagattgcaagtgttctcaatctctatgagggtgacatttttccagtgtgactgatgtactgtagaaattacagagcacagtcctggagggctggatcaatggcattgattttgctctcttctggacatggtcaagtgataatgacagggaagattgagacatgccagaggcaaccttcccaaactgacagtgatgaatgtcccattttaaaccacagttcctgtgagcctgatttattttatttatttattttgagacagagtctcactctcttacccaggctgaagtgcagtggcatgatctcagctcattgcaacttctgcctcccggagtcaaacgatcctcctgtctcagcctcctgagtagctgaggccacaggtgcttgccactaggcccgcctaatgttttctatgtcttcgtagagatggggtttcaccatgttgcccaggctggtcttgaactcgtgagctcaagaaatctgcctgcctcagcctcccaaactgttgggattacaggcgtgagctaccacacccagcccataagcctgatttaaacctagtccacaaacacctggctttctctggcataatttgacagttgctttgagtgccagagaatttacgtcattgtgcctgggagctcacactcagcatggtttttgctttgactccacgtcccggtttgttgttgtttttagggaggggctttctctgtatgttgcccaggctggagggcagtggctattcacaggcaccagcatcgtagcacactacagggctgaactcctgggctcaagcaaacctcctgtctcagcctctcaagtagctgggattacaggcgcatgacaccgggctggcttgatgtcctgttttaacccgagttgtttgtagccagctttggcaaacctctcatgagcatattctgcaatgttataattacctgggtggtggcctgcatctggggatcacttaaatgctttcatcttcatgtccatctaaggataatttcaatgagaagcttctaggtcatttccatagactcctcttcccctcttgtttgtattacaaacttgtgtaaaagaagaggattttggagagagagacttggattcaaatcctagctccaccgttagtcatttgcatggccttgtatacccttgctaagcctcagatctctcacctgtataatgggcccaatagtacctgcttgtgggcctattgtgaggatttttgtcaagcgtagtaacacactcaggaaatgggagctgcttttgtggttgctgttactgcagtgattcccagggacatttgatattttaaattacattggaagaattctcatatttttttcacaggcagaattggctcatggatcagactaaccagatttatagttaaacatgtttataaaaaacatgaagtcatgtttttttaaatgcagcaggaaagcaaatcattaggtctaatttgttaggctgagaaaacactggaatgaaagtgctgttaacaaacacttagcgtaggctgggcaataatcacatgtactttagcttgaaaggtttgtgtgccctgttggaagggtttgggtcagaggcctatgatggcttcattgaaaatgcagagttggacatagccatccctacaccagcatcgtgctgaaattaagggggatagacttcaaaagaaattttgtgttttacatcattgccatgttttccctttacaatgcatgattaattttaatttttctaatgcatttgtttttgtcaataaaggcagaagatgaggaatgaaaacaagagctaatagtaactatcccacttgacccaatgcttctgtgaccagaagctggtcacttctgggttgataaaatgggagcaataatagcacctccttcaaaaggttgtagtgagggttaaatgagttcatgcagatgtacttagaacagtggttgggacatagtcagtgttcagcaagtgttagctgccatcctcctcctcgttatcatttgtaataggagcagcagtacggatttttttttttttttttttgacggagtctcactctgtcacccaggttggagtgcagtggcatgatctcagctcactgcaacccctgtctcctgggttcaagcgattctcctgcctcagcctcccaagtagctgggattacaggtgctgccacacccagctgatttttgtatttttagtagagacaaggtttcactatgttggccaggctggtctcgaattcctgtcctcaggtgatccacctgcgttggcctcccaaaatgctgggattacaggtgtgagccaccacacccggccggagcagcagtactgtcttaagagtaggaacctgaagcactctaaaggtgaaataatttcctcaaggtccaatggcaagtggaacagtccaaatttgaattcggacagatgatttcagagccagcagtctgaattatgcttttcaaaatgattttgatgttgtacaagtaagacttaatatttatatcaattactgctatctttctaaaaggcaaatttgatcatttttctctcacttaaaatccactagcccctgggcttctcaagggtggaagagatgtttcattcactgaagtagttctaatacctggctccatacctgtagcagcaaaggtttattgatcaaagctgagacaccctctcccatccataaaaggataaagtccaaactctttggctttttttttttttttttttttttttgagacagagtctccctctgttgcccaggctggagtgcagtggtgcaatcagctcactgcaagctccacctctcgggttcacgccattctcctgcctcagcctccccagtagctgggactacaggtgcccgccaccacgcctggctaatttttttgtatttttagtagagacggggtttcaccacgttagccaggatggtctcgatctcctgacctcgtgatccacccgccttggcctcccaaagtgctaggattacaggtgtgagccactgagcccggcctaaactctttggcttgacaccagagcaacccacggcttggccaccatctccagctcagcctggtacccagcagttctctctctgctccagctagggcagcacattggtcattgctttctttggcttgaaagatcctcttcaaggttcacatgtcgctgacaatctcctactcttccttcaagacccagctcaatgtcacccactcttagaattcttctcctgcatcttccctattccccaaacctcagggcagaacctgtgggtgccttggaagattgctcactgagggtcttcagttggacctcaaaggataggtaggctttgggcctgtgaagaagggaaaggtaccttagccagagtaacagcatgggcaacacacagacctggagaatgaatggctatgagagagatttcactaattcctccaaatcattattttctccagtgtgagttgtattatttcctcctccccatgcagacttaaattctaggggtgtgctttctttttctctccttttttaagagatgggagtctcactttcttggccagctggtctcgaactcctgccctcagtgatcctcccctcttggcctcccaaagtgctgggattatagacatgagccactgggccagcccaacggttgcactttcaatacaggtggagagtgtccctactgcttttcctgatccctgagagggtctttcaaaggagatcacagtagcaattcacttctttggaaaaaccggtccaagtaaggaaaacctgccatatataccctgcatgtaagacagagtagagaagccactggccaggatgctgggagaacggcattcttatcctaactccgtcactcactaactttcagactagaggcaaatgcctcagcctctctgagattaggtttcttcatctgtaaaatgggtatcctgtggcctgcctggcccaattcccagtgctgtggtgaagaccagatgagcaacgctctgtccctatctagctttgagacattgggaaaggcatttaattactataccttgaattctttggtcatgaaaacgaggccaagaatactttccagattgtttggctatgaggattagatgaagtaacatatggaaaatgcacagtacaatgcctggtatatagtagatattcaatggatattcttttcttttttccttccttccttcctctctcccttcctacctcccttctttctttccttcttctttccttcctttcctccttccttccctccctcattccttctcctttgtttcttagttataaaaataaggagttagaataaatatcctctcattaaatagtctaactctgtgccttttaaaaaaaattaaagatcatgttttattaatgagatattatttggaaagccaaagaaatatattttccaagtaggagggagaagatccagcttttttctgccctgggagctccagaagtttaaggcgaaatgataaacatgtcagaatgacttctttatttctatttataatctttgccatacagctcggtggatggtgaggtgctttttccagcatagaaactttccttggccgaggaaaggcaagaataaatacttttcctgggatgagtccattaccggtgccctctttccaatattcctccagattgaaatttatgcttaaaaatccaaatgagttaggagagactgtgactttctaaagcaaactcttttgcaatgctattttactgtgaaaagtcagcgctatttttcttttttaagttgtgatggctgcatgtggatttcagggcaaagtgggtatatggtaaccctgaggaattgtctctgatcaagaccacaggagaaactttcccatctcagcagggcctcttaagccctaaatgcttcccttctctgcatcaccactcagtggtggctgaggcaggctaggctagctaccactcacagttttccagggagtggaaagctctgaaatcaaagaaatgggtccttgagggaggcaggaaagttgtctgtctggatgtttcctcggacctctgtctgcttcctactccagggcctcctgcaggcaggtgtttatgctgatcattaggatcttatcacctctcctctccttgcctcatttctgcaccacctgggccagtccgcccacaaataagccacacctcctggcccaggtcaagctacttgtcctctgggaagccctccctgattactccagatatcagaattttctttcctggaatctttaaaagattgaatcatctccactgaatgatctcctccaacactctaacctgaccctgtcagctggattgaaactcttctcgtatatgtttgcatgaggaagggtggggatgggtctcaggacgggcactgggagagaagatagaggtcaaacgagggtgagaggacattgtgtccttgtacctgcacagctccaagcccagtaatgagcacaaaccaggtgagcaatgaatacttgtgattaggagcctacagtgcaccgttactctaggagagtaactgcaaacaaagcggcagacggggttctcgctcctcaggcttcagcccagagatcttatttatatgcctgaacagagtaaaggtaagtctattattatatttttatgtttgtaatatatactctgcctacttccagaaaagaatggagttggctgacagtaaacagtttataacaaggctatttatatagaaatagaaacggaaagccatggtgaaggaggaaggagctaaaatgacgataccttggctgatgtaattattatgattatacacagcgtggagctggggatgcggaaggctgtgggacaggctgccctggaacatgtagtgtctgtcatttgaaggagaagtgaggagaaagttgctcaaataattggatattgcttataggagaataggatttgcataaatgatgtgtgagtaggctgggcatagtggctcacacctgtagtcccagcactacactactgagaggacgaggtgggtgaatagcttgagctcaggagttcaagaccagtctgagcaacacggcaaaaccccatctctacaaaaacaacaacaacaaaaattagccagccatggtggtgtgtgcctgtagtcccagctactcaggaggctgaggtgggaggatcacttgagtccgggaggtagaggttgtggtgagcggtgattgcatcactgcactccagcctgagtgacagagtgggaccctgtctcaaaataataataataataataataataataataataataatatgtaagtagaagcagagaggattatgggaacatttgggggtatgtggctgtgaggatcctgacaactgctgcaaagatgagcgagaactgcaatttaggaggctgcggtggcaaattgtggctttattcttggatgattgtgtttggtgcttctgggtcaattttcagacaatatttaatttttcagtgagatctatgacttgcttaaatgcaccacttcttgtaaaaattatatgatcagagcatatacatttccattttggcaataggtgttggtcagttaatgtaaaaggtttcagtgtttcttaattatttaacctctctgggcattcgtcatcttatttgtatgatgtagataatagcatttttcctattttacgtggttgttgagaggatccgatggaatgactagctgaaagtgtttgtaaaagtcaggataagtaaagcaatgctgcaggaacaaacaatccccaaatttcagcagcttactacaaaaaaatatgtatttctcactcatgttcatgtccaatgtgtgttagcaaggagatactgtctctcacagtcatgcaagaccccttgctggggaagctgcacctccatatatgcttctaccatcaccagggcagaggagagggagcatggtggatcatacactggctcttaagacttcacttgtgtgacatatgtcacttctactcatgtatcatcggccaaaccaagtcacatggccatagtctcacttgaaaaggggcaggagaagtgcaaacttatcatgggcccaaaggagaagagaatcagagtatttctgaacagttttaattttggcacagacttgaaagtacttagaattagctccaaaaatatatgaatattttcattctccaagcagctgtatttgtatcacaacggaagtcctgaactctaagctgcagggagcattactgatgtcagaatagctcatcaatttcaacaggtcaactccacgatgtagcagtggtccaaactgaagccagtgcaccacttactagctactgcagacagactggagaagtctcacctcgtgccaactcccactgattgttggtggcttctgggagatttgtgtaaaggattggttctggggcttgtagagaaagagttgtaattgattaataatgtctaacatgggaacaagaagtggggagtggaagccattgccaggcttttgtcaaccttaatcaatcgcatcgctcagagggcttcacagtagctgttgaaaggatttgcctacagagatccatcctggggagtggcttccaaactcctctcttcccagcgtgcattacagggccagtccacagcttacaaaggaccaggttatctctgcattgtcccaggttcagcccagcctgggcatcttcagtcttctttggctgtaccaggtaacacatctttctagagaccctgagagaatgccattttctgagtttccacaggctagccagaaaggctgttaaataactcacccagctagttctttccaaaaatacccagtcctatttttaaaatggaggattatataattcttcaactggcctcactcatttccctttttgcatagatgccatgcctgtcagagtgtggttaggagctcaggaagccatggagaggcacaggatttgaaatctgcagtctcatgagacaggaagttgattccactcatggcagggttgggtcctgtctagtggatggtcactcttagggatggttccagatgtcttgctgggttcggcttgcttatgtttgctttaatcaggatgccagtggtgtggttcagaagttgcttttcatctgggatctttgtcatatccattaatgtcttgatcatgacaggatgtgacctggaatgggaacattggtacaattcctcaaatttatgttcaccaagaccaatgacagcacaccctgagtattccccctttaccctctacagcattcataaacagaaattggggactttaatcattttaaatgatgggctagattgctttcagcctattttgttttaaggaggaaagaaaggatcttctcttagagaaagaggaagggaatgggggaacatttattaagcacctactttaggcccatgccaggtatttcttatacattatgacattgatcctcatgaatatccttgagctatgggtctcaataaccctattttgtggatggaggaaactgaggctcagttaagttggttgacttggtcacttggtcacaataggacagagtcaggattcaaaggcaagtctgtctgaaaccccttgacttctgcagtcaaccagagaattgaattgtagacatctcaaagtggccagcatgacaagggtgggacagtgaagctcaaccagcctttctcttgcccatgttaatctttgattctcggctaaggtcacagctcctgctctggactgttccagaattccgtggggctgtgcaaaaacatgccacctcttctgtctccctctctctctgagttggatgtttcttttccctgactgattttcctctatttaatctggaattctccagggcagtggtattccatggtagtgctgctacccagactggtcagaggaaagtgggcagcctgttccttataaataccgtgagtcacatgtcttcccaactgccaaaaatattcaagcagagcccagtattcctttggcctgcataaatttctgaggactggtagcatagtgtatcctttatattcatagatgcgtatgctctcctggggtcttcttagcttaggaacctggtttttgatgggtcaaggttttttccttgattcatccaacctgaaccacagtcaggatcatcagttacaaggagtagcagtggatcacagcataggatgtggattcaggagggctggcttggctgctgactagccaagtgaccctgaactactccctcaactttctgattctcagtttctgagtctgtaaaagggggtaataatagttattaagggcacaggccatagaagctgatagatctggatttaattcccgaggacagtgagaactaggtaactgtagttaagtccctcaaccttttcaaacctcagttttctcacctattatagaaaagaaattataataatacttaacccgctgggacgctgtacacagtaaatgaatgtaaacatgggaatacttaggacaatttctggtatttaataaatgttaaatatgttttgaatattactgttttatgttattattaactagtttacaaggggaggatcaagtaaactaaaaatgtgaaagtgtctgatacagagtttggaacccaaaagatgcttcaaaatagtgaaatttgcacttcatcataaagatgtgaaacctttgagaaggcagtagttggaaaggaactgttcaaacaactggctctgtgctggttgctcagaatttagagatgagcttcactcatctgctggccccttggagcacataatctcacggggaaatagctgctggcaggatggcattgtgaggatgcagacaactcagaggaatgagggagcagggagcatgggagactcattatttcctggcttattgcattcaggaaccttaatttctgttttattcctggtggtttgatctaccagtgctgtcagtgaccagaaagagaagcagaggtcaagttataaaagttcatgttaggaagttatgacccatatatagccaacagctgtggaaagcgtttaggcaggagaaaggatgagtacaggtgctttctaggaagatagttctggcaactacgtggattgggtagaagcaggtagataaaagcagggagatcggcagggaggctttttccatcaaccaggtgaaaataatagggtccgaaaatagaagagcatattcaagaggcctgtgagagatgagtagacaggttcatccaagaagacaggctgaagggttgccactcaatcagggtgtgagaggggacagtgtgagggagagggaatgaggtctttgggggagaaaagacctttgtgtatcccttacatctctttctctccattggaacttcttctaatgggctacttagaggtgcccatgggccatggaacaaattggggctgaaaggagaaggaggactgcctgaaggcacagctctgtgtggcagatccctgaaagggactctcaggacagtctccccttgggattagaaaggtatgcatgtcaggagctcttggaagcacttgaactttctagaggccgccatgttggaaggctgttgtttgccattgggcacctgaagagtgacacagctggttttcttttcctcctggttgctgcaccttgagactgtggtgctatgattggatcagttcatcctcaagtggagaataactggaagtgtgccaatgtgtcccagtgttacctgggatctgacagcccctgaagccattgtacatccaactggcttcgacagaagctcccagtcaagactgaaactttgatgcttcttgtgcacagcttcctggctcccccagatgtgtttcccatcagtcccagtgccgagcccagagcctggttttctgcaggcactcagagcatggctgttgactgaatgcatgagcctccctgttgcctgccgctggggctaccacctcagagaccttgcaggaagtgagggtgattgatgtttgtaatgacctcatggtgttttgacagtcttctcatatgtgcagtcacagctctgtccctttccaacccaaatccagcctgtgccaggcatcaggtctctgaaacgagggccaggttccccttggtgtggattcatgagcctccctttaagctgtcactgtccggttcttatgcaggctctgttttcacaagacccagtctttctccttgattttccacatgaaggacagaaaagattgtgaataagctcagagcagaaagctctgatctgacattagcagtgtcaataccacattgaaaacagtggcttgcccagtgatggtgaacactctaaggtggctcggttttcgtaggaccaagcacagctgcttggctaacgatttggttttatttcctcctctcatgttgtttgtggcatcaaatgaggatatttccactttgagagtgtccctctccccaacgtggtgccatttggtttatatgccttgattgacttccatctgctgccacacaggacacctcctcactcttgagcttttcaaacagatggtcagaaatgagagccaaatttgagaaacagtcaaacgaagtgagaacatggggctgggagtccaggggccagaatccaggcttggatgagctactgactgattgtgtggtcctgaaaaattgctgaatgtttctgggcatccgctattttgcatattaaaataacaataacaacaacaacaacaacccgcaatcctttcttacgctaagatttaaatgggagagaacagggtttcaggaagggaaatggagaaacggtttgtttgaatttcttgtttaaatgagagtatgcctctgtttacacccctggggagtctcggcctgtgtggtttttacagatatttgtatgtgttaattccccttgagctaaacacaagtcgttccgttgatggcaactagcttcagacacagttggagtccccagagggttggccaggagcaaagtgtgtacccacgtgaggcctttggagatgatgccgtcagtgagaggaatctgccctggcattccagggccagaattagttggggcatggatggagacttgggatcctgttgtcaaccacagaggtctcctgatgtggctctgcagggacttttcagtcttagctcagctttccaacaggtccaccttctcccctagaccctggggacccagtccctttccccttctgtaatcctcaaaccacccacgccatcacttggggtctcctgtcctgagactagatatgaggaggccccattttcccaactcaaccctgatggtgggttccagctacaccaggtatgggtaaatcttaacagttttactaatttttaagatagggagaggtgataagaatgttctgtgagttgtatatttggactgaggtcaaaatgaaggcacttccagaaggtgaaatgatgaatacaagaaaaaagacgatggacctttctttcacatttacaatatgcccaacagaaggccaggtgtgggaattctctcatccacctgtaaactatccctgtctcacagatggggaaactgagcacacctgttaagtggtaaagctgggatttaacccccaatgtgcagactctaagaccccagcacagcatcaagaaggggcctggtcaatgcacccctgaatttggcatgtctgaagcactgaactctccctgctgttggggctataagtcttttctttagcctgggacagcaattaggctttgtcttgcttatcagcgcaagtgagaaagaccgtgaaggcacactggggggccctggggacgggtgttgtgtttgatgagtgacatctgcctggagtttgaaaaggggaagtgagggatgtttgctttatatttcatggctgtgctataagattcgaggcagtccagtccacagctgcagctcccccaccctcacctgctggtgcttacccactagtgccacctgctcttgagggtggcatagggtcttttcttgtttgggcctcagattctcatcttttgggcttctgggtgaaactgtcaccagggcagtcccctctgtcacagtctcagctggcatccctgaagagttctgcttgttgctcctgtcctctcctcttaagacccaagaggacagtctccagcatcctctgctccagacccgcagcctcttgccccatgagcacttggagccatccatgtccccagccactacacctcaattcaacacatttggatattctggcctctatttggaggggagggggcaggaggtgtgcacattattctgacatcagcagcctggcccaacagggtggccggttctttaatattgtcttgattcactaattacattttataagtagttggaaagatggttactaaataggaaaggctcattgtctcttgtctttgattcttcccacctctttgaactaggtagggtgggtgcttatgtttctggttcccacatagtaagcagactagttgggacagactcaataggcccacttttctccagctcagaaagtgatctcgcagggcctgtggcagaagcagtgttttcctatgtttgggctcagcttttatcatcagattgggatatatgaagttctggaatattcttgagctgtgaactgtgagcttgagtaaaatagatcctttgatctccatttgggtctgcatgtattccccaccagctaaagagggaggaaggaggtgtcatcagcaccccagcctgctcacatcttacctatgggctgtcataacaaacttgtgatgtaggtttgagaggtcttgatatcaccatttataggtgaagacaataactaagagttaactgtgtaccggatgggcattgtaccactatgaagtgtgtgtgtgtgtgtgtgcatgtgtgcgtaaaacttcatttaataactcacaacaaacctatggtagcattaccttcaatttataaatgaggaaactgaggctcagcaaggttaaatgatgtgtcaagaaaaacacatagtagtgaatagctgaaccaggaaaaaaatgtacaattcctaacttcaaggcccaagccctttcccccaccctcggtgaagcaggcattattttctcctcttattcttgtaaatgttaataagaatttccaggacagggctgggctagaaagtcctctgtctgacctgctatttaaaccactccaaatgctgagcattggccaagccacagcatgcatggccatggttcaaacaagtaagcaaagccattgcgccttctcattagcattgggaggagaacaaaagtgagagaggcaaagtgtccatcagcgatttcactttgaagccaaggccctggatttgcatctggccagatctctcagatatcattcagggcacagaatgggtggcaagatgcaggatgacccctcgggctttaagaatgctcccctttccccaactaagatctgcagatagctctcctgtgctgttgctccgactgtcctctgaccatcacagactgcccgagggcacatttgtctgttattgcccaggcaacagaaacatctgagataaagaaaagattgtgggcacctggccttctctgtttgtatgacatacagactcaccttttagactctcccacctacaattgtacaaattgttacttaggaacttcaccatctgcacgtctttcttctgtgcaactccatccaatcattttcattcatttagtgttaaccatctccttctgcatgctaggctgctttatgcatggtagggaattaaaaatatatgtgatcctactctcaaagatcttatattttagatagtgtattttctccggatgctacaaatactgcattatttacaaaactcatttgctgtcaagttaccagtctgggcatttttgttgtctgtttgggtttattctgcatgcagctcttttctctcatttcccctgccgccttcctggtgcatagtaacctttagtggccttggcttctatgaggcttctacatcttgccttagggtaagcaaagggctactttagaataagctggtcagtaccaagaatatcacttaacactttttggtgctgtcttttgtggtcatagcaagggttttcctggattttcagtgtacaaaccaagttataggtttatgcagcaactcatgatcagagcgagtcttgcagagaactaagacctgaacttgagctatagtctcttggcttttaaattatgcaggcctcaaattgcagagcctccacctttcgctgttataattagggtataataagtattatataatcatatgtgccagacttggggcagaggccacagtcataggcaaaatttggcccacagaagtcatgcatttggccttccagggatggatgcctttaactgtggcattcatgcttcagtgtgccctccagttggccacagtccctactgctccttattgcctctcacccagcctctcccttcatttcttagctacctgttccctgatgggtttgagttttcaccttctgtttagcataacatcctcatttaatcctcttaataactcaaaaacattttatgggtgaggaaactgaggcccatttagaggttgtgttacttgtcccaagtcctacaataagaagcaggactgaggatgggtttactctttctaaggtcatagttcctgccctttcactccatggtgctgcttccaacctgcttctttatccattagacaaatcactaccatgcacagcagtgggccaggtctcacctggggataggtgacgtgtccccagtgatgattttgttccaccatttgaagcacatgattaactcagttctttttacctgatatgagaaagggagagaaagagagaaaataccactctgtccctaaggtggtcaccatgggagtgagtagtgggagaagggaaactggcttataaagagatactgcagtatagcctgatagttttcagtccaaagtcaacgacctgcacagcatgttaaacttcctgaagtgggcggatcacctgaggtcaggagtttgagaccagcctggccaacatggtgaaaccctgtctctactaaaaatacaaaaattagctgggcatggtggtatgtccctgtaatccctgctacttgggaagctgaggcaggagaaactcttgaacccgggaggtggaggttgcagtgagccgagatcacaccactgtactccagcctgggagacagagcgagactctttttcaaaaacaaacaacaacaacaaaaaacttcccccaggaaaatccattgcaaaccaccaaacagattatattaggaaacatattcctttgctactgagaattaggaaaggatgcatctacatacctgagacttggagaaattttgacaaaattatcatggagaggagactagagtgaaaaatctcctccctccatctccctcaaaactgtggaattcccaagctggcaaaattaatttactgtcagtttatcagtttggcattcctgtagcaaatctaaattatccccatctccccttccccatctctgaaagatttgaaacagtctcataccacctctgtcagaatcctaagtagatagatccagttgaaatatttgaatgtgaggcatgaaggaaaaaagtcattatcaaagggttaaaaaaaggatttcatgtgaagaaaagtgctttggttttccccaagacttcttaagaatgcaggccgggtgtggtggctcacgcctataatcctagcactttgggaggccgaggcaggcagatcacctgaggtcaggggttcgagaccagcctagctaacatggtgaaacctcgtctctactaaaaatacagaaaattagcccggtgtggtggtggatgcctgtaatcccagttactcgggaggctcagccaggactatcacttgaacccagaaggtggaggctgcagtgagctgagattgtgccactgcactccagcctgggtgaaagagtgagactctgtctcaaaagaaaaaaaaaaaatgccgaatgccacgcagcagtcccagaatccagaggtgaaaagtctggtccaaacatcccattgtccaaaataataaggcaatacacaatttgaatcatttgatcatagagcttgatttgaaagacatattttgaatactagaagggttgttcattccttagaataaacctatggctaatcatttgtaaagtgaatattcttatataatgaattttttctggtgatgtaaatatatacttcctagcctatttatgaatttcacacatggagttttctaaaagcagggcgtagtggaattgaatcttctaagaaaaatagcaggcactttgagatgacaggaactggttttcttcctcttgtttttctcagtctgtgttgtaggtgctgtaattaaaaaccaggctttggaacaggtctccactggagtggtcttgagtagacttacaaatggctgcaatgcttccaatggcagttgatctgtgtgagccaggagtggggtagaaatctggggactggaatttcagtctgagttcaggattgctcatctgcaactggcaacaatggcctcttcctcttttccctgcacagaaagtggtctgtgaaattaaagtggagaacagctgctaggagctcatgctggggacccacagtggaggccacattttgtgatcccagagggattcccaaacccacctgacagctgctccaggccttctctgttctcctgatccctgccctgatggaggcctgacccatctggccagagtgccttcaactcccaccttgaaatacctgtcaccgcccacatccctggccttcctcaggacttagaggttgaggggcttgtctttcccgcttgggcccttccctcccactccttccgtcttctgggttcctgatacctgagcaccctcatacgattcctgatcctcattcagctgctgctgttgctcagctgatgcctttgggaatgagatgcctgcctctgccacccttagctccctgtcacacggttcctcattagctcctgctgtctcacttccacctttgtggttccacagagcctctccttttaaaagctacccacatttttcatccttctggaccgccctgccatgttgggcaccccttagatcagttctcaaaccatattccacggaaccctaggatttacacaaaggtttctctggagttttgaggaaaggaggtaataagctggtcttcaccctatttcagccagtgcaactgctcttatcaattaactactgggatgttatgaggagtttcttagaacagagatttgctgcacaggctctgggcctaatgtagatgcacctagaaggcctgctctggggctgtgcacatcagaggcaggaatttctgcaggttgaccaaatacctttaaggagtattgggtttttatggggagtataggaaggctggtaaaccaacgcttcctttatgcaatttccccaaatcttactgtgcaaatctcttctcacaaatctccaggcagttatcttgggactgatgcttcttgacctagtaccatagaagggaggtagcgggtgtgtgtgtgtgtgtgtgtgtgtgtgtgtgtgtgtgcgcgcatgtccttccaataagcaaccaggccactgctccagaggttctgaccactcctaacccagtttttatgttataaggggatctgggaccgctctacacaaatgactccttgtctcacaattcctcatgggccaagtttcctggtccaggctgatggctggtcacttttacatccgcccataaacttcctttgttcaaccctcctattggtcattggctcagcattttgtaatttactttttttcatatttatctgttagcaacaagacacagttcaacttcctgcagtcattactgtaattagcataaagcagcagcccctgactgtgagcatgattcctgtagtagcctgtatccacagttctttgtctcttacagtgtcagactgagcccaggatggagtaagagccaggactggcatgccctggaagtgcccttctggttctaggactgtgatttctctgagctgtctgtctgcccacgactaaggatggccccagagccctggagctcaatgggatcaaccttcctatcccctccctcctgcctcgagggtactttgagcaggaaaggggcaccttggagttgccgggggatgaacgtctttgtgtttttgttttttttaaggtgactccctgcattttatttctttcatcttgtgagctctttggaagtctttgtgttaactggaaataaaattatctttatttttaagctatgtttttagcttatctaatcatgaccccatgggctgagtaatgttactagatagcaaggtgtggaggatgcagatgacctggttcaagctgtggttctgctacctgcttgttgtatgactaggcacatctgttaacttctctgaggctcagtttccatacctgtaaaatgggggcaataatatctgcttgtatccattaagtcattcaacatgtactgaatgttttatgtgtattttgcctatattaatcatgtactgggtccagcactgaccccctggagttcacatgtaggcagaagtaaatcaagaggcagttaccgtgctgggagattatgtactgttagttttgagaaccttggtctagccttccaacctaccttccaacctggaaatttgggaggtgtgggaaacgggtgacctcaggagactgataggactccgcgtgtttgagaaagaactggcttttggtctaggtaggaggtagagagcactttccgtgaaggtgttgaggtttaggcaaggttgtgaattatagaacaggagctctggaaggtatcgtgggagaggctcagagaaagcatgggtggctgggggattgggggaggatagagagagcctgtgaggatgtctttctggcagtgtctaaggtcacgtgacaagcagagctcgatgggctcagtgggccacggcacttcccaagccgctgattccagtttcacagtgggcacaggagtgcagattagggctaagttggggggacaggatgcacagcgtgttggctcaggatctctgggaggtggcacctgtgacctgggctaatcatgctactttcagagtcaagcagcaagccaatgggtagggaaagaccagcctctctgaactgggtcccacgtggagatagtgaatacagggcaccggtgagcattccagatgactccaaagccccggctggagtatccaggttccaactgtatctccttacagagacctgcagctctgtgtgtccagaggggttcatgctgggcaactgtggtggtgaaggtcaggtgtcctcaagctgaccacaagtcacagcttgttgtctttcttgtcagagggactctgggtgcagctgctggccactgggctcattcaagggcgttagtgccaaattccttctccctggccttcctcacgttgatctgtgtacaaatggagctgcaggggaaaggtgggtttccaaaaggagtgacagtgaggaagagaccgagatagaaagaacctgttgcaaacatttcccatcttttgtcattcaaatggatactgttttaagtatcacctgttctggtcataaaagacaagaatgtgtttgtagaagcttctaggatgcctggcatacaccatgcaggaagcacccttccaagtcggctggcctgcttttgttttgcaaaatctggtttgaaaattttgcactttccatatttagcaacatttcagtgggtgtgaatttatattgctacagccatggctaaaagtaattcactctttgatctatgttgcctatgtgttactatacagacaggacttcaggtttctggagctttggtttaaaataaactctgtgtgtgtgtgtgtgtgtgtgtgtgtgtgtgtgtgtgtaagagaaacagacagactctagggcattgctagttccaattggtgggacttgcttgtgacctgtttggtccaaaagttggtcaaaactgtagatttgcaaatcagcaggattcactcccggctctcattttgatgtttcaaatgagtgcatgttgtgcatttgaattagatcggaatgagttttgggggtctcactgagacactcatacatgtcaggatttgccactttggaagctggaggcagttaatatgtccattaacccagggtatcaaagtggcagctcatgagtcagatgtggcctgcagttgttttgttcagcccatgcagtcttttaaaaatctggaaaattcacattaaaatccagatattccaggtatctcttaaggcttaactttctcaaaactcagtgattttaaagaacagtgacatttatctgtttctcaaatctgtgatgtggacagagccaacttgtctctgttctgcatcagttgagaggctggggctggaagcatctgaggctcactcactcacatgcctggcagctgatgctggctctcaaccgaaacctccccaggggctacagtggcctttccgtgtggctttctcacagcatgttggctgtgttccaatggtgaaagtccacagagagagagagagaccccagtggaaggcacatcatttttctaaacgactcttggaagttacacttctgctccattctggtgattagaagtcagtcattaaagttagtccatatgcacagacaggggaattagaccccacttttttatggaaggactatcaaagaatgcagacacgttttaaaaccaacatgccaatctctcacttctcttgggaaattcggggacccagcaagatgtggcctgagcagtggctgcccctgtagacagggcatgggccctccagtttgctgggtcccctccacccaccgagatattgcacccaacccctgtaggcatttcagcttgggtctgccactctaggctttccatatctgagggttcagactcacttttcagctccttcaatttacaaggaattctcatttttgaaacgtaagaactcagaatttactcagaagtaaatttttttcctccaaaggaatcaggttatatccaaacaggtgatttttctgagaaccaagcaactcattacccatccttcctttgggtatcagagatgcagtttggagggctgtgtggggggcatgggcagaggcagtcaagatggctctaccctcctcatcatcatcatttgtagtaggagcagcagtactgtcttttttttttcttttttttttttttggacagagtctcactctgtcacccaggctggagtgcagtggcatgatctctgttcactgcaatctctgcctcccaggctcaagtgattctcctgcctcagcctccttagtagctgggattacaggcttgcatcaccacacccagctaattttttgtatttttagtagagatggggttttgccatgttggccaggctggtcttgaactcgtgtcctcaagtgatctgcctgcctcagcctcccaaagtgctgggattacagacgtgagtcactgtgctcagccttcttcagcattattgataattggggctggatgactttttgttttggcgggctattctgtgcattgtagggtgtttagtggcacccttggccttcatccactaggtgccaatagcacccccacctcccagttgtctcccaaaatgtctccagacatggcaatatgtcctgagggggttggaaaaagggtaaaatcacccccagttgaaagccactgatttctctatgtattctggataggaaccctttgtcagttaaatattttgcaaatatctcctcccactctgcagcatgccttttcaggctcttaaaggtgtttttgatgaacagaagttcttagtgtagtccagttaccaatcttttttaaaattgttagtccttttttatttctgttttacacatctttgcctgtcctaccttttcttctggaaactttatttttgtctttcacactcagagctaccatctacattgggattgactttttgcatggccaaaagtagagtcaggcttcatttttaaaatatggctattcaattgactcagcaacttttattgaaaacattactctttccttattgccctggggagccacagctgtcataaatcaaatgtctataatccgtgtggctgtcttttattctgtttcattggtccatttatgtatccttgtaacaatactacgctgtcttaaagacttagctttagcatatgtcttgaaatccaggagattaaggcctcccactttgttctttgagattgtctttactgttcttggcccttagcagtttcacacaacttctagaatcaccttgtcagtttccattaagggaaacatagtggcgttttgtttgggattctccctatcagtttggaaaaaaaaccaaatatttacaatattgagtcttccaattcatgaagataggatctatccattatttaggcctttgaaaatttgtctctttctcaaaaaaatatttttttgctttaaaaaaaagagcatgtggcagcttcttatattactcaagtgttgttatttttcaaaatagggattgtttgcatttttaggagattatgtttcttggactaaaaactattctgagtcctcattgcagagagagagagagagagagagaaagagacagagagcaagagagcatgcagccaaatttcttagcttggcattcagtgggtttagcaagctagctccagcccgcctcctgccctccttcttcctatcttatatatcttttcttttggccctatgaagctactccaagttcccccaattcaccatgcttttgctcctactgtcctctctgcctggaatgtcaggaagggcttcatggagaatgtagtaccatcgctgagttccaaagtaggaatttctaggcagaaacaagggaatacccatgggccaccaatgcctaaccaggcccaagacagggtaggagctcaatcagtatctgcccacctgggatatttgtcaggtcccgggtctgggtgataggcaggggccccgcatggccacccttcagcctgcaggggcagccaatctctgcttttctggctcaaagaaggaagcagtttgtctcaaacatgtggaatctaccagcctgtctttccgtagtctgcatccacggggtgcccacaaagtctggaaacagatattattttgttcattacagattggaaatgtccttgaggacattgtgtatgttcacctgtgtgtccagggttggtgggcacctgggatttcttaggggtttcctctttcttagggaccttgcaggctggtgctatgatcatccacagtctcccttctcccacggtctgtttctctctgcctcactgttgccacagacagtctggacagattacagctttgccccaacttgaaccatggatttttcttttcaaaataaaacataataaaattttggtgaaaatggaaatatctacatgtttatttttaagtgttttttttttaaatgttaagttttttggttggttgggaaacatcaaaataggtcatgtgtaacttggtttgctcataaaaaaaaagtggctcatacttggtatatttagagatgagacggaagtgatttttttttttttttttgtattcagtttttctctatttttctttttaaaccaaaaagtgcttggaaaatttctccaccctatccactgttagtgcattttcctggccttaaaattctggtaaagccttctgttgcccaaactgaagagttaagtgtgctgagcttggcttgaccttcagttctgcttctctaagagcgaaaaggcatctttttcaggactggtgctattaatgggctgaggaggacagtgttccgaagggcagaaaaatgccttcctctgtgagaaattaaggcagtgatttcaaacaaattgtttcgccagtgtctggcatccctgcgggttgtctctggttttcgtccacttgtaccaaatgcattcatgaacatggcagacattttgctgaaggtctcacagggaaggacggcttggagacacacattccgtaaaaaacagcttgaaaaccttcctcaaacgtttctgttttccatagttccttttgccatagcgtccaatcctatgagttcttttgtttttccttttcctcctggattttctgcctccttacctcctgggttttctgcctccttacctcctgggttttctgccagccttaccctctacctccatcacatccaaaggcctcctgcttattatgcagagaaatttggtctggtgtcagcttccacgcccagattttaatttttttatccaacagggcattcagcaaatgaagaccctgcagttaccaggaccagagcagtaggaagttataagtgatattttgcagcaaggcagaataatgtgataggattgtaagggctaagcagtggagtcctagaagatgtcctgagcccctggctgccttgagttctattttggaaacgttatttctaatttctccccagtccctagctcccaactaccagagctggccccagaaccactctccccttcactgggaacagacccacatccaacatccctattctatctgcaatcatctgctgactgtggtctaagggatgtgtctggcccccagcacaggccctgaggccaaggagaagatgaggttgctaaaactccagggcactaccaggccctcctcagttatctgtggttgctcagaatgatttgcttcataagcactccgagacgcacagatgggggagagtgatgtcataccagattccatgcttgatagacagacagatggatatgcaaatggaatgaacgagagagatgggaggggtgtaaatgatgggtggtggagtctagaatcaggtaagcagagggtttcccaggctcctttggaagaggagttcaaaatgacaagacgcaaagaacaccattctttatggcaacctggtacagaacacaggcaccagctcatgtctgtcctcacaacacccttgagaggtcactggagcttaggaaaccaagggttgcccagaaacatacagtcaaaactcagattctaatgccagagttccagccacttcaccagactgcctccaagaagttgccactggttggctggaagtcttgttccaaatactatctgatgatattttccttcttccccatctgccttccttcaagaggaagtaaacagatattctagagcatctgaaccaagcatctttgcatttatttggggacattattagtgtcatttcttttcattcaagatgccagctgttgggggcaaagttgccccgctgagctcatggtatagacatgggcagttgctaaagtaatccctccccacctggaggtttcaccttgcatcccaaataccacccctgcacagactggggtctctcattgctttcctctgtgccctccactggccacaccaacttccttgtttacccatcttaggtgagaacaccctttctcccatggactcctaccaatgcatttcccactctgcccctctggctgtcccaggtgtgctgtatgcaacagcccccccaggtctctatgctgctgttccctgccccagactctctgcttgtccagaccctgacctgcgatgtggaagtgtgatagaggagagggaattccaggcagagtaggagcggagatgacccatccacatgcgttccactcgcagggagcggagggtggggacgagtcattcatagggactccacacccagctggctggagcaacgggtcttgcaggtgagcccagcctgtcaggaccctccttcctggcagggaccctgctggcccgtgggtgatgcctttctccttggcgctgcctccagaactgtggcgaggcagccgttttcaaatgtttgtttgggttttctggaagctctttgaagttggaatgaaaaatctgcctagtggttctgaaatggcctctctggctcagcaggcctgggtcctgcatcattcccttggttcaaggctgagtgcaatgccaccacccattgctgcccaaatatgatggttggattgaagttcccagatatgtcatcaggcccctttaagaagttctctttcctctatgttgttctacgcgcctcatccacctcactagtcaggaggtccttgatgataaaaccccccgtgtgatttgtctttgtattcccaagacctatcccaatgccctatactcagtggcaaccactattgacacagctctttaaaattcatagagtacttccatgttctctcttcagaagtataaggaaggcattcccattttgcagacgagcacactgaggttcagacaggttgggcaacttgctttcagtgactcagctaggacggggcagactgagtatttgaccctgtgtggctccaaaatctgtgctccccggcttctgccctgctttccctggacagccaaagcgctccgtgcatgtttggtgctgaggtattagggggtttaagtcacagggtgtccagcactcaggagctgaggccacccgcaggcgtcttggttggcagctgagccctctgaggtaacaggaaatagaggcagcgggactcaggctggggttgaggtgttcggggtagcaggagaggaggagaagctgctgaagtggtggcagccacactcagtgaagtaagaggcgcccctgcccagcggcctgaaagccacttctcctcagccagcaggaatcgcattccatagcacaggaagcctctgttcagaggaggtccagtcaggagtgaaggctgtggagtcaaggccgtgagtgtgtgtgtgtgtgtgtgtgtgtgtgtgtgtgtgtgtgtgtttaatttgtggcttcaacagaggccagacttaagaatgaatgaaagagacaaacaagggcagcttgtcccaagtgggggagggagaagtgtggacaccagcttctgagggagtcaagtgcaaagtcctgggctccctgcaaaccgggccctgcaggagggccagcacccgcagcagcagcagcgaagccggccagacctcctggccttcctcacagcagaagggtgggccttcagcaacggggccctgtgcagtgggaaaaggcaacactgtgcttgcctttgtggctaacaggggctgtgctgcaaatgcttcaggagagcccctgcaggctgagagggacattagaaagttccatcctcttcatctgcccacctcccttggactgtgggctgtgggctgcatggggcacaggcacagggctggatgtgtggggcaattcaccctcccaggtggtcattccttctggctttttatttgtccaatattccttcagtctcgattatgtcccaggcaaagtgctagacacgccacacacattttcttcccttgccctcacaacaaccctagcaggttggcactatccaccgcattttatagctgaggacacagaactgtaaaaatgaagaagtgacaagtccaaggccacccagctgggaaaggtggggtgggacttgaagctgctgagtctttttgaatctcctcctctaaggggccccccaggccagcagggaagagaaagtcataagcacccaattctggtagaaggcagaaagtggaaaggggggtgtctaagtcccaaggtgcttcctaggggctcggagggtggccccagaagaccccgggggatcagtgttctccaggagtcttgaagggcaagtgtgatgtggaagtgtgatagaggagagggaattccacacagagtaggagcagagatgacccatccactcgcgttccactcacggggcatggagggtggggacgagtcattcatggggactccacacccagttggctggagcagcaggtcttgcaagtcagcccagcctgtcaggaccctccttcctggcagggaccccggctggcccacgggtaatgcctttctccttggcgctgcctccagaactgtggcgaggcagccgtttttaaatgtttgtttgggttttctggaagctccttgaagttggaatgaaaaatctgcctggtggttctgaaatggcctctccggctcagtgggcctggctcctacagcattccctgaagaagtaaacaggcccgtgcagggggaaactgcaggggccacactgctggactgctgggtgtccctggcccgaggcgtgggaggccggccctgggccctgcagcgcccgagtgtttgcccagttgccctggacacaccagcctggggtgcagggaccactgccgcctgagagggagtcctagggggtccaggacaggaagccagcggtgttttatgttacattaggaacaccagcaggctttctggagtggactgagccttgtggtcaagaaataggcaggcttggaggctgtcgggcttcccaccatgcagccaccatgcctcaccttcattagctgacaaagcagttctctgtcctcactggccacaaggggaggaggacacagcttttggaaacctccaggctgctatcctggaacctggagccacggccagggacagcttgagcgtcccctcccctctcatcttgtcctctgaggggtaggctgtgccccagctgaacggggcacctgtggctttgccagctgatggctgccatgtgggaatttggacctgggttgccagatcttcagattttccagcaaagctggaaatccagatgtttgtatgaaacttccccaatttaaaaaatgtttaaaaacactatgcaggacgacctatacacatctgcaggccagactcggtccctaggcagccagttagtgacctctactctctgccttcagacacccagggccacctaaacaaagggcccccatgacagtgatgggttgggggtggagaaaatgctctaggagagaccctggagtccacaggcaagaagggcatgggatcatcctttccctgctcctcctaaagggcaggcactgctccacttcttggttcccgtccactctgttggtacagacatgggggaagcgggcaagggatatgacttctagaatttggaccttgtttctctctcaggcacttccacttgcccttaacctgatctcctgctggttcagtccacctggtatgtttatcaggaggctctttctttttccttccttctcttctctgtccatggctttccctcttacaggtccttggtagctgccggagccctccctccagggggtgttggccaatgacaaggctgggaggccagggccgaccaatcagagcagttggccgtattgctgggaattaatagcaacattgcatatggggaaagcatgagatttgggatcacacagacctagattcaacgccttccctaactggccaaaagaccttgagacagctgcacaaatttcctgcaactctgttcctcatctgtaaatggtgatactaattcctggcggggattacatacaaagatgcatggaaaatgcctagcacagtgcctgggatatattaagagctcatccatagttgtcactgatttgagacagtgacaactatggatgagctctcaatatattcttgagttgcatgtctatcagaagatgtgatgccaggttctcaacagtcaacttagaaacacactcttggaatagaaacacgttgggtaccatttgtacgtgtattatatatgtatttccttttcatcttttacctattctcttttaaacagagtggtggattaaaaggtaatgaattacgcacaaagtagcttctcacttctcactgcctttcatttttcttctcctcctacttggcctttctcccccaccaggacctttactctggtcttctgtgtttgctaattcattagtcaacaaatgtttactaagcacaaagactcgttctttgttctcaagggagggaggcagacagatgattgcagcaaggttgaggataaagagaaatccggggttgggtgcggtgactcacacctgtactcccagaactttgggaggctgaggcgggtggatcaccagaaatcaggagtttgagaccagcctggccaacatggtgaaaccccatctctactaaaaatacaaaaattagctgggcgtggtggcaggcatctgtaattccagctactggggaggctgaggcaggagaatcgcttgaacctgggaggcagaggttgcagtgagccgtgattgtgccattgcactccagcctgggcaacaagagcgagactccatctcaaaaaaaaagagagagagagaaatccaggatgtggaggggcctggagtgcagaagacatctgggagatcttagagagaggcttgaggtttgagagagaataagggtcgtggcagcaggaatgaggaagagatggattcatgagacctgtagagggaccttccaggaggtcccaggggtcagtggatgggaagagccaagaggaactcctcatttctgtttagatgattgagtggatgacattgtcaccaactgaaagcagaagcagcagagaacatcttgctagtgagaggtgatgagctggaccatacaaggtgacctttaaaatgctggtgggacaaccaggtagaaccatcccataaatgataacagtgaactcactacatgccagactgtcttaggtgttgtatcttatttaatctccacgatggccttatgagggaaggcaccatcatgatccttacttttcaggtgactattttaagggtaagaaatattaggtaactcaccagtccagtggtcactggttcaagtgagtagagctagtctgactccagagcccatcttcttgcccatttcatgtatttattcaattaacatttattgaagacctactatgaagctggcaccgtttagatgctttgaatatatcagtcaagaagacctgccttcacgcagctcctgttctactgcgcacactgcctctgctcagagacagctgaggatatggatgacagttctggctggaggggcaggggggctgctacacccactcccactctgaaatctcacttccagggtgagggacaggtgcttccttcacccacccacatcagtctatatccccatgctaaccattttgctttgtgccaggccaggtggcagaaggaagggcagatgcttgagaaggacagtcatagaatagttccttctaacccttttgtggcgtcagtctcagacggtttctatatggagctggacatatccctccatctctatcagctcatggtggagaccatgtgttgaggagatcatgaaggggctcttcctctgggtgctctgtcacccagcccccagcagcccacccaggtgtcaaaagacaggtctgcccctcactccagagaatagctaggatcctggtggcatggcactttggaaagtatgagacccctccttgttttacagaagaagaaactgaggcagggagcagccagtcattgcccgaggcttcctggcaaattagtgacagagccagttgagaatgcagcccacgtttgtgttgcttcaactcagccccagatccttcactctccatgggggctgctttggggaagccagctttgcacccccacttccctggaaggcagagcactaaggctgccacccagccatcgctcaggcgggtccacacagccccgggccaacctccctggcactcacacccagtgtccggagcagctggtcagtgggcgtggagctcctgcttgtgtgcccccacccctgtcgcgccctccccctgcctgggatgagctgcagctgcctcggggcctctctgcctgcgccccccagccagcctgtgccctgctttaatgtgtcctggggaaaatagctggcaatgctcaggcgacaagcaaaggccattttttaaaaaaagactaatgccaggatgagggggcaggagggggtggaaacagctgcaggctcctcttccaaatttagccaggtgactgctttgccctgctcctctttctctggggtttttgggtggccattgcctccatggtaggactgtgttcctgaaaaccaccccccagatgactcacagagctgtggcagctcagagaggaatgtctattcatttcagctggggctcttgtcagccagttggacctgaccagcagctccactgttgcagaattgggctgcttcctacttcctgtgtccccatccgatttcagggcctaccatccccaaagtgacagaagatagcatggaatgaggcagccatgcccagatatcagaggtgctgaaaacatcctgaggctgtgtagaaacacagcgaagattggggcatggagcaggagcaggagagaagccaggtggcccagccttgggttgggagaacagggcatggccccagccccagggtgcccatgggcaggactcagagccccagaaccgagcactcaccatgtccacttctcatttattctttaagtgttagaaggaccttcaaatcagctcatccagatgttcctaagtatgaatgatttgtaaaacgattttatggatatatatggataatatatatccataaatattatccatatacatatatagataaagctaaattgttctgcataaccagtaatttgacaattatttattgggggatgaatctaatgtctgaggaggaatacatttcaaaaatatattgaggccgggtgtgatggcactttgggagccaaggcaggaggattgcttgagcccaagagtttgagatcatcctgggcaacatagctagaccctgtcttcacaaaaaatttaaaatttagccaggcgtggtggtgcatgcctttggttctagctacttgggaggctgaggcgggaggatctcttgagcctgggaggtcaaggctgcagtgagcagtgatcacaccactgcattctagcctgggcaacaaagtgagaccctatttcaaaaaaagtacccagaaatatattgagcaaatatggtgctacatacagtgtggatgatacaggtagtatatgaacatggcactaaaaaacctgtcagtggagcctatttgagaaaatatgggaaatgctgatcatcaccttcctctttgttctggttttctggtcttcttctctggtctccttctccttggtcttcatccagggaaaacagacagttctatgaactgattttggtgtggtgggatctgggacagcaggcattccagcctttaaccttcccacagtgactttggctgtgacctgggatggagtgggcaggccataactgaggtggaaaatcctgtcagtgagctagatcgagtcattaggcggagctggatgggatcagagaaaatggcttagaccctggagtgtcacgaaaagacacacaaggcaactagtgaagtcagcagacattccagcacctgccctcctccctccatcctctagatctaggagactcctcctgacacacccacctcagacacttcagcctgtccctgttctgggcacgcatgccctctgctacatacactcccaccctcaacatcacttccaggctgagggaacaggtgcttcctttacccacccacctcagtgtaaatctccatacagaccattttgctttgggccaggccaggtggcagagggaaggggagacacttgggaagcacagtcatggaatactttctatctaaccctttggcagtgtcaggcccagatggtttctattatggaggtggacgtttcccccatccccataaactcacccacataggcccgtgtgggacatgcattgactcattcacttatagtcactcaaccaaccagagcgctcttcccccgtctctctctgggtcagtaatgcttgtcttgcaggtctccagatagcccgagacaggcttttcctcccccaggaaaacctttcctgtgcttcacctgctgggtggatcacctgtcagtagtgcttagcctgcactaatcatcgttgtaggtcagaggcctctggagcagctattcatgtgcttggccgtctgggtcaagggaactgatgttcaaacaggatgtgtgcaagctcatcttctcaccggggtggtactgatactgcccaggaaactagtgaggagtgaacttgatgagtaacagcagcttagagacagtgtcatctcttttctcagacccatgtggaagggagaaaggcctgcctgccggtggtcccgatgccactaggtggggcaggatttgagtgatcagctcaagatctgaaagatcaaaggtggctgaaatgaaaaggacgctttctaagcataaatgtgaagtcctaattcctggctcagcaactcagctgttgatactagagcctaataatcacttgttgtggtgacaagacttgggggctttactcagtggtttccatttcctggctgtgcactggaagccctgagcacgtttttaaaagatcaagtccagggttccatcccagaatgttcagaatgaagatctccaggaaaggacttaggaaattgtgtattttagaagttctccaggtggttcttatgtagcttttgattattttggaggtggggtgggcaggacagggtctcgctgtgccacgcaggctggagtgcagtggcacaatcttggcttctctataggaaagccttgacctccccagctcaagccatcctcccaccttagcctcccaagcagttaggattacaggcatgcaccatcatgcctggctaatttttgcatttttagtagagatggggtttcgccatgttggccaggctggttttgaactcctgaccttaagtgatcagctcaccttggcctcccaaagtgttgaaactgcaggcatgagctgctgcacccagcccttatgtagcttttggaaacaagtgaggagtgaacttagggctttatgggaagcatcaatacattacatcaataaaccaaatgtgagccaacagaaagcttccgggttggggtgcagtctgggctcaccacagctctagcagcgactcaggaccatgttgtgaagaaagtaaagatccagtcccttcactgctataccacctgggagtaggacccccagaatccaatatttcaggtatttcatctgctctagcaagatgcctttgacaaacagctgcaatttgtgcctgtgtgatggtcctagtcaccaagggtggtggccagcaaggctactgagaaaatagatcctcactccatgggctcagaaggctgatgctgggaccatcttctttcattctggcaaaaccgtgggtttcttcagaatgtcaaagtgcagaagggcgctgtgggtggcaggatgcttgctggccaggtagcagatggaaatcagtgtccctgcccacccaggaggagccaggagcagaaggtgaaacagtgagccgtggagatgctcgactcttcctgagattccttccatgatttccagagacggtgaagtcacgatgcacagctctccagcatgtgcatctcctcctcaaatgccttctgcagggacaaagaggactttatcctcaagagtgggacacagttctgtagcaaaatgtggcaggttgaatggaaataatgatcttcagaactttaagaaggagatgacccagatgaaatagaaattgggtaatttatcagaaagcctggaaaaacatctgagagagacccctgcaggagactgaggtctggaagggctgaggtagcgtattcttattctggcctccacaagccgcatggactcctcctatctggcctcgtcacctggcctccaccagcctttttcctatagggaagccactcacgctccacagttctgggaaacggactgatgagagatttagttctggacagccgcccctcaactgttcctgttccatgctctgacacctcgggttggcctcagacaatctactcaacaccttgtaatacatttatagacctgtggctcaggaaaagctgtggggaaggacagagcttcagcaggccaagtcccaagcctgtggggccttttcttcttgaactcatgcagtggctggcatttctagggagagggctgaagttcagttcacatcgtcccatttatggaggatctctcttggggttattcttccaaggagcatcagcaagaaaggaaggaagccatctcttgatgtcctggggcactgcctgcccatagatgagaaggggttcccaggcggaaagaaggggtgcaggaagctgcacccaagaaaccagtttccccagcttctgaaagtagggccagccctgcaatgtggggtgcagctgcccaagaggggctaaatggaccttgcagggtcactccagatgaatcttttctgcactcccagaactcaggcctcaacctcctcatggtcagtgtgttctctgatgagcgtgtgcgcgtgcacacacacacacacacacacacacaccctggcttcagggatctctttagaaattttttttttttttttttttttttttttttttttttttttttttttttttttgagagagatagagccttgctctgttgcccaggctggagtgcagtggtgctatcttggctcactgcaacctctgcttcccaggttaaagtgatcctcccacctcagccacccaagtagctgggattacaggcgtgcatcaccacagctggctattttttttgtagagatggggtttcactatgttggccaggctggtctccaactcctgacctcaagtgctgccttggcctcccaaagtgctgggattataggtgaatgagccactgtgcctggccaatctctttaaaatatgtctagagtccatgtctctctcttgatctccggactcacctatgcaactgcccactgagcctctacacgggccacctgaaagcatttccaattcagcaggaacttccagccagctgggaaatctgctcaccattgccttggcgaggagcctactctctactccagccacaaacctctgagtcaccctggcctcttccctcttgctcacccacttcacgccgtgggatcggttaccaactctgccagtgacctgagggttctcgggccagttcactccttaggcccagttccagttactcgtgtgctggacaaatgaggtggatgaggctactcttaatctaaatgtcctgtgtggttgagcagaatgaccaccagagagagagagagagagagtaagcaagtaggttaactaggaagtcagctgtcaaattgatgttatcagggaggttctcaaaaatgaggccagattgaaatatactaaaggaagtgaaatacccgaatgggtgggaagggattccaggcagggatgctgagcaagtgaaggcagagagacagagatgctcaaggatgacccaagagacaatgcatggcccactgcgcctgatacatgctagagatgagttggcccaaggtgtgatgagttaggtaagggccaccctctgctaagccatcaagagtttgtaagcagtggtggtggggagagggcggcaccgcaagctttagaacaagactggagcatagtgaatatgtgtttgggaaggttccattggcaaagcggtgttcagggagaggaggctgttatggctgtccaggcaagggatgggcagagcaggtaaatgtcagggtcaggggtgggagaggtgggagatgcacataggaggggtcggagaggtgtctttggcaggagctggccggggagtgattcctagtcaggggttttgggcatgtgtagaaggacagagtggtggcagcttctttattgtcatcttcttttttttgagatagagtcccactctgtcgcctaggctggagtgcagtagcgcaatctcagttcaatgcaaccttcaccttccaggttcgagtgattctcatgtctcagcctcccaagtagccgggattacaaacatgtgccaccatgcctagctaatttttttgtatttttagtagcgatagggtttcaccatgttggccaggctggtctcaaactcctggcttcaagtgatcccgccttggccacccaaagtgctgggattacaggtgtgaggcatcacgcccagccatcatcttcttgttattttcccaaggagacatgtcctgtagggtgggtgaggagaagccatgttgtcagggacttggctgctccctaaagttgaaggtgtggagggaagggggttccttttcactgcagtgatccccatggactcagctacagcctggctcagttttctcccaggtctgtcagctcacccccttactcatcagggctctgggattgtcagtgacagaaacccagctccaagccaacagagaaggtgaaggtgcagagaatccaaggtaggattgagaaacgaaattctgaaaacatctttgggggaggcaggctcagggatggctgaaagcagggctgcagggctccagtgccaacagggaacagggcagctgatggggctgctgactggtactgagtaactttcaccacagcaatgagactgacttcagactctctctatctccaagcccaggatcctgggaagcaactcattggtctggcttgagtcaggcattcgcctgtggacctgttggcaggggccagtgccagggtggtgctagccctcatgggagtccctggagtgactatgtgggagggggaggggcagggcatagaggaggggaggcaggcagacaatcctggggtcaccgcaactccacagcagggccagggagcaaacaaagggtgaacaggagacagggacgtggccagtgattggctaacaaatctaatccctctctaggtgaggttctttttagagttaacgtgagtcatttgttcattgatccgttgagcattgattctgtgattcatcccacaagcctttactgaatccctattctaggccaggccctcgatcacagatagaaaagggaagaaaataaggttccctgccctgcagtagttcatgttctagcatgggaaattcacgtaataaaattctataataataagagacctatgctgaatagaggtgggaaataaggaagaaagagtgattcattcttcttggaaatttattaaaggcttgatgggtagtagatttcctccaggcattggtgctggagaagagccttccagcagaaacagcaatgtgataaaaggcacagaccatgagctcacgttggacactgggtgggcagggggtcatctggtggtactagcgtggccagagtgtaagttagaaggtggcgtggggcatgaagcgagagaacaggtgaggttgagtagatatctaggggccacttcttgagggacctcatacagcaacacgggttttggaagggtgtaaaatacaagatttgcctttgagaaagactatcctggcagcagtgtaggcgatggactggaaggaggaggagactggagatgggctgaccatcaggaggccaccgtgaatgtcaggatagagaggtcctcctgcactgaagagatgatgaggaagtagaagactgtgggtagaacttcaagggggacaggttgagttcacgagcaagagtgagaggaggcaaactttgcagggcaggaaggagtgcttgattgagagttcactgctgtcttctgatggaactgtttgttccttggaacagcagagtagtgagaaaatgcagtggcttgaaattctgataactgggaccctggaacagaagtaccacttgctgattatgtgaatttggacaaatcacttaacctctgagatgtggtgggagttaaaccatgtagtaagcagatagcctgatacctggcacacagaaggcccttgaagtgtaacatttacatcagaatcagaacctttttggattccatggctacttccaatgtgtgtgtgtgttttttttttaagtggagaggtacgattactaaccagtaggagcaacaatattattctaggttggtgcaaaagtaattgcatttttgctgttacttttaatagttgcgtatcgaagacagcatttgcttttatggcatcggaaacattctgactcagcttactgacatttcctctgccatcatcttctttcatactgaaatgtggtttaaaatatatatatatatcatttcttcccattcaaagaagggtttatgcctctgctttcatgtcccaacatactttgagagatagtctcaccccctcccttttcctcttttatgccaggaccctggagaacagccaggtaaggtggtgcttatctcattttcagtcctgaaggaggaggaagatcaagtgtgtgcagcgttaagtgtctggaaggcgtttatttgattttcagcttgtctttgttccaacatggattgaatggtaaatacaggaaagtagctcccaataggcgcctgaatagctgaggggcaaaatgtcccggtggcccacacccacatgtaccatcatcatgagtccttcaagcctgcacagctcactcctgtccagccctgggataccaggtgagtcaggagaatgacttcctctgttcttacaaagtcctggccaccagagatggtactgttagcacaggagagacattgagaatagggtagaaatctatgcagaaaagtgtttgttgtggctgagagttccaatgcccatttaagaccctgggagaaaaaagtcagatcactcatgtatgggctgaagaactaagacttttggttgcaagtaagagaaaccaagttgagctacatttagtcaaatggaaaggggggaaaagcatggggtttggatttatgataaggacatagggagtgtctcctagcttcaaaggcaggaataaagccaggccgcaagaagggactggaaccaggagaaaaataatcagcccagctttggtcctttgtgcctctggtccagtctgtttcgtctgggagtcagaaatcttgctgaacaagcgtgactctaggaggtccattttgtgaaagggcagatcacagagagggctctggaacaaagtggagaccctggctcaaggcagagatttgggaagccctacaatatggtggtctttgaagccctaagaagggaattgacccaattcaaatggcatggatctcatagtaagaggtaggactacttgagagagaagatcaaaacagagagattagattccaagggctctagaacaaagctctaagggcgagcattgttttctcatctctctgctcccacaaccccacttcccagacttaaggacaatggtgtatacataagaagggctgaataaacatataggttgaatggcatagaacagacacttttatagatcaagacatggacgattttgtattgttcaacctaatatgtgatgcacgagcattgagttgaattgagaccttgctttgaacctttgttatgggaccttggggcaagtcatggtcttgatggtttttaaggttattccttggacccaggtgctggaagcacaacttccaaatgtaatacccagaagcaaactgacagaggcaggaacaagctggagtcagagagatctgtgttcagattccaaccaggcactgtcccctgggcctctgcaggccctcagtgagccagcgaggcctgccctgagatgacagtgctacctcctctctctgccaggaccactttctctcattttatggagaaaatcaaggaataactttttccaactgaagcctctggaagatcttaggcaacacggccgactagagctgaacctaggccagcatcctgggccacagctcagctctgcaaatgtagccagagcctgaggcgggggctcttctccctgcctggcaacttctcctggctataaaccaagcgtgggctgcagctcctgggagaccaggctgaaggcccaggagatgcttcaggcaatttgcagttgctcccttgaattccatttttaacagcatctgtagggcagggaacgcaaggctgacctgtgagcctggtgtcctgacttctcagggcaagactctttcaaaagtatttcttgagcatccacatttgttttcagcaaatcagtctctgctctgcccttttgaagaacacagctaacaatggaaaacaacttttatgtaagagagttaactgcaaaccgggtgctttcctaagcattttgtatatgttatctctttgaatcctctcgaaacctcaattaggcagaagatacttaatagccttataagctagacaggaatcttagcctaaaaatgcaaagggaagtcctggggagggaaaggagaaaaccaggaagaggaaaaataaatccacgagataatgttgtaaaatataatgaagccatacctattttaaaaaaacccacagaaatttcccagacctggagagccactaagtggcacatgcaggggtcaaactatgtctatggtggctcatgcctgaatcccagccctttgggaggccgaggcaggaggatcacttcagtccaggagttcaagaccagcctgggcaacaggacatagtgagaataaacaaattaaaaaattagctcggcatggtggtgtgtgcctgtagtcctagccactcaggtggctgagatggaaggatcgcttgagtacaggggtttgaggctgcagtgagatgtgatcatgccactgcactgaagctctttgagacagagtgagacaccatctcaaaaaataaataaataaaaataaaagtcaaagctcctcctcaccaacatatagtaacatttatggaacacatgcttacctcactcttcctcaaaactgctgtttgaggaaggtcctgttgtcaccagcatctttcagatgaagaagctgcagaacagggaggtaccagaacttgcacacagcagatgagtggtggaactgggaactgagccgaggacacctgcctccaaagcatcttgttgggttggagaaggacagtggcaaacacagctcgttctcactgcattttggtagcaaagttgtgccttctttttttttttctttttcttttttttcttttttgagatggaatctcactgttcccaggctggagtgcagtggcacgatctcggcttactgcaacttctgcctcctgggttcaagctcctgcctcctgggttcagctcctgtctcggcctcccaagtagctgggaccataggcatatgccaccacacttggctaatttttgcgtttttagtagagacggggttttgccatgttggccaggctagtctcgaactcctgtcctcaagagatctgcctgcctcagcctctgaaagtgctgggattacaggtgtgagccaccgcacccagcccgtgccttctttttgctcccaaatcccattttattggagttccctgaagcagtcatagtaaggcagttgtgtagtagagcatattaatgcaattggatatttctttgccattctaggaaattatctactgatacacacagcaacgtaggtgaatcccaaaaacatgctgagtgaaagaaaccttgtacaaaggtctacatactggatcattccatttacatgaagtcctagcagaggcaaagtgaatctatggaatgtttctggtatttctcacttagaagagtggttgcctcttgttggaattgactgggaaggggatgagggaactttctggggtgatgataatgttctggacattcctggggatctgggtttcagagacatatgcatttgtcaaaactcaacaagtgtgcattttaggtttgtgtgttttatttacatgtaaaatttccctcaaaagatgaaaaaaagaatatggaactctagttaataatatgcaggctgaagtgtttaaggggaaatgtggacggtggtgtcttcactttactgtgaaatgcatccaaagactgagattgatttctggatggatagatggatgtgcaataacacagcaaaatgttactggtagcatctaggttgcactgtattagtgttcactgtgagattctttcaacttggctgtgtgtttgaaaattttcatagcaaaatgttgggttggaggggaaagcgattatgtggaatcctggggtcccctagtggtgagttaggggtcccggagctcaggattgcaagctgagattatgcagtcaggaactgtcatccttacatatctctgtcacagctccctggccctgggtaagcactaaaatatgcattttcctgggtctcactttagagagagaatactgaggcccagggaaggtctgccaaggtctcccaggactagaacctaggactccctgtttctggcctctcctcccagctagctttatcagaacccattttcttccacagaacagggccttttgttctatagcccagggctgtaaatttcacctgcgtgcagggatccaggtaactgatcccatcacaatgagccggtggcacccagggcagtaaaacaggcctatgcgttagaaccccacctgccagtggcttcctgtaggtgtatttgaagtagtaggaaaccagagtggtttctacaaataaataacccaggaaaagacaagcctctcagatcaaagaaggactctggcccaaacttgaactaaaatcaagcgtgctctttcgactccactctggctgggcagagggaggagtagagaaagtctatctgctgtgcaaacattccctgtctctgcccttcctgggtttgtgtgagcctgagaacaggagcccgggaggaaggctgcactctctgaactgctgccaggccctgcctcatgacattccagcctggcttccaggcacagcaggtgccaacaaattggcctcttgtgtgtccgagcctaaggggctcattcatgggctgcacgcctgtctcagggctctcatgtaagccctctagggcccccagctctttgaggaaatttcatggcatcctctgtgtttcttggccctactggttaatattaatgcttcccaggggaaaggaaggagaatggaaagagatgcacagaagccagcagttctgactcctttcacggtggggaaggatgagggcagaaggtgtcttagagcagaggaaggacccttagaagttgaagtttgcaaacttcaccgtgcacattagtcactgaggattgccagtcagtggcctggggcaagacctctggtttctaacaggctcttgggtgatgctgatgttgctggtcccttgaccacactctgagtagcatcaccaacggccaaatccctcccgtcatgaagttaatggacaataagcaaacccattagtgaatatatgattataaactgtgtgaagaaaataaccaggatgctacaaagggtattgaggcagggaccttcagatgggaagaagatggtaggaaaagcatctgtaagaacaggactttagactgggacctgagggtgagtggagtagggaaagcattcccggcagtaggagcagcatgtgaaaagtccctggggcagaatcaagcttggcatcttcaaggaaatgacagagaggcccatgttgcatgggtggagactggcatgagatgaggctggagaagggtcaggccacacagggctggataaagggctctgacttcattcttggtgtgatgggaagcccttggaggattttaagcaaaaatgtgccacgattcatgctggtgggtctgtggaagatggattgggataaggtggggagtaggctggtgggtggttcttgcatagtccttcatgaaatagtcgtcaaccttagtggtagtaaagattttcattctttccaatgtgggtcacattttctaggaaactgcatgttttggggacatgatacaattgaggaaaataagtattcttttccgataaagtaatgtaaggcctcattaattaaataaacgctttatgagagcaaaaagacttggaaagaattaacctttggctgggcttggtggctcacgcctgtaatcccagcactttgggaggccaaggcggatggatcacctgaggtcaggagttcaagagcagcctgaccaacatggagaaacctggtctctactaaaaaaaaaaaaaaaaatacaaaattagctgggtgtggtggcacatgcctgtaataccagctactcaggaggctgaggcaggagaatcccttgaacctgggaggcagaggtttcagtgagccaaggttgcgccattgcactccagcctgagcaacaagagcgaaactccatctcaaaaaaaaaagaaaaaaagaactaatcttcatctttccttctccttttggcttcttattagttagggttgtttccatagtgaatgtcaaaaacacaattcaaactggcttaaatgaaaaaggaactttgttggctcatgcaattgaaagtccagggatagtagtagcttcaggcataattgggtcttggtgctcaagtattagctttctccatctctaggctccacattcccctgtgcaagcttcactcttagagaggctctctcaatatagaggcaagggtggccccagcaactccaggcttgccaaccacagtgggatgagatccagctttcccagtagttccagccaatgtcccttttttttgacttgggtcaactgaacatccctgcaccaatcacagcagccaggggaatggatctattcattggccaggccgggtcacatatctaccttaggagcaaggcgagtgggtcagcccccattgagctacatggactgagagtaaagggaaagatggctgcaaaggaagatctaggggctgaattcgggagcaggagatgaaactcacaaacatcctctgtgggctcctcattcattttgaatgtagcaccttctcccatcaatcattaaggctggttccagttcatcaccttttgttctaaacctgtgtctggatcttgcctctcctgaagacatctagttctgggagcaggaggcatcttgctggcaatgatgccctatctgtcccatctctcctgctgctcccagcagactatgcctttgcccaggtcagaaggcctttgccccacaaggcccttgtttccagtttcaaggatgcctctagttcacagtccacatgccggaaggcaatgatgggcctaccctgggtctaaacacagatctcaatccatggcatctgtgctaactccaggtagacagtatcagaatcgaatggattatagagcacctagttattgtgcaccaagaactggagaattgcttggtttgaaaatcccttgcacatttagtggtcggaagtattgggatagtggagggaaaaagcagtttttcctttagttggtggagagaagtaaacacgttttcccctttctgctgtacctctagaagggttttacctgcatcagaatctttcagggtgtctggcaggggtgcacatgcagattactgagtcctgccccagatccacagtcagaacccaaagggtagggtggatctgcctgcttgtcaagctctgcagagtattctccctgtctcccactcatacacaggcacacacgcacacacacatacacacacagggacacgcatacacattttctagacctttccagctcaggttgttggctccgcctgctttcaaggcctctggatgagtctctccagtgcttcattccccctgttccttcatttaatttggaaagtgggtgctttagaattacacttctatcatacaaaagtagtttgaacagacaaaacagagccacacatagaaccactccaatagcagctaacattttccaggatcttctggttttgagaacttctttcacgtccaggtgtgtatggtgtggcacacttagctagaatccagccttcttggaccctatcacattacctgtcttctctctgggcactagaatattaaggacagttgtaagtcgggcccacacagtctgagatgatgtacttgcagtgcctggaggcatcactccaaaaggattagctgttagtgtgaaagccatggatgggatgagaatggaacaatgcttgctgcggactttatttaagccagcacggcagcactgaaaacaccacacccagtggtggggattttcaatgcccatctcacctaccaggcaatcaatgcagcactgagctgagtgggcatctgctgcagagaaaggcatcgtttctacagcatgccctgcctcaagcactatgcatgtcccttctctcccttcccacccccaccttgcctgcaccccagttttggccacctgggtgttcacgtcttatcaccctcaacttaccctaccccttagctgtgctgacccctctgccctctgacctcaccacacagctccagcccctgcctgctgcactccctcacacccttctctttctgtgttccctctgcctgtgtgttcccagggcatctcctaaccccattgtctcttccttccggtgcctgctccaatgccaccttatcagagagagctttcctctcctctgcttgatttctctctgtagctctttgtgtgatcagacatatatgggatgcctttccttgcttattggtttctattcttcctcctgtaacccctgtctccgacaactggactgtgagctctaacctgatccagagcagggtcttttcctgagttgtttcctgccgtgtctcaatgcctagaaccatcgtgcagtaggcactaataataaacacggattgattaattaaattccagcagagacctccaggctgcactcctattcccctcccattcctcctccctgtccctggcagtggtaccttttaaaagtacacatcgactcactcctctggctcctcctgtccgccagtgcccccacacccatgctttcaggataaaatccagactccttaactttgcactgaaggtgcttcatgaatgaaccctgcactacgctcatctttgctgatccttggcacctgctgtattctccaggcatcctcactctccttaagcactgattttctcctctttgaaacaaaggtcttcctgggactatgagcctcccttcccacattgggccaggaaccccccagtggggagaatggggaaaaaagggccactaaataacctagatgaggagtgatgtgggtcttgaccctggtaggaggtgatgggaagagggcagggggcatctggtagaaatttttcttgagccccagaaacaagtaggcacacatagaataacttcaggccagaagaaacgccaagccaactgctgatgctagtattttcagttaacaaatacaactgatgaagtgtttattgctacaatcacttaccaagtcagtacagtgcacacaaccagctgggaagatgtatagcccagtgagtagacttgggtagctccaagttctgactcagagtctcaagagaggctcatcttacctttgaggtctttgaactctgtgatctagctgctcttggcatcacctgaccttttagctgccggctctgaggagccagcccacactgcatttgcccagggaactgggaataaaaaggctcatggtggggcagcctcctgcgctccccttggccctggcagactttccctgcctgaacgagagccagctggcagagccttttgtggatgatgcctggggaagccagagttgggactcgggtcaacttgtctttgacgtcaggtggcagctcctctcctgaaatacttacttgcatccatgcatccactgatttataaggaggctgaggagcctgggttgggctggtggaatttaaactgtctttccagatgaggctcacttgtttaaagaccattggtggactgggaaggccagacagatgctcaaattcaggaaaggacaatgaggcttccaagagaggaatcccttcatggaagaagccatcctgtgccatgcagactcaaagtcggggctggagggacagtcgggagaggtttaaggtggagagcgacccagctaccagagcagcattcattaccaggtcctatgtgtgttgaatgaacctctctgtcagcctccctaataccatgggagccaggtcacctggctgtggaacatgtaactgagcatggactctccctctccatgcagataagatgggccactttcactgtgaggtaggaggcagcttccagggcgggctggactggggggagaatccctcatgtcccatgcacgaagatagcagcaggtggatgaggagcaggggtggagatggaacttagctaaacccccagtgagaggctgtggctgtgaaatcccaggatatttgcagcatgagctgggacaggattcatgtaggcacccgtggggagtcccagaaatacctggaggaatcatgcaagaggcctgtcctatgggaataagtgaatctcagaggtgatgggcgtctatggtctggggactgagggcagggaaaactgggaacttggcttaccttttatcgtgggcagcaccctctccagagagccctgggattggcgggagaggccaggacccttcctcgctgcagcctccagtcactccaaactgtaggaggggcaggctggccttggatttggtgagcctgggagcacctgtatcagtaacaagacttcccctctagctttatgatgctgggagacaaaacaagctttaacagggaaagtactctttttttcctcaattgagggtaatgcttaaatgacaaaaaaagagtgatgtattttttaaaaaatctgcttattttaatgtctccaatttctacttcaaaatacacccacctgttttgatagagggtgttggacaaggagttgaaagttgcagagccggcaaatagccagattcatttggcaaacacattcagtcagtccaatgttgactgggcagccttggtgtgccaagctactgaactaaggtctgttgggaaggaaaatgtgttcacggagtccctgccctcaaggagcccgcagcccagtgtggaaaatgttcaggaactctaaagacagaatgagataagtttaaagaagggtttgatgactatgatgtggatgcagagggagaaggaattgataggaaatttagggccagggagaaccctctaggggaggtagaaattattttattttgtaattaaaacaaattatgcatttcaaaagcttgagcatggcagctgggaggatggtctggaagagaaaaaacattgaaatcaaggaagcagacatcagaatggggcaaggcctttgggggcccggaggaagttcgtgggactaagaatagatctgctccctatgtgctgcatttccatcaccccttctcctctttcacagccactagcccagcaggtgttgtgttttcattcatggaatcccccagaagggtgggagtttaatactgggatgggtaaacaaggccatattttatcttttaatccctctcctctccagtcctctcctttgccttcctctcccctcccctctcttctccctttcccttccctcttttgggatctgtgctttgcttgaatgtgagaggcaagcaaagccccctggaataaaacaatgagccaggctgccgcgcagaaatgacctcttctcataccctggccctctgaggtagcaggaacctccctttatccgcccctgaattctctgctagaaggcttactgttccaggaccccaggactctggcttggtgcatctgccacacttcacataatccaggcagaacttttgcctagagcccagtgagggactctcattaggtcatatttgggttttttccccaggtcataaacatattgcctgacaggggtgagtttcctgcataaagccctctgtggcaagctttcaagaaagcacctcttgtttagatgtaactctcatctgaagatgcagttctaccaatttattcgtgaaaaaggctaccctaaaagcccatgtagtaagccaggctgacggtcagctgcatccgtcactgcccgggaggcaaccctgggtaatggcgacacactgacctttatggagtcttcatccgggccggcccgtgtaccacacacatcgcatacatcatctcatccctctaacagacctctaagacagctattattcccccattttacaactgagcggacagaggcttagattgttgagtaattggccaactacacataccgcccttaagtggcaggtctgagacttaaatttggatctagcttgtgataaagcctgatacattttcaaatatttaggaggttgacacttaactgatggctgacaagtgtctgtttgagatttagttaatactctgtaactaacagttctcaaacgtaagcgcttatcagaatcacctggaggatttgttacgacagctttctgggccccaccctcagatttttctgagtcacttggtcagtaggtctggagtgggactgagaacctgtgtttctaacaggtagtgtgatgctgctgttcagggaataccaccgtgagaactgtcactctgaactgaattgtagctctagtgtggaccttctacaccactctgagtcctgaggctcagagctgttccatagaagtctctacaatgataaatgtgtcctcaacctgtgatgtccaatgtagtagcccctaaccatatacaagctgtggaggacttgaaatgtacctagtgcaactgaggaactaaattttttatttttttatttttatttttttgagacagagtctcgctctgtcacccagactggagtgcagtggtgcaatcttggctcactataacctttgcctcccgggttcaagcgattttcctgcctcagcctcctgggtagctgggtctacgggctcgcgccaccacgcccggctaatgtttgtatttttagtagagacggagtttcaccatgctggccaggatggtctctatctcttgacctcgtgacccaccagcctcggcctcccaaagtgctgggattataggcgtgagccaccgcgcccggccaaggaactaaatttttaattttatctaattataattgaatttaaatttacatagccacatgtgattcatggctactgtactggacagcatgcagccatgtccagccctttgaacgtgaggacttttttgcttatctgtgatggtggatatcatgaaaattatgcacagcccttttttttttttttttttatagctcatcagctactgttagtgtattttatgtgtggcccaagacaattcttcttcttccagtatggcccagggaaaccaaaagtttggacaccctgccagatttatcattgtggctaaattatttactcttacgttaaatctcaagtgagtaattacaggctgacttttcattaggacatatctggtttgctgggagggtcatgtgcattatttagatttcagtgcctgttgcacaggggtatgggactgggggatccttaagggtggagatcttactttccttttcccccagcaccagcgcagtggccgcccacgggctaacgatgtgagctgaatgaataggaggatgtgaaatagtttcagagctacctttctcccagctgcaattggcaaaggctttggaaccatccctcccctacagctgattggtggggtgaggagggatttggacttgatggcacagcaggatcaaatgggattcactctgccatgcttggggatagggcgagtccgtgagggtgaatttctgttatcacagggaactgtagcatctctcctctttggctctgtaggtggttccccattggaaatttcccgtatcaatgttttttaggaaaaagataatttaagactcttggctgggcacgttggctcaagcctgtaatcccagcactttgggaggtcgaggcaggtggatcacttgaagtcaggagttcaagaccagcctgaccaacatggtgaaaccccatctctactgaaaatacaaaaaaattagccaggcgtggtggtgggcgcctgtaatcccagctactggggaggctgaggcagagaattgcttgaactcgggaggcagaggttgcagtgagctgagatggcgccactgccctccagcctaggtgacagagtgagactctgtcttaaaaataaataaataaataaataaataaataaataaataaataaaataagccaggtgtggtggcacatgcctgtaatcccagctacttgggaggctgaggcaggagaatggcatgaacccgggaggcagagattgcagtgagctgagatcacaccactgcactccagcctgggcaacaagaacaaaactctgtcttaaaaaaaaaaaaaagactctatggatacataaaaggtacccaaggcatgtgtttactatccaaataatgatttgaagcgttgcctcaatagaaacagaagaaggaatacatgggcctagtcctcccctctctcgcctttcctcccaagcaagcagagtgacagagaagatgacatgtgtcccataacttgagctcagacagcaattcccctatcagatactggttcaggtttccatttagttgctcctaatcaacataagcaattgtcttctactctgtgggcctcggtttgcaaatctgtaaaatggggagggtgggggtgaactagatccttgctgcttaaagcatagtccaccaacaagcagcaacagcctcccctgggagcttgttagaaacacagaatcagaccctgccccagacctgccctatcagaatctgcatttgaacaagtcccctcccctacactgataggcataagaaagtgcacgctggaataggtgtcttatttcagctcctactgtctgtgagcctgaagctaaactgcaagttgttttatttttaggaattagaagcacagtttctggaagagagaccaggctttggagggcctctggggtttttggtctttgcagcaatgggagaggtctgggcaggtgtgttttcaaaaggtaaaagtaactcatgccagagaaacatgtttcttgcagcatcctgggatgccctgatctgcagaggcaaagggttttctaagtgcttctctccaaggatgcaggctggggtgccctgtccctggggtccccgcacagcagccccaaacatcctgtctaaggagactgtgctgatggcaagccctctgagaaagggctggcaggagggagctcagggctgctggaagttccccaggcttgggactcttcctgtgtttatctgtgatccagaggggtgcttggattgttctgtctcccatttccttcttctctctagggatactgtgtcaggaccaggtgaccagagagatgcatttttctgtcaggagagagctgggcctggggaggaacaagtggcagatggaggcggtggggcaggggggcggcgtgtttggctgccccttacctgacccaggagaggaggacagggctcttactgggcaatgtcagagaagggtttctgcatcacaatttgtcagggaagatttctgtcccatgggaacaagacctctgagctctgctttcctgtttctgtggtttctggtgtccacaaagatagacttttgggtccttagccagaaaaggatcttagtggaccctgtgcaggcaatccagtcctccaggagccacggcatggatttaagagtccatgaacaagaaacctaggtcacaaaggaagggggaaacatagaagcttctctgaccaccacaagaaagctggagggagattcttgcccaccttccccaagctcacccaggcttgatttcaagatcattattttgtctaccaggggcagagaaatggctcaaatcaagcatttactcttcccagtaagccttggtgagagataggcagggagtggtgttattgttcccattttacagaatgtgggttctggagccagaccacctgggttcaaatcctgactaagccacctactagttctgtaacccttggcagcacctcagcccccaccccagacctaccgaatcagaatctgcatttcttggcaagtttcctggggaaacaggtgcacgctgaagtttgagaagtgctggctgtataatctctcatattcctatcagcgcctacattctgagatcctgagattatactgcaaataatttaatccttagaagcacaacttctggaaaagaaaggcaggtttgaactttgtcacctacttcctgtgtgtccttgggcaagttagatactttgtgcctcagtttccccatccataaactagagataataatgatacctagctcagagtattgctttgagatagtaaattcgtcaatatatgaaaagtgcataaagcagtgcctcgcacctaacaggaccctggtagtgtttgcttcaattattactattatcattacaggtgagaaacctgtgagcctcagaaaagctaggtgatttactcgaggatgctgtgttagtttgctagggctgccataacaaagtagcacggactgggtgaattcaacaacagaaatgtatttactcatagttctggaggctagaagtctgagatcgaggtgtcaggagggttggcttcttctgaagcctctctccttggcttgaagcctctctccttggcttgaaggtggctgtcttctccctgtctcttcacatggtctctcctttgtgtctgcatcttagtctcctcttcttatgaggacaccagtcatattggattagggcccacccgtatgacctcattttaccttagttacctctttaaaggtcctgtctccaaatacagtcacattctgaggtgctgggggataggatttccacatatgaatttggggagtgcacaattcagcctgtaacagatatgtaaccattaagtgacatataagcataaacaaaactgtgcccaagagaattcacaagggtgtggttgattccaaagcctgccacctctcaacaggagaaaaactgacttatattctcatatgtcattttaagggaagtgtccagagtcattaggctcaaataaaatatttcccttgaactttgctaagtgaagcaaagagtgactgtctagattgtgctatcctgtcaatggtaccatctctttatcttcctttgcctaagaagatagcagcttgccatttgggagtatagttccttgtgtacttgcctctctttcctcttgccagtaagatactcgagaggcaggattcacatccgattcctctctgtacctcccaaagctcctactccagagaccagtgatatatatgagttgacatttttcaagttagtatatctcagttgaccctcacaacaatagctcatggttatcagtagtattattattcccatgttcacaatgagaaggcacagagagattgaatgggctgccagaggtcacacagctgatgagagccagagttggaattcaaacccagattttcaggtcccatctcccatctcttctttcatgccatggactgtccttgatatcaagagccctcatggcttgagcactgaccacgggtcacagtgtctcttttgattctcacagtgaccctggaatttacagtgcatcatcccagcgttacagacttttaaatggggtacaagtggccaggtggcaccctccatgtgagctgcatggctgggattgaagactctggagcccatgctcctggctaccccaccgtcctgctagtcactgagctgaaccttgcctaggtttgcctaaagcaagaatcacctcatgcagggtgggtagggacggggatggctgtccctctgctgtcttatcccaggaacttccaggtcaccctgcagatctcatctcgcctcctgccttacagcttaaactgaccctttctcttacctcctgctacctcttcttccaataatccctagaacagatcctagcttctgtagcctctctgggcagcaggaatcctcatccccatgaggttgaggatgccgtgggagtgccgttgctctgcagcctctcaggaggctcctgtaacacttggctcctcttcccctgtctccccttgctctgcaggtgacaagccctggactccggtgcggctgggcctggggctacctgaagggagagcagagactcaggtgcccggtgagcaatggcagtgaggagaagcagagagcaacgccagcaagcaacgcctcctgcccctgcttttgctcttgtgtctcttgaccctgtgaggtccagcaaccatggggactgagcagcagttggacttgggggcagccgagcttctggaaaattttagcttgttattgtgaagacttgtggaatatcccaaagtgctggctttcggaaaagggtgcctacattttcttctgcacaggctctgctgaaggagtttgctgcactcttgaaaggacaggcaagctcaggtcctcatggctcgatctctgagcaggcctctaacccagtgaggacagcggtcaaccagtctccagctaacagcttcctgcagagacttccagcattgttagctaacatgcactcttctgaggccttcaacagctggaaactgtttcaggactatcttgccagctaagaagcggaatcccagttcttgttgccaggaagcttttaatggccaatggagaatgctgtcctcccttggtgaaagaattcccaaggaaatttgggaatcttttaggattcacttcaatggaatgtttcttgggacatgtgtcttcaggcactggaagccactcacggacaagaaggcacggatgaccccttgctcagcaatgtgggattagcctctttgggcagggcaatctctctgcccccagtggcttagacagctggctctgagacatagcagaaggtctcacaaatgttaggaaaagggggttgagcattattcctccatgtggaattatttttgtatttatccagaaagtgactcttttttggtctttgaaatcatctgtgatataattagaagatgtcagagcttcaatgtccatgtcactaacctccccactcggtacctgggaagtctgaggtccacagaaggaaatgtcttaatgagggtcacccaacaagttagggcaggagggatgcccccgcccagcctgcctcccataccctgccacctccaaccttgctgtctgtcatcttcctttaccaaggaagggctcctctgaagccatgatgatttggggccctttggcagcagacagcaaactattcatacctttggtttttctaaactggtggagacctgagaccagggttctggcttttccatgaggaccataatatgctcctattcctgctgttcccttcttttctattgcaaggagcatgaaatggagcactcctcttctgggggccatgggaaaggagccattcccagatgccgtgatgcgtgacttcagcaatctggctgaagtgactagaatgggccctgttgttctcggcagagcaggcttgggtcaggcagggcggctgttaagaggacacggccggcattgattctgggagtatcgtttcctccctcccccggcctcccaagcacacctgtgtgggaggtaccaggcagagggcccagtgtgctcctttcagtccccttgcctgtcccacctcactgaactcgcacaaagagcttcactttgaaccgaaaggtcaggggtgaccagacttttcgctaagctggttcaaagggaggagcctgggccgggtgagatagattttggcccttttctcagtgtgggagagtatctgtttgttcctgggcacaactacagtcatattcagaggagaaattgcggagatggcatagaagccgaagctggccaccgccaaagcccgtctaagttctctatgtgtgctacagagggcttgcacaaagacatctctccaagcgacattatagcctgaaaaggaaatctcacatcttttcctttattaagttcctgtctgtaggtttacctagacagattcccatagtaaacttctatatgagtaaaaggaaacaaaaataacggtggcttaaataaaatcgaagtttaataaactagaagtttaattcaggcgggcatggtggctcacgcctgtaatcccaacactttgggatcacttgaggtcaggagtttgagaccaacctggccaacatggtgaaatgctgtccctactaaaaatacaaaaattagccaggtgtggtggtgcatgcctgcaatcccaactactggggaggctgaggcaggagaattgctggaacccaggaggtagaggttgcagtgagccgagctcccgccactacactctagcctggtgacagagcaagactctgtcttaataaaataaaataaaataataaaataaaatagcttaattctgtctcaataaaatgagtccatcatctagggctattttggttctacacagggtcagggcctaagttttctctctgcttgcattggcatcctcagtgcatgcatggctcctactatatggcccaagatagctgctgaaaatccagccatcacatcttctttccagctagcaggaaggagaagggagagaagaaagtctctctgtccttcctttaagggaatttcctggaattcaaacactacacttctgctatattggccagagctgaatttcaaggccacaactaatgcaagggagactgaggaatgtaatctttattctaggtagccatgtgcccagataaaaaccagggattctgttaccgaggaaggagaagaaaatgaatactggggacaattagctatctttgctacatcttcctcctagatagataagagggcttataacatgtgggcatctatatttatgtttccaatattattatccgggactggattagaagcatagactgataatgtaaaggttagaaatcagccagtccacaccctcattttaaaggttagaaaactgagatccagagagattaaacagatcatctgagatcacacagcgagttggtggaatctaattcccagctcatgttcagtgggagtatttttgttctgctctgtttcttaacttaagagaaaagcttcattctggaggggaaggagttttgagtgccaaggatgaaattccacccatcactcggtctctgagctgcaggacacaggcaggacaacggtaggattttcatgccccgatctgcctggccttgagttgtggcagctggggaagccactggtgaggacgctgcactggagtgtgggctggctgagtgtgcccattctgtcactgcctgtcccgtgtctgtgtgtgtgcatgtggctctgtttatctccatgtcggccctgtatactgattccagcctgccaaggctgcatgtctgactctgtgtgcttctctttcagggagcacactgccaggatgggagctgctgggaggcaggacttcctcttcaaggccatgctgaccatcagctggctcactctgacctgcttccctggggccacatccacaggtgagcactgcaaacagatggacctctgtatctcagcatggaaggcacggcccctcactggagcaaggctgcttttgggggagccaggagaaggagccgtgggagtgggtcagggtgcctgggccttggcccgaccttactaaactccttggtccccggcacgtttcgtcctgggcttcagtttcatcatccacaaaatgaaggggttggactagaatcagggattgcaaactcagcgcctacagaagccaggcccctgacacaaatgagtgaagctgaccaggtagcgactgtggtcaactggagaactgagacccttctaaagggaaacactgttctcacttctagccaatcgctactgcgggaaggtggatccccttttgcaggatctgaatttttaagagaagccagaaatctagagctttatgtaaaatctccctagtttgtaaatgttaccaatgaattcaaaatgtaaaaaccactctaataggctgttaaaaaaaaaaacaaaaacaaaaaaacacgtatctgagaaatatctttccaactctgtctggaccacctggtctcaatgctcccttcctgctttggtgtcataagatctgggtacattaaagtacttttcagctgtaatgctctaagccaggtttagatctatttttctatctcagcattgtcagctttttcttcaagtgattttcaattaacatctagaagtgtaaggtaagtttccctgggctacaggaaacactgatcagataatccaaacttgggacagaagacagtgacagacagggacaatttttaaatttcaaatgggggtttagtgctgcaatattatcatcaccattgattgctcttttgttaatgctatttttatgtccattgagtttgatgcttttctataagaataaagaatcttacattgaatttatattttgtttttctcaacccattgatagaagagaataattgataactagtgaaattccttcactgtgattttttgaagaatctttctgatccttaggggacatagcaagtagcattttttttttttttttttttttttttttttgagatagggtctcgctctgttgcctaagctggagtgcagtgatatgatcgtggttcactgcagcctctacctcccgggctcaaaagattctctcatctcagcctccctagtagctgggaccacagatgcacaccactatgcctggctatttttaaaatgttttagtaaagacagtgtcccactatgttgtccaggctagtctcaaactcctaggctcaagggatccttcagcctcggtctcccaaagtgctgggattacaggtgtgagccaccatgcccagccagtagtccttattttaaccctccaggcaataattggctatattacctgaatttattcatttgtctttctttcatttattcaattaacaaacacaaagcgagcattgactctgccaggaactgggtttgggtttatcttttagggtgacttatcctaaaagtgatccaccttggagaggtgccctcaggtacttcccttgattatttcttcccgcatcctggcacctctcttgctgtttgcctatcagctatgtggaaaggggctgagcctctggttccctctggcctgtgcttttctctgatgtcagagggatgtagaagccaacccttgctattcatgctccaagtaggtcgggcttgcactccctctcaatcccgcttctggtggcccctcctgggaaagtgagggtggtttccatggtgatagttcagcgaaagccctggccctcttcagacactttctgattcatacaaatgaaaagccactgacactggccttcaccgagaggaaaatgtccagctccaaaaaaaggagtgtccattcaaggccaatcttgcacctgctgtgctttagctgtggtgtcagagcttctggagagctgggatgtgtgctcacacaggtcagactgaccacctccaaatccagatgcaaagtctatgcaaactcctgcacttggagagtgaaaagaacagtcaggattgtcctggcagatgcggactacgaggctgcaaggctttgcccagtggagttgcaatggctccttcccagcatattcatggctccttgcctggaccactgggatcctcagttggccatatatgttccccgcgtggctgggaattcaccaccttggagcctgacactcttgtccaggacttgatggaaggcagcccagggcctctgactggcctctactggaatccagccaagcacctgaccctgtctggagataaaaccagcagtgggtttcacagcccagccctcatgaccatccttggctgctcagtatcaccgcagagagcccaccccaccactggcgactctgctcttacgttaaaatggaaagtccactgatgagcaagcccacgtcttcccacattttttccttttgttgccactgcttgagccccttgacatttacaatagctggaagagctactttggtgaaactccaaaaaatgtgaaattcttttcttgatgaaagagatccaaagcctgtgctagggctgacagcaaggcagagggagcctagaggagggttgttatggggctggaagcagggatgaggatgagacccagcaagcggacactaagtgcctgcactctgctttgcagagaagagaagggccagtagctgccttccaatgggcaaagaggacaactcagtgtgggtgtggggtctgtatctggtgctgctgagtgcagatgaagggggagcttccttccagttttccttgacatatataaatatgggacagacactcctactctggagatagctgaacaaaaatcaaggcgcatttagaactgacacgctcataattgcactgtattagtctgttttcatgctgctgataaagacatacccgcggctggataatttgtaaagagaaagaggtttaatggactcacagttccacatgactggggaggcctcacaatcatggtagaaggtgaaaggcacatcttacagggcagtggacaagaggaaatgagaacgaagtgaaaggcgattcccctgataaaaccatcagatttcctgagacgtattcaccaccatgagaacactatggagaaaaccacccccatgattcaattatatcccactgggtccctctcacaacacatgggaattgtgagagctacaattcaagatgagatttgggtgaggacacagccaaaccatagcatgcactgaagccagaatccctcccagggtttctttgctcaagagacaccttctttgctcaagagacacagcctctcctaggctcccttctgcagggcctgagctgtgagcttgcttccattccttccagtacctgccccagagtttctcatctgaaaccttgctctgccatgagcttacctgcacgtcaccttcccacctcctcacccccaacccgggttaatttgaaagctactgtttcatacttcgctcccttctggtcacagaaaaaaggagggcactggggcttgttcttggagccagttcattctcatcttgttttgtccattgtctcttcccacctgtttccctctggattttccatgctattgatggagattgttccagtttctgtgacagcgccagtcctcctcactcaagcccacctcaggacactgctgggtcaagccttgttagctatgtgaacattgagactctttcctgtgcttctgcagaggtcagggagaagtgcctctgcaatacccacccccggtctttttaggctcaactaaacattcacactggtgaccacatgtcacactggtcctcagactcctttggaaaatatagaataggaaacacagatgccatcagagcagcatcagcctcctctcttccatgggaatggtcctggcagccttccagacagccatctagaaactattctctttggttctctaggtgacagctcaggtgagaggaaatcagactgtaactggacaagtgtggagaccactgtgtcttagaagcctcatgccccactggagccagtagcaactccgtagatgtaactttcagggttcttgcaaaatgtcccattataagagtcactgcactcagggaagcctacagtgtgacatctccaccacgtatagatataaactatagttcctcccagtttagatgacattcaccaatcaggggtcactttgttataaacaatgttgctacgtaacaatttatataatactatctttctcaggtttccaggggaacagagctagaaaattaacaaaaggtctaattctcatgcagaaagggaaagagcttcattagctattcaaatgttgctttccagaagacagaatgtcctggaatctgagtagtctaggtaaatcattgcataacttcagagcttggaatgtcctgagaagccatctggtctacgctttatttattaaatggggaaactgaacccagaaaagggaagtgacttattcacagatatgtgatgaattcatgcaaaatatatgactggtccccatggttcctgcctcctatgtcaggaggtctctcagctctctaaggtcttgcttttagctctaacagagaggaggtaggggccttaaagatgcatgggagcccccttttggcctgtagcattcttgcttggtgaggctggtagatgggagcagtgacatctctctgtccttggcagtggctgctgggtgccctgaccagagccctgagttgcaaccctggaaccctggccatgaccaagaccaccatgtgcatatcggccagggcaagacactgctgctcacctcttctgccacggtctattccatccacatctcagagggaggtaagccaatctctctctgctgctccctcttccctccactgccccagagcttagcagataggatgcaggttgccatgagctcagatggacagaataaacatcacatgctttgggttcatgttggcatttggttgtctgagataaccatcagctctgagctgttaggaatggcttgtcggaggtccaatcttagtgaaaggagcacttatcgagaaaactccttattggtgtcttgagtaattctgtttatcttacttttagaggcctggtcattgaatgcagtacatgcagtgatggcatttgaccagacaggcattatttacacattgcaaagcagagagcatagaaaagtaattacagccagccatctatatctgtgggttctgctcgtgaattcaaccaattcgaggttgaaaatattccaaataatttgcacctgtaccgaacatgtacagatttttccttgtcattatttccttaaaatacagtttgacaactatttatacagtatttacattgaactaggtattataagcaatctagagatgatttcaagtatatgggaggatgtgcataggttagatgcaaatatgcaaatactatgccatttaatcagcgactggagcatccatggagtttggtatctgggaggtgctggaaccaattcccttcagatactgagggatgactttacttgtaagtacaccaagcataggaatgtttggaagatgtgcctttttgcctgccccggtgagatggggagtgcttagggagtctgcccttggctctgatataaccttacccttaacactgtgttattaaacctccccccaatgctacctcttcaggcaagctggtcattaaagaccacgacgagccgattgttttgcgaacccggcacatcctgattgacaacggaggagagctgcatgctgggagtgccctctgccctttccagggcaatttcaccatcattttgtatggaaggtgcgtagaccactcctacagatcaaatgctacccatggatctgacaagagggagactttccaagacagagagagaggcaagagggcaagcttgcctgtaagataggaatcattctgtcctgccagatggggatcatgaacaagacagacatggtgatttgggagagctgaagtccataaggcttgttatttatagtggcctggatgctgtacttgttttagagacgggcctgccagcctttcagccaccttccaatcatgtcatgttcagggaggctctgcaagtgtttatataataggctacgatggacaagatacaggaaaattccatgtggtacttgcccctggctgtgttccctctttaaacaattgagagtgctaagaagtgagagtcaggaatgcacaaggatatgcagcgcatgtccaggtgattccacatctgatatggacaaaaatacaaaacacttagaactgaatggaaaacatgccaacttgtgaactaataattggcacgtctgcttggccctgagggctttattttggtctggcttaggaagattgggttgctaatgtttttgttgttattgttgttgttgttttgagatggaatcttgctctgtggcccaggctggagtgcagtggcatgagctcagttcaccacaacctctgcctcctggtttaagcaattctggtgcctcagcttcccaaatagctgaaactacaggcatgttccaccacgcctggctgattcttgtatctttagtagagatggagtttcaccacgttggccaggctggtcttgaactcctgacctcaagtgatctgcctgtctcggcctctcaaagtgctgggattacaggcatgagccacaagcccagccgctagtgttatttttactgacctcaggtgataaaagtgtgactggctctatggtggccgtggtggggggtcagggagctgagctgtgactcctaggttccctctgggttcagtatccagtaaagagatgtgtcagccaactctggggagctgttttctcttgcagggctgatgaaggtattcagccggatccttactatggtctgaagtacattggggttggtaaaggaggcgctcttgagttgcatggacagaaaaagctctcctggacatttctgaacaagacccttcacccaggtggcatggcagaaggaggctatttttttgaaaggagctggggccaccgtggagttattgttcatgtcatcgaccccaaatcaggcacagtcatccattctgaccggtaaggtttgccttcacttaaacgtatactcattcattcaaagtacacttattgagtgtgctccctggccaggtgccgctctaggtgctgggagaacagcagtgaatgaaacagatgggaatccctgccttcaaggagttctgtccttccccaggcattggcctaatgatgctgaattgaagaggagcaagcatgcacacatatgtacatacaacgtagtttcagattgtgataattggtagtaagggggaaaaaagacagagtgagatgctagagtgtaactagggaagaccactttggatagggtggtcagggaaaggcagtgtaaggatgcaacatttgagctgagaaatgaagggtgaggatatgtcagggaaagagtgttcaagacagacagcaagtgcagaaggccggaggtatgaaagggcatgacattctcaaacgatggaaaggccaccagagttgtgggagcacagcgagtggcggaagagcagcatgcaatcacatgggagttacaaatgggggcgggacaggacctcggaggctgcggtaaggacgtgggttttcttctaagtgggatgcaaagtcactgaaagtctttaagaagagcatgatctgatttaaaagtaccttctggctgtagagaatggttttaattgtgaggcaaaagcaaagatggtgcagggggttaggaagcttctgctgtggtctaggcaagacatggcagtgatgaggacccagaaggaacggcggctagtggatgtacctgagagatgtttggaaggcagcatgggcaggtgtaagctggcagatgctgccaaggctggacctgccctgcagtcccaggagctctcatcctggccctttagagggaaggacagaggtggggtagacaaacagagacagagctaccctggggctgctggggaagggagacaggcattcctcaagaacagggcccgagctgtgggtgtcaccatgaaggcagcaggagccagctacggtcaggggcagggtgggcaggagctgaagtgcttgctggtgctcacagacacccaaccttgccggtaaacattagtacctataacagtcactggactttctccccgtaaaacactgttcatcactttacctgtcaaatatacttcaatcttcatcaaaattctgtgaggcaagttctgttattatctaccttgtagagatgaaagcactgaggctcacagggctaaatttactcagtcacaaggttggaaagtgttggagatgggattcaaacccaggtgtgcctgtatcgcctccacggataacggctgacaccttgattgacacaaagtatgtcagggagcccctgccttcacactagagaggatgtcctcttcaattgtgtgctgatctttttggtgctgtttcttaagtacaacagtgttacttgaagagatccaacttaaagtttatttactgacctgttagtgagaagtgatctggacagatgctgtagagatggcaaggacagaatgtctgcttgttccgaatatcttttgcttaaagtatatgttggagatctcaataatctgatagatgaatgtgtatgagtaaagataataagcgcatgcacacacatacacacacacacacacacacacacatacacacacacaagtaaatgcaggcaaaagtcatctgagaaggttacttagagaagcaggaacttaggtcagcttttgaaaggtagtaggtgcttgatcaggtacagaaaaggtgggaaggaatgatgaagacaggagtgggcgggtgaggtggtcactgggcactgagaagcactaggcttgcagcaggagcttcctggggagggtcagtggagggtgcgaggttaggtggggctggaccagattgtgccaacagttggaaacaagtgtgaggacccaggagcagctatccagctaccaccggtaccaacattgtttttcttttccaaaaacctccttagattactttcccagattcattttagaactattttccttaagttccaagacatactctttaggaatttctactgtaattgcataaaatctttatccttacatggggaagagttggaatcattacaaaattgtgtctttgctttgtaaattattctcaccaggggtatagattttgtgtgtgtgatttgtatttcatggatattttacgtgtatgagggcaggttatcagtcaatttggagattattagttcttgctattataagagatctgctgtctaacattgcaaaatactggatagtacacttaaaattttaagagggtagatctcaaggtaagtgttcttaccacaataaagtaaaataatttttaaaaaataaacaggagaaaatagcaatgcaacaacatttacaatactcaaatgttatatgactgctactgtgtgaatcagagattacattttaatgattctaagatgcattatcataagaatcattaacaggtcaataaataaactttaagttggatctctgcaagtaactctgtgcaagctgctctaggggtgggagaagggatttgggatagtctccatgtcatttccaagaattctgggattggtgttttactcggatcagagatataaattcctaatgccctagctatctgaactatctcctaaagtcaggctcttccaagaggcatgatcctctgcctccaggatgaaaggggaacatcaaaaggcctagacctcaagtatgtgacccactcaacatcctggagcttgaagtcttcactgctgcaatcatttctttggcattttactcagcgaatgaacattatggtcaagtcaaaacccttcttcttggatatcactgtatggtatgcaaaataatgaaacttgtttgctctttaaagaaaaggcttccttctttaagaatcacagccctgggatcatcggatagcatgttagctgtcgcagcacaggcatgtgcttagagctctttgttttggctgcggtcaagactattcagatctcttctctctgccctttttaggtttgacacctatagatccaagaaagagagtgaacgtctggtccagtatttgaacgcggtgcccgatggcaggatcctttctgttgcagtgaatgatgaaggttctcgaaatctggatgacatggccaggaaggcgatgaccaaattgggaagcaaacacttcctgcaccttggatttaggtactgcccctcacttcggcttccactgggctctggaacattgaagccactctatcccactgagaatttacctttcccatctcctctccccacagccgtaccatcctaaatgacctagtggatgcaggcatttgcatttgacatctgagtttggcatatttgggaattgttcttaaagaatgcttgttttttcttacaagcatagttcactcaaaacaaacaaaagctcgctgtttatatgaactcattcattcagtcggccacttacaaaatattaagtgagcatctactgtgtgtaagagccatgcctccaatgcacagctaatattcattttctctttctttggtaaagaggtcatgtcatggcttggggtttttcagagattatgtgaagtgtctctgctgaggcaaatgaccaaggagaagcaaccctttgacatgatctaatatgtgttttgtttgccttggagtgcagcatcatgcctgacattggcatgcacacacattgacactaagaggaagctgtttgccccacagtaaacaatgccttttttaaaaatttaatttaatttaaagttccaggatacatatgcaggacgtgcttgtttgttacctaggtaaacgtgtgccgcgatggtttgctgcacctatcaacctatcaccccggtattaagcccagcatccactagctatttgtcctgatcctctccctccctctgcccctcgcccctgccaagccccagtgtgtgttgttcccctccctgtgtccatggtaagcacacctttttatcatgttgaatcaaatctcagctcagtggaaagttgaggttatctgtcccatggctgtttagagattacgatgctcctcccttcagcttcccacatctgggagcaagatcagagggaagccagagacttttctgggcttggagcaaagcaattttgctggctgggcagaaattccctgggcaagggaggggtgctccaggttccagagtgcattttccgacagcccagagactacttcttctggacgggaaactcaagcaggaaacttaagcagccaaagatgacaatgacaccttggcattgcaagcctcctttgttagcaaacactaagtgcacttccattctgttgttttataaaccaaaaggccagtttattaatttacagtgagagttagaaacaccaggaaactgactatttacggcctcagcagaagaagaaagtggctaagggcccaagatctggcatccagtggcctgagtttgagtctgggttgcaccttccaggaggtgtgactgcaggcaagtgactcattctctttgcctggtcctgcatctgtaaaatgggatatacgaggagctatctcaaaggactataggacaattaaatgtgataatatgaacaaaatatttgtcatcatgtctggcacagaataagcactccataaatgttagcaactattttctccttataagcaagagccactggaaaggtgggcactcgccgtcttttgccagggctgttcacatgggcaaaggagatacataggtgggaattacacgtccacacctcatttgtatagagacattctttgagtgataaacttgaagcatctaaaatcagtaggagaactgagacttggacccttcatttgttcacccattcaggaaatgaacacatactggtgggaggtactcggttagaccaggtgtcctgaactcttgggggaaggcaggtatgaatggaaattggtgacggggcatgagagagcaagagagtgggcaagtgtagtttagtgcagacgaacacatgaggatgaggccaagctggttcccatagagagatcagcagcttcggaggcccaggggcaaaagcatgcctctcccaaagaaggtggggatggcgaggcagtggcagtatatgagagaggcaaggggtgagaggtgaggctggaggggggcgggggcaaaggaccttcgaatctgtgccaaggagcttggattttatccaaagggcaatggggagctactgaaggatttaagcaggaaagtggacagttaaatccccaacctcagttaaacaccgttcaatagtgattcattttccaagacaagagatcaaaacaagaataatgagagctattcagcaccaaaatcgattgatagcttatagtaagagagggctactgtagggggggaaaatctctttccttctactcttctaagttcttgactggagcacctgcaacaaatcactgattaacaggagaaaagcacacaaatgtatttcagatagtaagttttaaacgacatgggagccttcataaggaaacgaggacccaaatacacagttaaacctgagtgtctgtacacgaggtttgatgaagtggagagctgtgggaaaatgtggtaggacaaggggcttgagttaaacacagtaaacaggggaaatttagcaaggtctctgttccttcagattcctcttggcttccttctgtgtttggggataaggatgctctttttctcagaataaggaaggccctctcacataagggtcttagacctgcttcaggggaaagtcagaaactccttcctgccatttcacaaattccttgagcttgaaatattcaatatgccaagttgccattttggggggtagcgtctcctgaacttcattactgcattaggcattacgcaaaatgcctaaaacaaaatggggtaagaaaaccttgctgccctaaagcagcacgtgctttcatggaggaatgatggatgtacaatttttcaaaaccttaagcctttttttgcttccctccccattaagaagaagagagatttctctcctttccacggcccaaggcagatggctagggcagtcagtcatgttagcctctggtattttcctcgagctcaactctaggggagctgagcatgagagaaataacctttctctcttggaacatgttttcctgaaggtatccaagcatttgcttcaggacataattgagcctggcgggtggtatagtaggtctgttggcttgtttgtttatttgtgattcatgctcccatcttctgccagaatggagctgaagaggctcacagggagcaaacatcaggcaggccagggagcgagaaagcccagaggagtgcttgcaaagaaaggtgcttcttctggagaagagaagcccagcaagtgaatgaatttcccccaaacagcagggagggaccctccttcacctgacgctgcttcaactctgccccatccccccacactctgtgcaggtacagactcgtgcagaactttactttttgttatgtttttctttttttcagacacccttggagttttctaactgtgaaaggaaatccatcatcttcagtggaagaccatattgaatatcatggtaatacatagctggctggaggcctgattccctccagtgtctctctgatcaagaggtgcagggcttttctgaacatctcacttttctcagagcatggcttcccagctcccaatgtctagatgagtgagcagccgcttaactggccaccttacatggaagtggcaaaggccaatgctggccaaaggcccatcacttgcagtaatatttcccttttcatggaaatcttcactgacttaatcaaaaacctagaattggcatagaaaagataagaactgagatagagccagcaggggtggtattttaagagctaaaacgaggctgggtgtggtggctcacgcttgtaatcccagcattttgggaggccgaggcgggtggatcacttgaggtcaggagttcgaaaccaccctggccaatatggtaaaaccgtgtctctactaaaattacaaaaaaaaaaagaattagccaggcatggtggtgggcacctgtagtcccagctacttgggaggagattgcaccactgcactccagcctgagcaacagagaccccgtctcaaaaaaatttaaaaaaaaagagctaaagcgacactttagatgggccttcaggacacagtagtagcctcctttgcccagcaaaggctgcgggaagcgctgcagttctaatgccaaggaggaattcagaccgtgagacatgctagagctctgcaatctgaatttgttgggaggctggaactaaactttcaaaactgaaacaaaagaatggatgatcatctcttcccaagtgaatgaatgtcctaattttcttttatttacttaaaaaatatttttaaagaaatgagtcaatgcccatgtgcgtaggggggtttccttgccttggagtcacaactttttgaatttgggggtctgtccagctcctaaagggtctcgtttctctgacaggacatcgaggctctgctgctgcccgggtattcaaattgttccagacagagcatggcgaatatttcaatgtttctttgtccagtgagtgggttcaaggtgaggagtttcagacaatttggtgacacctaacagtgggatagaagaccagaaatcactgtctttgcagaactaggatttatctcttataccagtaggaccactttaatttttgcagaatcaactaaaaatgtgcaaccaaaagttgtctttaattagacaagccactttagcccatagcccagaaggatgttctcctctggctaagatttcaatttcacctcagtcagggtctgcggcattcagcttagttcacggaatatctttgatgtggcaggcaatggcactgaacaggaaatgcagataggaatagaacctgccctccaaatagcccacatgcagggattgcagaaagcagcaatcctagttgcagtccttggataacgggtttacagatggattttctttcttttctctttaatttgcttttgcaataacaaagaatataaattgcttttataaaagtaagaaactcattaagagaaactcattttttaattaaaacatgggagcataggcagattgattagagccatccatgccccagcctggtgcaaccatggacagataatattcagttcccatggtgctgaggatgcttggagacaacactgagtgtgacttgccctcacagacaacctcctgtctgactgtgctgtttgctttctgcctagacgtggagtggacggagtggttcgatcatgataaagtatctcagactaaaggtggggagaaaatttcagacctctggaaagctcacccaggaaaaatatgcaatcgtcccattgatatacaggtaccaaactcacagcaaaaatagaaaatagaaatgtgttgttttgaagaagactctatagatcacagacattcttgtcacttgggtgctgtgattctcgttgccctcctgtgaggtaggtcagccaaagagtaccattcccactttagagactgaagcagaggcttactatctgcccaaaagccagggctcagattctctcctgggtccagcttctgagttccttctctttaacttgcttcttcagccatgactgagtgtgcccccaccacagggatgggtttggactccccagcctcacttccccgtcaatttccttagggaccttgagtgcacaggatgcagctaggatttggggtgcaggccaggccagcccagatggagaacacacgcatggccttgttctcaattgagctaaatcaaagccagcattcatagaatggacagtgtttgctcaaaatcttcacttagagttaattccatctgaaggggaccttgatgttctcagttggctccatcaagaaagtgttgagtaaatatacaggcctcaccagctgagccagtgggatactaggctttgggaacaacaggagagacaggagaaataggcaaagtaaatgagatttatctccttatgcccagtctcattccaagacaagatttgaggctgcttaaatgcttgatagagaattagaagtcatttgagctgggctcagtggatcatgcctgtaatcccagcactttgggaggccaaggtgggcagatcacttgaggtcaggagttagagaccagcctggccagtatggtgaaaccccctctcgactaaaaatacaaaaaaaaaaaaaaaattagcttggtgtggtggcgggtgcctgtagtcccagctactcagggtctgaggcaggagaattgcgtaaacaggaggtggaggttgtggtgagctgagatcgcaccactgtactccagcctgggtgaccgagcaagactctgactcaaaaaaaaaaacaaaaaaaaaccaggcatttgagaaaggccatctccacccattttatcctccttcagccaataaaaatagctaccccatttgtacaacactttttcctagaatatcaaagctcgggtcccaggtcagctcgagtcccaggccatctgtctgtgctttcaccccgccacaccatcctgggcagaacttctaccctctgtcttgccttgtaagaaggaccacttatccaagggaggagcctctgttctgcacttagcaaagtctgaggaaaactttctcattatttggctgagactcttcccttcacatggcttcagtgttattgagaaggatttacccagattaagtttcaagttgcagattctccttgggtccaacagaatcaaaaagcactgatcccccacagcacattctttccagatttaattttaattttctctcataaccttgaatgttccagctttaattctgaaatagccataatcttatccctccagttcacttgaccacaggaagtctagctctttaccaacctcccctctccaaatacttctggaaatgctcaaggaatgcttacatggtctacaaatctttcctggtgtttgctctgccagttttctggctccagacactgttgattggaagaccacctctcagtgccaggaaaacagcattccttagacattccccactcttgcatttactttgctcccagcacagacacaggcccttcctagagtgtcccaaaacacaattaaacccaggctgagagctccataagccaagaccttcatagggacccaaccctacactctataactgttagtctgttgccatattgcaagacctagttttcttctaacaaaaagagttcccttggcaatacattccccaaattcaagttctccattatttgaggttcagagaacagaagattcaacagcagtgtggtccccttactcagaagcttagggaagtcttcccacaatgaaagcattcagaactcccaattccataataagacctttggctttttcttggcaaaaccaaggtctattgagatggtcatctaaaagataagagtcatgtgcctccaagggtgaattcaaacctccatctctaccgaagagaaggtgttgccacgctggagagatcaggcttactcctaattctcgccaccaatctttaatcaatggtcatctccagacttagctagagcatctcttcatgctcatcaaaggtaaaaatggtgatgtagaatatgctcctggatgtttccaaggccagaaaaacaaagccagtctttcctatgctcacaagaggtgagagaagcaggatttccccatttttagcaggtgacaaatgcatcagccaaaagttaaatgtcctagttaattaacccagggagagactaaaatgaaacacaactccccacatgctcatttttgccactattgcaaaaatgcagtttttctctggtcacctggtgcctctcacctccccgggccctgagcttttacgtgctcctcttcctgcttgtgcctgcccccagtgcccaactccgtgtcatacacagtgggtcccggcatacctgccatgcactgacatagccagatcctctgggccagggagtgtcaaggacatttgcaacctaggcaagattggaggaggcaggttgggaagaaagaggaagcagcaagactgcacagttgaccttaagaaaagcttttccaagatctgatattttgtgattctgaaaaaaattataataacaaaaacacactgtttctatgtcttgcccttcgttcagctctccttggctgaaaaatcctcttgcctcccaccttctctcttaaaacccagccacccttcaaggccagtgggatctactggactgagatttccttggggacatcaggcagtctgtgtgttccccacagcagctggtgcagtggctagaggtcggcctgatggtaacaaaaacatattctgaagccagagagatcacagctctaccacttgtgagctttggcatatcagcaagtgaggtgcccacggtgcaaaatttaaggcagcccgctccctccagcgccaactctgcacttgcatgaccctaagagtgggtgctgccttaaattttgtgccctgggtacctcactcacagtcttgttacttagtgtctcgtttcctcacagcaaaaatagggataataattatttcctcatgggcatgttttgtggattcagtgcaatgaagtgtgcagactgaaaagtggcccatacattttttattatttaaaattaatttattggctggactggtggcccacgccggtaatcccagcactttgggaggccaaagtgggtggatcaattgaagttaggagttcgagaccagcctggccaagctgatgaaaccctatctctactaaaaatacaaaaattagctgggtgtggtggcgggcacctgtaatcccagctactcgggaggctgaggcagaagaatcgcttgaacaggtggaggttgcagtgagctgaggtggcgccattgtactccagcctgggcaagagagtgaggctctgtctcaaaataaataaataaatgaaatgaaatgaaatgaaataaaataaaataaatttactattagttattatattgataattattttgttaatacttattattaccaagaataataataaactcaagtctacttaaagatctctttctctgaatgatgatggattccttttactcttcttatccaaaactgaggtcatttttcaggttagaaaaaaggaaaaaaagaaaaaacagcagaattgagtagatgttctcctggaattattgttggatgttatacctggaaaaaatctccagcccccttcgataatgttttcaggctcagttctcaatcttacggggtctccaattgaagaacatgctaccctcaggggaaaacttcaggaggcccgaggagctgggcttaccttaactgaccttgagcttacatctgaacccctctgagcatcagcgttgacctccgtctaaaagcaagtttgcaacccctgcctctctggctgctgcagagaccacctgagatagggggtgtgagtgtgtttttgcaggaaatgactgagttttaattgtggctgaactcacatccacatggctcttcttccaagccaaagataacggagctgctgggtttaaaacaatgtttcctaaaaagtctcctctttttttttttttttgactggctatactttccttccttattaccccagtctggtccctttggtctctatgccaaagatgacagcagctgcagcccttgctctaaattgcatgtctttgaatgatagtcatggtcaggatgcagacacaccctggctctgggatgggccccagctggcagggatcatgccctccctggaggcctgctccctaaattctccacctggccttgtagctgctcaccagccagccctcatccactgagacctcactctgtgccaggccctgggctgaatgctggggacaagggggcaaaaaccagctccttgcccacccagagcccaccatgcggtgggaggaggcagacatttgaacaaaagacattaggcggcttccaccttagggcaagagtggatggggcttagaagtgttgtgatgtagttacataagtctgggttcaagttttagctctgccacctactggctttgtgatcctgggtaagtaactgaacctctctgaggatgagtttccttatctgtaaaactaacagcagcctcatagttttgctatgaagatgaaatgagataatataggtaaacatctagctttagtggttctcaaactttcttgcccattagaatcacctggacaacttttcaaagtccagatgtccatgctgcaccccagacacaatcaaatctgaggctccgaggatggggactgggcatgagtattttttaaagactcctccccatgggatgcagaaccatgtttggactgttggccgctgttcatggtgctggtagtggtggtgcaaattgtaaaaagtggccagcccagatcctagaagagtggctacttattgtaaatgctccgtaaaatgttcacccagccataagcagtagatcactggtttcgatactgagtactgtaggacctcaggccaggcatttatctattccaagactttaggctgtctttctcataacaaaactgatgggggcaatcattgggataatcatctcgggccgttgtaaatagtgttgcagcagggacaattttagacttctgagtatatgtttagaacattaatcagcaccttccttctctataaaaaaaaaacgactttgctctgtaatttctgtgtcattcccaggccactacaatggatggagttaacctcagcaccgaggttgtctacaaaaaaggccaggattataggtttgcttgctacgaccggggcagagcctgccggagctaccgtgtacggttcctctgtgggaagcctggtaagcagccccttgtcggggacacagatgcaactatggctcggttccttgaactggcagctatgcaggcaacttccagacctctcagtgagacagtgctcccaaaggagagcacttttgtgacacgggagcagtgggaggatccttggagttggcaggagacagcagaaccccaccctgcccataagcctttcaggaaggggaagggcctggtccaaggcagtcaaggtacaaatggacagagctgccctcccctgcagagatgtgcagttctttgcctctttgggtgctattattttaaatccagtacctaaggtgcttgttagaagagattggaaatggtcgggttgttctcggaggcacttggccatctccagaaggcagtcattaggaatgaaagtttagggggagaagtttatggctaccgaaaataatagttgagaggaactatatttgttttacatcttgagcaaagtgggtggggtgaggcagccacatttaactccagctaagaagttagtggaaaattcccccgcccagagctaatgaatggctcttttctggtagggtttttgttgacttcaaaaacctttaccaagagtgggatggagcaagccagtgatctgggttttggataggcaaacctggcatttagttatttagggaggggaagggaaaaaagaggtagccaaaagtttgccaagagcaaagggctctatctcagtctttcctgttttgggttacagtgaggcccaaactcacagtcaccattgacaccaatgtgaacagcaccattctgaacttggaggataatgtacagtcatggaaacctggagataccctggtcattgccagtactgattactccatgtaccaggcagaagagttccaggtgcttccctgcagatcctgcgcccccaaccaggtcaaagtggcaggtaggacttttactaatcccttcctagactggatgaatctgaaaattgttaggcttaaagtaaactgaagttacaacaaatctgtatcagtcagctatggctgtaataatgctgcataacaaaaaaaatcttaaaacttcatgacaggtctttatttcttactcatgtatctgcaggttgtctagggatcagcttctctagactgagcctgactccaggctgagagttgggttcaagtcacttccatatgactcccattcttcccaaaacatattcttctcacgggggagattgcaaactcctagtggtgagcagaaacacagaactcttaaggcctaggctcaaagatggcacattctcacacattccattggctaaagtaagtcacatggtaaagcacaacacaaataggctagggaagcatatgtctgtcaccaagtttgagggggaggaagtgaatatttgttagacagttattcaatctactacaaaatttttaatctcttgtatctgtgagtttggggtttttctttttcttctcctaaatcttgatttagatgtcctgtaatttatgttattggaggttactggaatcacagattgttgaaggtaaaaagagacttcaaatataatccaggtcaattattcttagtagggggagttatgtatcaattagagttctttggctgttagcaacagaatccaacttgactatcttaagcaaaacaggaatttattgagaggctattcaacttggagaactaaaggataagctgaataactaacctccaaaaggacagggaacagggtagcttctgggatctgggtagcaggaactaatggactgtatccttaaggcatcatctttaagaaccatgcttaggccatgggacatagtgctcaaaagtcaccttccagggagagagcatctgcttgggctggtggcttgtgtgctcaccctttggctaggaaaggcaggaacagtcattgaaagttcttctaagactgcattaaatggataaatggctgttccgcaaaggaaaattgggatatattaccagaagaaaggggaatcagaacttaagaggtgttaaacgtatcacatgctacaggaccataccacctggaggagtattagaatatggggttgggagaaagaccatggattgagaaagcgtatccaatatactcaccatatctattattttggaaagaaacccacagaacataaaattcaacacaatctttttggctgcctgagatgtgcttgtggaagaatctgtggaggcaaagtttaaaaaatctgagaacactgatggaattcagtccccttatcttaacactcatgggggaggcggacctagaggtcatgtggtggaggcagtccacaaacaatgcagctgtgatgtcagggtgcccaccttacacctcagaccctgaaaaagaaggcttacgtgttttggagggagatggtaatttggtgagtgtagctaaagagagggaaagaagcagcagcttgtgggtagaggccaagatgactagacatttgttccttgacaaagtaacagagtctgcttttttaattgacaatgtttgaacccctacattatttgcaaaaggtttcagggtatcttaccataaacacaagtccaagtaaatctggcaatgagggtaaaaaagatggaaggagaataaattcagcaaaagcagagggggaggtgaccgagattagcagaagagcagaagatactaaaatagacaataaactttatctctaagctacctggaagccagagcaaagaaagaaacctcacaaattacttaactatcattatccactgaaaggaaggcaacaaggagcccagaagaccaagagggacaactttctcagctgtgagccactgaggaattttccacaggggttttcatatgaaagatattcacaacaatgtgagcagcaatgctgggagcagttttatgcaaagatgctctgtgtggggctatttgcagtttgactcctaatagtagatggggacatgctgttggtcacattctatgaagacgttttgaagaagacatttttggtttgggttttgtttggcagaggcagaatagaataaagaacatgggctttggaacaagacacctggaatttgggttccaggaatgccagttatttgctgtatgaccttagacaattacgtaatctttctttatgtcagcttcctcatctgtaaatggagataatgattgtggctatttcatgggattgttgtgaggattaaaggagtttgtatatgtgaggcacttacaatattgcctagcacacagtaagtgcttaatgaatgttagctcttattattaccattaggtgcaataatttagcagctatgcttaaagatgggaaaggaggaaggggtgtggctaacagcaatttataccaattctgctcctttgggacatgcaggtagagggtgttgtagtgagagggaaacaaactatttctatcattattattattgttattgctttatagagacagagcctcactatgttgcccaggctgttcttgaaatcctgggcttaagcgatcctccctcctcagccctcccaaagtgccaggattacaagcataagccaccacacccggctatcatcattattaatgaacataggtctgtcataggcctgcagctatttctctgcatgtctccagtgcctcaaggtgtggatgccatctctgtcagtgtgcatgttgcacacttcccccacccttaggctgggcaggtggccttgccccacctttcctccacagggaggtgggcaggagcatttcatcatgtattcaacaagccattagaaagcacatacaggccgggcgcggtggctcacgtctgtaattccaggactttgggatgctgaggcagatggatcacaaggtcaagagttcgagaccagcctggccaacatgatgaaaccccgtctctactaaaaatacaaaaattagccgggtgtagtggcgcgtgcctgtaatcccagctactcaggaggctgaggcaggagaatcacttgaacctgggaggcggaggttgcagtgagccaagatcatgccactgcactccagcctgggtgacagagtaatactctgtctcaaaaaaaaaaaaaaaagaaagaaagagagaaagaaaacacatacaatgtgccaggcaatgtgccaggcttgtatatgccatggtgagcaagatagatgcattccctgtcctcagggagcctgcagtccagcagtgaagatagatatccaccaaagtattgttccaatcaaaatagaattccaatatagaatgatgacaactgctatcaaagtggaatatgggaggtgctgggagtatagaaaagggagatttggcaaagacagatgggcatgtgagtcttcccagaggaatgagtgactgagctgagacagaatagaagctacctagggagaagtactgccacaggggaacataaagttgaggggtgcatgaggcgttccagctaccaagaggccggagtagctgaagtagagaatgggagggctgcatggggctcgagagagagggaggggccatggtgcagttaagggctttattctgagtgcacagggaagtcattgaagggcagaagcctactggatatcccctggcagggaaagaccgtctagatttgtgtttataggagggagccaagaaaagcaagttcctaatgattgttaaacccttgggtcttcactgaatgactatgtgtcacccagggacaattgtgaagaagcctctgggaggtcagatgtccccctggactcttggcaggagtggcattcagaccatctgagctgatgtcactgctcactataagatgatccatgggcctggggtagcatttggactatttaggagggtgaaagcctgaccgtgagcccttgcctgcatggaggtgggagggcatgccagggagaggtgctcggggtttcttgagaccagtccccatctgcaccccagggtgggtcaccccaaggcctgcacgggagttctcactttgagcaggtcctgacaaggcagctgtggtgccgagggtggccctgagaatggagaaccttgtgtgcgtcagagcatttctgcctcagcctacagtggggttggggtgtccatgcaggagagctgctcttcttgatcacgtttgactgcctgggtcagctgcttctggaggtccctgaaggctggacagaatgcaggggggcagctccaggccccgagtaccaagcgggagaggataagtggagaagatcctgcgcccacctcaacgccctccactttccttggggttagcactgcctgtgcttgtttccgcgttagccccaccccagcctacctccctccctgaaggacattcggctcggagcagccacctcctttgccctgccgaggagctgtgaggcccccatgaaaacagcagcccctggtgaacagcaccagaaaagccccaggtaggggtgtgtgtgtgtgtgtgtgtgtgtgtgtgtgtgtgtgtgtgtgtgtgtgtgtgtgtgtgtgtgtctgtgtgtgtgtctgtgtgtgtgtgtgtattttgtgtgtgtattttgtgtctgtctgttctggagaggctcacattcctcctattcatccccaagcccattctctggctctccatctccctgttgacaggatcaaggattccacctgcttctcccttttctgtgagccccacccacccacctagggacacagctatctcttaggcttctcttccccaggctggctgcagacacggacacgatctccctgggtccttcttcctcattgctcccagatttcattctacaggactgtttgcatttcccttaaggcctttctgatgggaaacagatgggggtaacatagtaatgaaaatgcatgaatcatctaaaaaaaaatttcaaaattttgtcaaccacagtatgattaccaacacctcacagtgtggcagttggaactcccctcccttgattttccaccctgttgtctttaccacctccccactttgcccataaacaccccccacatctttaaagaatgccactattagctagaattaacatgaatttcgttttctgtgatattccaagtacttcacataaaccatcttgttcactcttcacaacaacctaatacagtaggggctactgttttcttcatgacacaaatgaggaaactgaggctcatggaaattaaatatctagacatttaatttccaatatggtggccacgagccacatgtggctacttaagtctaaattggattacattacgttaaaaattctattcctggccaggcgtggtggcttacgcttgtaatcccaacactttgggaggctgaggtgggtggatcacctgaggtcaggagttcgagaccagcctggccaacatagtgaaaccccgtctctactaaaaatacaaaaattaaccgggtgtggtggcaggcacctgtaatcccagctactcgggaggctgcagcaggagaatcgcttgaaccttggaggtggaggttgcagtgagccgagatcgcaccattgcactccagcctgggggacaagagtgagactttgtctcaaaaaaaaaaaaaaaattgattcctcagtcacagcagccaggtttcgtgtgtccagtagccaccggtgactagtggctaccatactggacaacgcagaatagagcatttccttcatcacaggaagttctagtgggcggcactgatgtaggtcaagcaagtcaacagctgagccaggatttcaactcagcttcattctccctcagtgaaggcccttgttcccaaagtctccacctgaagatgactgtgaggaacctgggtttaagtttgctttctggggccctccagcttaagtccctctgggcttgtcctcatacccgatctgagaaggtcaggccccatctccctctccaccagactcactgagtcctgctaggtctgagctacatgtgcacactctggctccctccattggaaggtctttgatgttttttcttctcttgaccctggggtacctagcaccctgtgtactctctagagagggatctgggggttgtggaagcaggacacctgcagagtaaagactagggaagggtgacatctgcagccctgtgtagggcaactgtgcagagcccctctgcttcccaggcctcctccccgctcacccaggtgctcatggctcttctggattatttgagacaaggctagtttggccacatctgcttttccctggttgggcttcacgtatcagtactttgaggaggaagggaggagtggatgctggtgggagaattctgaggcaggatggggtgcgggggagtcaggcacacactgtccctcatctctcggatagcagcctgggagtggccagtgaaggcggcagcaggacagataaggtggctgccgcagctaacagccatggccaggtcttgtaaaaggttctgataggaagctctgcagccgggaagacggctgtgggactgaaatattcttgcagctctcaatctgacttatatttccttggctgacgggagtctgataaacacagtgcctccacctacctgacagtcactcctacaccctgcccaacttctcctacggaacaaagaaagatgccaaatttgctatctaccaactcccattattataggtgtgaagccagtggtgggagccttggggatggtgctagtgacagctgcaggtgtcatttctgttacactagcctcctaccatatgccaggggcttaatttctaagcacagcccatggattaactcatttaacaatcacagccaacttttgaggtatgtgctattattatctccattttatagatgaagagcctgaggttccaggagcttaaatatgctcagggactcacagctgtgagctgagttggaatctgaccctcacagcctggctccagagtcacaatcctccccatcacattatcttacctctgcagccacgttcaagaccagatccctgaggaaggtcctctggccacctacaagagcagaagcctctagtcagtgtccttcctggacaccatattttaaggtggatgctggcaagttgagagaagcacccagagcaccaggatgcacgtgctgtaagggatggttggaagacgaaggatgaatgtcctggaggcggggaggctcggcctggtttcctggctctgctgagcactgcaggaactcccagaaggaaagactaacattgagtgtggtcagggaggacatcactgagaaggaggaactggagctaagtgggacaaagtggagaaagcttgctgcaggtagagggagatacacgcatggaagctctgagatgtaaaatagcaaaggcatgttcaaggaaggatgatggtctggtctggccagaacagaagagggtatgtgggagtgatgagatgaacccacaggagttggagtttcactgtgtcaaccccttagactggtaaacggggagctgagttttgcatggagacctctttgccatcccctgcctggcaagactgagcctgttgctctctgtgcctgttccctcaacatgctcaaccctttggggagtttgggaagtctgattcctttccttggtgaagtttgctgtgtgctctcaggatccactcagaagccagtgcaaagctctgtttcagaaagattctgccccccacacctgggaaggccccgtaactgaagaccacagagctgatggatgggagatgagtcacggatggaaggaaaggtttttctgtgggtggccggaaggagccctgcttctggatcttagaactgtaaagacacatggctctgtggcccaaatgagaagccatgttcagtgggctgccctggaggagggggctccagcattctgcagagttaactcatttcatatcatttcccctggttggtgtcagaaccctggatgaaaccaaaggcctgacagcttccacgtgtggtgtccactcctgacccctttggcagggcacagagctttttggcatctgcatatcagggagtaagagtccattgcagtaaatgaaatctttctaagattattattacttaaagtctgatacttgtttaaagaaggattctgtgctgggtgtggtggcacccacctgtagtcccagcattttgggatccccaggcaggaggattttttgagcccaggagttcgagactacagtgagctgtgatcacaccactgcattccagcctgggtgacagggcaagacccaacccagtatctgaaaaagaaggaggactctgtgatagatggaataatgacccctaaatatattcatgtcctgatcttcagtacccatgaatgttagcttatgtgacaaaagggactttgcagatgtggtaaattaaggttctggagatgggagattatcttggattatctgggtgggccaaatgtgatcacaagggtccttaaaagagggacacaggaaggtcagagtcagaagaaagtgacgtgatgacaggggcagcgactggagtgatgcacgttaaagatggcggaaggggtcatgagccaaggaacacaggcagccactcaaatctgaaaagggcaaggaacagattctcctctggagcctccatgaggaaccagccctgttgacaccttgatttatccccgttagattcatttcatacttgtgactcccaaggctataagagaatacatttatgttgttttaagcccctaagtttacggtaatttgttactgcaggataggaaactaataccaactccataggagatattttctcaaatttgccctgcgtcaatttcacatcttgaataagatacttcaaaaaaaaccccacaatctcactgagtctgcagaatcccagaagagtaaacatccctagaaacactgcaggcatacaggatatgcgcagggtgaaggggcaggcaagagtcagctcttcctgtggaggagagagcaggacagtgtcactggagtgggtgttactcagggctaattataaccatggccttcacatgtgaacactggcagtgtctgggggctgaggccagtgctccattgctccagttaagatcacagcgaaagccaagccgtgtaggtggtgtggttcaggctgggtatccacatgggaggttactgctgtctgtaattgtatcctcaaatggaagagaaagtatccataagccaggtcagcaacctcagtgaagagcccaacgaatttagagcccgcctaagatctctttattccataaaagagtgtgggattgttgtggaggcagaatttgcggctataaatcaaaggcagttctaaagtttgaactcttgtcaccctgcaccgttcttgagatgcattttctgcacagagtggggaggaagggactgcatttggcaagagattgagtggagtgatgggagggagagaatggagagaaaacagaggggttaggtgcagaccacaggttcaggggctctgattacagcaggagaaagactggcaattactaggaggggtagcagaactggaaaaggtcttttgtttgttagttttttaaggatgggaaggtctagagaagtttgaagacggaatataaggagcccaaatgaaggaagaaatgaaatcactagtggagggagtccagggccttaaggatatggaaaggggtaagactgggggtcagtgcacaagtcgggagagcatcctctccaccgacaccagaggaagggtgggggatggtgaggagctcagtacagagttgggtggaggccgttcttcactgctccacgtggtaccatggaggcatccagagccaggccacagtggtggatgcagaagctccaatctggctctttctggagccccaggctgtagatacacactctacatgaggctgaggtaagcagaatagggatttgcctgctttaacagattatgaatttgcactgctgtaaagcaggggctttaaagacagaggggttctgttttatcttcctaagatcggcaatctacggtatcatccagagaccaggtttcttctctcccgttgctctgccatctctggggcatggtgctcacctgcatgggcgaggctggcctgccagcccccagaaaagagcaagaggagggcagtctggaggtggcacttatcacttctcaaaccttacagccacacctaactacagggaggctgagaaatgtcattcccttgggtggccctgtgtccagctaaaatgcaggagtctaggactgaaaaacagaagaggagacaaatattaggggacaattagccatttctgccaaaggcttcagacctaagcctgtgtaactgtgagatctgggtctgcatgcaggcgtgtgacttcacctccctgaccttcatccttctgtaacatgagaccactgtgcacaccaggcatggcgatgagtaagcagcagccatggaggcacctggcaggggcccagaactcagtgggcatgcagtacctgctgttgtttaccgtcctccctttctgccctagggaaaccaatgtacctgcacatcggggaggagatagacggcgtggacatgcgggcggaggttgggcttctgagccggaacatcatagtgatgggggagatggaggacaaatgctacccctacagaaaccacatctgcaatttctttgacttcgatacctttgggggccacatcaaggtatgtgtctctctggcagagtctttcaacccaaccaggagagttcctatgatgtcagcctctagacgggccttcttggtagggatgagggtgggggaacaggaggtgggatcaaggggagggcgccttctggaagtttgagaagtcttatgtattatccattagtgtgcagctccccccccaccaatatttgggaataagagagatgatggagctaactcagcaacaaacagctctctgctctcggccacgtggtacacatcacactgtttcaacattgccttcattccttgtcttcattatttcatgattacttcattattgccctgatcacttcctaaaagaactagcatttaacttgcaaaaggtcacatttacaatggatccattaccatatagataaaacaataagcaggtgagaggaactagaagtcacagcattggctgggcgtggtggctcccgcctgtaatcccaacactttggggagccaaggcgggtggatcacctgaggtcaggaattcgagaccagcctggccaccatggtgaaaccccgtctctactaaaaatacaaaaattagctgggctggtggcgggcgcctgtaatcccagctacttgggaggctgagacaggagaattgcttgaacccaggaggcagaggttcagggagccgagatctcaccactgcactccagcctggtgacagagtgagactccatctcaaaacaaaaacaacaacaaaaacaaaaagaagttgtagcattaaatttacctgtgagtttcctggctagagtcaagacaaagaagagacatagtgagctgcagggttcttaccgcacaatataggaaaacgatactaatttactggtgcttacgttttcctagtattaagctcaaagaggaatttcttttatatcacaatgcaaagtgccttttccaggcatattatattgcttaagatacccacaatttcttcatgtggtaattggtttcaatgccaatagcataatattacctcagagttttgctaagacagttctcgtaaagctaatatcacgcactttaaggataagactttttggtagtggaactgaagagacaaatggagtgaaacttacagcattcacaatgggggccctactggcattttatgtgagatgactctttgtcacataggcctatattataggatttctatcatccctggcccctactcattcaatgctagcagcgctccccagttattatcaccaccaaaaacgctttatatatccagtcatctcctgggtatagggtggggcagaggtgatggtactgtcctcagttgagaaactcattagtgatactaaagcagaaatagcaggtctatgtcacacaagctgctatagcccccttttcaatcctgagaccagtccctgaatgatcaggggactctttcccactgagctcaaactagccctcagaatcattctcaacacagctctccagggccgctactactggagttgacactccagttgacacctatttttggaagaaatggttagcatgccaagactatccttctttagtagaggttagctgagcctgacttttgacaggattcattttcagactgtgttttcatggtaggcaccctggagggcaggagttccgtgtggtcaagaggttttcttgagcctgaaagaatgggtctatgcatatcgtgaagtgagtgtgtggcattccctccactcacacacatgccaccagaacatgggctcatgaagattccagagtcggtgttccctttccctttgctaggagaaggtcttgggtgggagacaatggcaaaggctcttgctgctccatacttcactgtaacctggattccccatggtcatagggcatgctttttgccagcccactcctccagattatctcagagttatcccttgctcataacacttgatggtttgggagacaggaaaggaggttcaaagtgagccccagctatagcatagctcttcagaacatctcatttctaagcactccatttcctcacaatgtcctctgtcattagcagtgccttgcctgtcttccacagtataagaagggccaggcattctaacccatttgcagagaatatctttgatttactgagtactaagtggagactgacaaagaacaatgcctctgcatctttggaatatgggcaccagccagggaaatcacaaagcatctcatgggctcctctgactctcggttctcctctcctagtttgctctgggatttaaggcagcacacttggagggcacggagctgaagcatatgggacagcagctggtgggtcagtacccgattcacttccacctggccggtgatgtagacgaaaggggaggttatgacccacccacatacatcagggacctctccatccatcatacattctctcgctgcgtcacagtccatggctccaatggcttgttggtaagaacctccttccctcagggaactctggggatgggccatggatggttagcactggaggggtgtttggatgtagacacttaatccagggcctttggggattgaaccatccttagttcaggtttcagaaagatatcaactgggagcagatcaccaaccaaacaggaaggagaaaatagaggtttgtccttaccaaaggtaccaagcagagatgggagagtgattactttgtggtggtttctgggagtccagtttttcctgtacttcattggcatcacatgaaatctggagatcattccacggccacacagcatgacagctctgctaactgcagacagggggatcatgcgaagacccggctgtggtatctacccaacagatttgagatggtgacaacaatgggctttttttcttctgatgaaccaagtgttccttcagagcaagtgctgctgggagaaatactctcattaacaaattggcatgtgtatcagaggcttgtcttgatttccacagataattttcgtactaaattgacctttctcgaagtgaactacatttctatcctctgtaaagtttaacactggacatcacaaaatggtaccccgcaagctgaatctagcaaccagatatgttttgtttggcttatactgtgtttagagaaacatttgaacatttttacactaaattgataattttacactaaattggactttctttaaatgaactacactttatatcctctataaactttaaaaccggatgtcacagaatgacaccctttaagctgaatccagctacacgatgtgttttgtttggcttaaatagtggttaaagaaacatttgaattagtttccatcatttaaaaattaagagattctacataaaaatctggattcctggcttcttttgaaaagtaggatgagttggcaatgcccatcctgcctccctgcatggcaacaatggcttagagcagagtcaaggctgcctcccctaagacaggtgggtgggcattctccagtgtgcagcaggcctaccgtggctgttacaattactgtaaaaccccaggccggtgccactcctttcattgcctgctggtccctgtgggcatttgagtttgtaagcactgctttaaaccaagcagagcgagcctcgccaacaggcatatggttatgggaaaatgaggaggctgtctgtgtgacactagtgtggttctatttgatgtactcttctattataaaggattgtctgttgtttctgtgttttaaatgctctgatttaaaacctcccactgagtaaagagaagagatcatcggctttggagcccagtctaggggggcctgggttcaagggcttgatccacagattgtgagctgtgggaccttgggcaagtagcttaacctctctgaacctcagtttcctgctcagtcaagtggagaaacaacaccaaacacatagggctgtcgtgaggatgaatgagatgcaagtgggtttcatgtggagatgctgtccacacatgaaggctgattctccccagcaggtggtagaggactgtgctggagccattgctggaagatgtaggatttttttctgtctcaaggaaaaaggaaaggagaatgttttctggctgaagctgaaagacatcaagatttacaataaattcagaatgtcagggataagcatgggctctggagccagacttcctgggttgcgattggagttctgccgcttacaagccatgtgatcttgggccagtcattttactgctctgtgcttctgtaaaacggagaggatggcactgcttaccctacatggttgcttccaggattgagcaagcagagaacatggaaagcatggagcccagtgtgtggcccacactttgccctgggtgcaggtctcaggtctgtcctgctccctcatgcgatttgcagaaccagtgcaatggatgcagtcacacctttctcacacagggtggtgatggaggtcaggatacatggtgaagagaacaatgtagaattggttaggaaagataacaggcttcactgagtctttggagctttacttgttctaagcatttttgttgaagttctattcataaatttagcttaaattcacctacatttaactttactaaagagaaagatattaagattactggaagcctgtaattacagatctggagcagtttgaatggaagctgttgtgaatctcagggaaaatacaccacacacacacacacacacacacacacaccctggagtgtggttgtgtggctgtgctttctcactcacttgctgtgtgaccactggcaagctacttgaccaggcaggtcttcagtttcctcacacgtgctgtggagaatgtgatggcttcctctcagggtggttcagttagaaaatgcctgtgaaatgtttttggctgtctttggaatagcaaacctttctcagagtgctgagcccaggtcttagctgcagcaatggactcaaaaagggggaagcggcacaagaatggctggtggcaggggcataggccttgggcactctaggacacccagcagggcagtgttgagagtgagcatcctggcagggctggaggctgggagaggctgggattgctgggagaggctgggagagctgacagaggctgggattgctgggaaaggctgggagagctgggagaggctgggagagctgggagaggctgtgattgctgggagaggctgggagaggctgggagagctgggagaggctgagattgctgggaaaggctgggagagctgggagaggctgggagagctgggagaggctgggagagactgggaaagactgggaaagatggcataggccttgagccaggagtgtgagttcatgaagataggctgggggagtgagagatgcgtggggcaagagggaaggcagcagttcaggggtagcccatggagctgtatctggagcagccacgtgggtcacttctacccacagtggaggtggactcttgtagccagagctgtggacaacctctcagaaccagaagacccttgctgccctgtatgccaaggtctccctccggcctgggtctcagggatgccagctgcaaactgggagggccattgtacagacactaggtggctgaggtaccagttacagcctggtcttggtggccacatagaggtccagcctcactcagcttgatggccaagctggtgggttaggatttggagtctgcaggccttgaggccttcccaaggtaaaaccaaattgtcctggcttagaatctagatgaagtgcaggcctctaactctttaagccagacagacagcagggtaatggagcacattccagtgcccttccctaagatctccaagagccatcccccgcatgggaattgggtttatggattggcacctcaccctgtaaatgctccgccactggggcagagatttccacattcggagatgctgccttgggaactggatgatctccatcagtattttacatttgcttccttcattttggcttgaaggatttactcacggctgactatgtttggaaagatgtttttagctgatgggacaaaaagaggccaaatacagacaaagacgagatcctgatttggaatgcagaggccactcagtagcatcacagaagcctttttcctaaacagcatccctgatctgaaggaggaagagattccagacaagcagatactggctcgggagaaagagggatttgtaggtgtgcagagctgagagtgccttaaagcctggctctgggctgatcctacagtgtcctggtagcccctagctcatgagctcctctctccctgctgcctgtagacaggctctgatatcctttatcctcagaggacagcttccctcatccctaattcccccgtgggcagccacctttgctctttccctttcttcaccaccaactcttgggaagggtggtctgaaattcctccaactcctgcttcttactcctgtcctgacacaaatgtggccttctcaacttttgctctctctgagccttggtgatggttctcaacaatgtcattcaaaatgtcaccaccaagctcagcaaacccactgctgtctctcctgcttcattcaactcctaactctttcttgatataacagttactgtgggcttcagtagaacattgaggtaaaagagcatagagtcacagagacctgtgttttcatctgccagtatggccttgggggactgatggaaattttgtgggactcagttccttcctgtgtgaagggaggatgatgacagaactgagttcaaagggtctttaggaagattaaaccagataatgtatgtgatatggtcagcaatgatattaaatagtattgcttattaaatagtatcactgtgtgcctctgtatctaactgtgttctgtgtaaacatcgctggttctgtgagatagtagcaagtatccaaacaaacaaaaagacactggcctctgtagttaaatgaccttggcaaacacagcatacatgccttctttccctgttttggaaattcacgatgcgtgctagcagagtaaaggcttgcaataaaaatacatgcttagctttggttatcctagcgatgcctaaactcattcgcatcttacagagctggtgttccgtaacacagtttgtaacagagaagcactggaaaatgcttctcactacattgatactgtcagtggtgtctttcttgaaatgcaatggttagcaccaaagctgcaggatgcaggcagatgtggggtgcagtctgccttcaaaggaaggctctacagtatctgtaggctggatagtgggggtgggggatgcaaaatgggcccccacttcatcttaacatgtgtttctgaactctgaggcaggacatagggggattcaccttcctgtttttcctgaaggaaagtaatggaatggtccagtacttttgtggaaggacaaaatgacttcaatatgggttctgcttgtttcctcctcccttccctctttaaggcagagaatgggagaagataccatgctctttccttcttttcctcctcgtgtattgctcaaaatgtgctatctttgacataaatgcttccaatagccacaagatgcttgaaaccaggatgtccccaacaggctgccacatgtggccctgcaggttgtgccctgcactgctccaggggtgccatctatatggactgcagccagtccccaggtgccccagccccagggacacatcctccctctggcattctatgaaagatggctgagccccctgtgtctttggcaggaaatccagggccctctctcctggactcaaagctctgggatttgtgggagaagcttccgcttttcctggttacctccctctttcagtttcttgaattcacattctcaattcttgattcatgtagctgctctcatcttggaactgctcaacaggttcacctttcctgctacttagacagagctgatttatcaagacaggggaattgcaataaagagtttaattcatgcagagctggctgtatgggagaccggagttttttttattactcagatcagtctcccccaaaattgggggatcagggtttttaaggacaattcgatggttagggggtcggaaagggggagtgctgattggtggggtcggatatgaaatcatagggagtcaaagctgtcctcttgtgctgagtcagttcctgggtgggggccacaagaccagatgagccagtttatcaatgtgggaggcactagctggtccatttagtgccagatctgaaaaatatctcaagcactaatcttaggttttacaatagtgatgttttccccaggagcagttggggaggttcagaatcttgtggcctctagctacatgactcctaaaccataatttctaatcttgtggctaatttgttagtcctacaaaagcagtttagtccctgcgtaagacgggggtttgtttcgggaagggacggttatcgtttttgtttcaaagttaaactataaactaagttcctcccaaagtcagtctggcctacgcccaggaatgaccaaggatagcttggaggttagaagcaagatggagttggttaggtcagatctctttcactgtcataattttctaactcttataattgttgcaaaggcattttcaatctctcctttccatatgagcccaaatatgaaacccagactcttgtccttgatttccacaaaagtttcattggcccagggcttttactggtagattggggtaagagatgggagggagagggggtacattacagatcagcaccgaaaccaacactaagagatggagtaacaggtccctctatagaccaaacgcttccccccaggctactccctccccaacctggttgttgagttcttgcccctcctcctcattctcccatcctcctccccacctctcctgggctgccttagaaactcattcctgtccttgttaggcagagtaatttggttgtccgggtttttttcttccacccagttttaatctgcatattcaaaaactcattaagacactctgtaaaacaaataacccaccaccatactctatggcaatcttcttttcagcagttcaaaaagaaattttttaaaaagtaatggcagaagattggaaattccagtcttctttataacatggctgtatttgttgtcgagtttttcattaacataaatcatatcatacccaccctagaaggcagaaacaagtaaagttcacttctatctgcatttgtttgttttaaacagcagtttcttttacttgctgtatacaggttgatggtggaaatcattacatacagatatgtcctgatttgcacagaatggtccattttagacgtgttgtcccagcttaactactaatcacacctccttcacttcaaacgtgtcctggttcagatcataaaccaaataaaatggtcacaccctcccccgccactgaagcagtcgctactggctctttctagctctttgtcaggcagagcccaggagttttctcctacacaatcttatgcctggaccacacgtaacaacaactgaagacttaaaacagtgttcaggaattgctttcacgactgccgaccatcagcaggaaggaagatatccagaaggacaaagagaaaaatacaatttgtgcaagagaatggggggagaacttacatattacttctggttggcatacatagggactgaatggccacccgtgaatctatatgcatgtttgtttatgcagctactatttatgtatctgctatctgtctatccatctatctatatctatctatccatctatctacatctatcatctcaagctatgtcacagtttaaatatttaacactgggtaatgttctaaggaggaacaatcccagaattttagagctggaagaaaatttagacgtcatcccatcacacagggacacttaggcaagtcacacacagcaagtttgtggctgagtaacttgtgtcttctacccccacccgagggctgtcctcggccttatcatgcttccctcttgattctgtgtgtcatcgtcaccccactcctaatgagaagaaagaaatgcagcccaaagtgagagcgtctttttctttctggcattgttgagtattgattgacacacaggttatggactcagacagatggggaatcaagtcccaattcggtccatgcaaaagaagtgacttggggcaactttctaagtctgcgtcacttatagaatcgtagttgtgatgaggtttaaataagacaacatgtaaaaacatttggtatccaataaacagcggtcatttttcttcctttcaatgaggctttttctctcaggagggaatttttttctctggcattttttagaataggaatatacctaactcattgtttactcctattcagagaaagactacccaaagtatgatccacacagtagagtaaatggatccctaagatttagaaagagctatgggcaggaggcaggaggcaggaggcaggaggcaagaggcctgagtttgatcacagctgcagaatgaggttgctgagcatcctgggacactccacatcccttctctgggccttggcatcctcctctgtaaagttggaggcattaaacttgacctcagatgttctggccagctcaggaagcccacatttccttgcctttttctcccatgcttgtctgtccaggctatttataacaaacttttagggcttaataggagaaaggaaagcagtcccattggctgaccttgatattgattgacttattaaacaggtgaataggattcaagatcacacccttgcctattactaaagatgaagggaaggatgtttattcagaagaacagagagcttgcctggaacagagctacttgcttgtatgttgggttctcccatatggagtgagtggacacagaaaaccatgctttctgccttgaccttgtacatatggcttatgtgacctttggcaaatcacttgctttctctgagtctcgttttcctcgtctctaaaaaaaaattaaaattgaatagaggatggtgtgagatttcagcaagattaaaaggtataagaggccagtccactgctgggatatggagtgtggtctgatgatccttttaaagaatggctgcctgggagttggggagtaggcggctgtcatatgaaagaccctgggccaggtgcagtggctcacgcctgtaatcctagcactttgggaggccgaggcagaaggattgcttgagcccaggagtttgagaccagcctgggcaacatggtgaaagcccatctctaccaaaaatacaaaaattagtcattcgtggtggtgcaaacttgtagtcccagctccccagggggctgaggtgggaaaatggtttgagctcaggaggcagaggttgtagtgagccgagatcatgccactgcactccagcctaggcaacagagccagaccttgtctcacaaaaagaaaaaagaaaaaaaaaagacttgaaggaactgtgatgtctacatcagggcctctcaatcagggatgattctgtcacccttcctccctcctacccaatggaatttttggcaatgaatgtctggagacatttttggttgtcacaactgaaggggttttcctggcatctaataggtagaggccagggaagctgctaaacaacctgcaatcacgggacagcctctcaaaatgttcacacagtgccagggtggtaggtggaggattgttgctggtcggtatgtggattttccagtgcttggcatggtggcaggtactgaataggtgtgggttgaattgatgtcatcgggaatcaggaactcccttggtggatgacatcatcgggcagtctgtacccaggggtggggatgaagggtgtaagataagtgaggtttttctcaccattgccccactatggaacaggccaccttgcaaggaagtgagcatctctctggagtgtctgagcagaagcagggtacctgtttgccagttatgcttgggaacagagtctgggattggacaggggggtggggcccaggctacaggccctctgaagacctgagttctgagattgatgagtttagagatacagacacagaaggggcttcagagatcatggagttcaagtccttcatttttgcggtggaaaaaaaagtgactgaagagaagataggaggcttgtctaagatccccgcgctgcttggatgtgctgctgaaactgcatccctggtatctcaatatccatgcaaatgttctttctgctttccccactaactgtgtgattccaagaaggaaaccaaagagctggagtttgcagccctttctagttctgaacccaggcgttgcaaatgtggcttgatgcacgtcttgggctgacaagctggcttggatttctgaatgagggtacaataaggagcatcaatattggtcttaataaaaagcacacctgccccagctcaggtgctgctcctagatgaagttccctcgtccacccttactcagtgggatctcctctgtggagtccctccacggtaagtccttgtacacagggcactcagctgtgtgctccatcagggtgggtgcacgtggcccagcccatggcctcctcttggattcaccttctcacgtatgatatcttgccccctttcctaccctatagagcctcaccacccccaactcctccagctggaaaggacttttaaaagtcaccatccctggcacggcgcggtggctcacacctgtaatcccagcactttgggagcccaaggcgggcggatcatgaggtcaggagattgagaccagcctggccaacattgtgaaacccagtctctactgaaaacacgcagaaaattagctgggtgtgggggcgtgtgcctatagtcccagctactcgggaggctgaggcaggagaatcacttgaaccctggaggcggaggttgcagtgagccaagattgtgccactgcactccagtctgggcgacaaagtgagactccatctcaaaaaaaaaaaaagtcaccatcccatgctttgtcccactttccccaggcctatcacttgtgtcatcttcatctccaaacctccagtgctcctcccagggcctggtgtacggctgagactatttagtgtttgttgaatgaatgaatgagcacatgagactatttagtgtttgctgaatgaatgaatgagcacatgagactatttagtgtttgctgaatgcatgaatgagcacatgaataactggatgcttggtgaaacacccctgtcttgacccctgcagatcaaggacgttgtgggctataactctttgggccactgcttcttcacggaagatgggccggaggaacgcaacacttttgaccactgtcttggcctccttgtcaagtctggaaccctcctcccctcggaccgtgacagcaagatgtgcaagatgatcacagaggactcctacccggggtacatccccaagcccaggcaagactgcaagtaagtgcctggacccctctctgtgtgctggggggaaggggtgtacatgtgtgtgcatgtgttcactcagctcagcccagcaccagacttctgcacttcggggctctgaggagcttgggcctcacagcccttaaccacctacggctccagcttcctgcaaagcaggtgggagggagggtgtcttctcccttctcccttctcagtttgcctcatgtgcatttttcttgtccaaagaggatccctgttctcatctgtggggcttctcctgatccacacagtgctctttgatgagaggaagtggctgacacctcgcctgccacagaggccccgaccacacagacccttttctagatattagagagacagagggacggggtgagagctctctgtgcagtcagccttccaagtgcagggcccctcccttagaaagggctactttcctgggttcttctgacctgcatgtattttagagtcaatctcagacatcacttgcacactgcttctattttcaggacccatgctctttttaatttctgaatattttaagtgcttaaactagcaccacactttaattagaaaactgggtttcagatcaacaagtcaatgatttctcagatctctgataagagactatcaggccaatatcagagtgcccaacctgcacctgccatgtggcaggatgacccctggcggccctttatctgatctcaggtatctctgccctccctgcagtgctgtgtccaccttctggatggccaatcccaacaacaacctcatcaactgtgccgctgcaggatctgaggtgagcagaaatattccttctttggcagaaagtgagggtgggggctggagtcagggagacagccgaggcttaccttgaaacatgtgtgctctgagccccaagcccagatatccatgcagacgggcttagctgtggtgaagaggaaaacgacagactgggggtggtggggcagggggcgttctttggacttggttttaaaggacagccctgtcacttcataatactggtgaccatagttagtgaacactgaacgctttatgtataataaatcattagaatgccatgattttagcttagaatggtacctgacacatcagtgttgtaagctcacataatttgatttttgtaagaacccagtgacgtaggtattattattatccccatctgatgggggaggaagctaaggttaggagagctgacatgcccaggggcacacgtagctgggaggtggtggccagagtggcagcacggcactccatccacacagccctgctctcacccacccgtccatgctgctggccttccatgggaccctgaccttgacctggaacttagcttccttatctgtagaatgaaggggaaagcagagaacactcatgaaatccccccattgtgtgtcaggaagaggagtttcagccctgcagtgattgaaacgcagcatttctgagccatgtctgatagagtagggcccatcaagggctttaactgtcatggtgggctctacttttcactgttttccccccagactggaccacatggaggtgtgttgggggtgggcaccgagggctcctgtgggtgacggcagtagctactagacccatctccggcgtgggccgcgtggccaccttgcccaggagctctctggggctgaacgctgtggcttttcccttgtgtccttccccaacaggaaactggattttggtttatttttcaccacgtaccaacgggcccctccgtgggaatgtactccccaggttattcagagcacattccactgggaaaattctataacaaccgagcacattccaactaccgggtaagtctttccaggctgcgcctctctggccagcctctcggtccccttcccaggcctgcagatgattagagccgggacagccagttggcgacagctgggaacaactgcattcttaatgctggtctcgaagaaaatggagcagccttgcgaggcctcccaggccattggccacattcttcaacacaaatctcctgtggtggttcctgcacgggcatggactgagaatatggccagagccaaaaggagcaagttgtgccttcactcatgctgacagggggagagcttctcttggtggcccctgagctgggcacctgaatttggtttgcaattcacttggcggggctgggtgtagcctcaactatgaaaagttaggcctgatccataagctgaaggaaatcaagacgtggttctgaaggaaggtggaggcagcattggcatcctctctgctgttccctcttgtcttgtttcttgggaaatgaatgggttgctgcatctgcacagagctaagtgggcaggtgggacacaaagtcctcagtcatcttcatttgctcatcaacatctcctaagcacctgccgttgtgtccagcaccaagctaggcactgggggacagagggcataccaagatgaccgggatctcgagtctgtcaaggacttcccagtgaggacagcagtcaagaccagagtcatggggcatgggattggagcttggagcatggctgagaccagagacgctctttgttggggcagaggtggtctcaaggatgccagggcggtgcgcagacagactcccaaatgcctaggctggttttctggtccaatccctaatggtactgataaagaaaaactgacgttcctcaaagggaacaatacattcggaggcaaaaagtaaaaagatttttaaaagcccaaccagagagaagaccaaaaggaagagatgcagtctcagaatagacctgtgcttatgcctaggagatagggtggggcaaggggtaagcagttgcagggtggggtggcagaaacagaagcagagtccccaggcagtgtcatttcccagcaactagaaaagagggtagtgtcatggggcagtgagcagaggtgtggaagacaacagtctcatcttgacagaggagaattagtgccgggtaacagagagggcatttctgaagctgacatggccctcagagagcaatctccatacagagggaggtgcagggggcatactgctgttggtggcagggggaacagtggagagaatgtgttggctgcttgtcgagaaacccctcacacgcaccccttgggaaggcttccatgagcagggaggtgggccacatagaacctagcaggtgtggagaggctggaaaggggaggagtgcatgcaggtgaatggtttctaacaagcaggcatgcaagggctcatgggtgcaggtggggatgggccttgaagaaggtggcaggtctcattctctgaggcagggagggaaggagtgaagaagaacctccagctggatggattcgattgtctaagccaaggaggaggtctcgtccttggtgttcatgcccagtaagccttgactccacatccacagtgagagggacctgttccaggaggcttcacctggggtctcttattgggtcctcataaccatcctgtgacataggtatcactagcccatcttgcagatgatatgactaaggctaaagaggtgaagggacttgcccagtcatagttagtgggagtagagctgcgagtcaaccccacatcatcggactcacatcaccgctgctgaattataagccagagggagaatgaaacggccacagtgccctccagttatctaaaaaagagaaatctgagtatgagcattcacaagaggccacgagaatccagacaggaatgaagactgaatggtggcctccctgggcagcatcactcagctgccttgatttctccctatcccatggctgacaaagtggacatgtttagagtcaaacaagaaagccagattctctcttcaagacaggcaggagctaaaatgaaactgtgggaaggtcactgaccccagcccaaggtaaagatgggacttaggttcagcatttcctttaaatcacagcagataaatttcctaagagtatatacctgttgttcctgacttggggcctgggctaataactatctaaagcagtgtgggtctgcacatggactttgctatgtggccttggacaacatacataacctctctagacctcagtttccaaatctgctcctcaaagaggtcaaatattccagatttggtctgagcaatgcagaataaggcagcatcttcacctcccttactgtagatcctctacttctgttgatgcagcctgagaacagagctggttttcccggagcattcagaagtatgcagtgaggctgactgtgagacgatgcctgtagcccacagtagaaactaatgtgtccctgaatatctcttccctgcaggctggcatgatcatagacaacggagtcaaaaccaccgaggcctctgccaaggacaagcggccgttcctctcaatcatctctgccaggtaatcagccattgggaagacacagtccacggtgaccttgcagtccagctcctgcctccccctccttcaatcactcattcattccctgagcatctgttgagcccttgctttgtgctgggctttgagctagttgctgggggtacaatggtgaaaacctgagcagggtaaagtctgaattaggattctggctccagcagccaaaggaagatagaaattcccagaggtttctagatccctcagcaaagtgaatagctggtaagtcagcagaaatgagcagggccacagtaggttgggccaggatgaaaagatgaagagaacagaagggaagaattttaccatcagtttaatgggaaagaacatgcaagtcatgcctataaataagcctactgttcagctgaaggccaggggcaacttttaaacctcaaggtaattagcaaaaccaatctcctttaaagagacaagttgcttggtctccatcaaaagtgggtaacactggtaacatgatagtgcactccgttttgtagctaagaagtgctcagaaaaggcactagttcaaggtgacctgccagttagtggaagagctgggtatctccagactcttctcctgggctacgaggactgtgttgcatgactttgtgggaatggctgtctgaactgtcctctgtgttttggccccacttggggcaggttcttcagtatgtgaggagcctgcatgggctggtggaggagtgacttcttgcttctgtgatgaactcagaaagttcattcaagagcccaggcaatgcgaatgggtttctgttcagtcaatgccttcctgggcactgtgagtagagagaggctcacagagcccagaagggagtcagcagaggcgtgcccccaacaccgccacctgtgccctccccatggttgtgctgcagatacagccctcaccaggacgccgacccgctgaagccccgggagccggccatcatcagacacttcattgcctacaagaaccaggaccacggggcctggctgcgcggcggggatgtgtggctggacagctgccggtgagtcagagcggcgtgtggctttggcacaaagggggcatggcgcgtcttcccctagccccctacagagacaggagagcaaagcagagaggggaagccagacatactgacgtttggccttctggtcccccagccaggcaggggcatagaatggcagcaggcagtggccaaaaaaaacaaaacctaaaagcagcatattggcttcagcctacagtgccaggtgctgtgggttatgattcgcttccaaatagtcactgggcttggctctctcaaggtcatgcggaccatcagctaagggagggaagaagaaagaagccagaacattctaggcacttactatgtgaaagccttggttgcatttctttcttaccatgtttctcaaacatataaattatgatctccattttagagacgataaactgaggttcagtttagtgaatttcccaaggtcacgcagttagctagagtttgaactggaacttggagccacagttcactggactccaagacccaaatgaaaaaggcagggaacgctgagctctcatatgaggtccctatgtgagtgactggcacatgctggacaaggaccagaaggcacaggcagtggagctgggatttgttttcagggagtattgtgaaatgtctccttgtctgccttttgtgttaaaaatgggaaatcagaaacctattaggaaataaacatatttctctattttattgtgaccaagtaaaggagaaataaaggtgaaagggaacaagagaaattgaaatgcgaggagaaaagcagagacacagcattgacagagagagcaagagagagagggaagggagagagagaaaggctgctcagaaatgcagagatctggggagaaactgacttagcattggagccccaggaagatgcttgagagacagagaaggggaggtgcaaaggcttttgggtcccccagccaggcaaggacataggatggcagcaggcagtggccaaaaataaacaataaatttttttttaaaaaagtcaaaaaagcaaaacttaaaaacagaggcagagagactgagcgggtggggggggggggtcttcttttttttttttgagatggagtcttactctgtcacccaggctggagtgcagtggtgcaaactcagcacactgcaacctctgcttcctgggttcaagcaattctcctgcctcagcctcccgagtagctgggattacaagcgtgcaccaccacgccaggctaatttttgtattttcagtagagacggggtttcaccacattggccaggctggtcgcaagctcctgaccttgtgattcgcccgccttggcctcccaaagtgctgggattacaggcgtgagccactgtgcccagccgcagggccttcattttgcacaggagaaaagaagtcattcattttaagaagaagggaagggagaaaagggagctgattctgggtttctgaagggcatttaggggaagggggcagggttgttctgattggctctagaaggcagaagtgataggcatgaagcaggtttcagctctggagaaggaagaaccttcctaccatatgagacaccaatctatgggataagctgccaggctcctcatccctagagcagaccctagagcatccttgggaggggcactacacagaaggtgggtggaagccctgggttgaagagaaactagatggtgtcaatgccgaaattctttgcaatatcctaagttcggtaaatctcttggttctggttattgggcatttcagagtttaggtcccttaagagatggtaaatgccagatttagggcagcaagaaaaattgcgaagacccctcctgccaaagtgtgtgtgtcttttaatcccccaccagactcattccaaggtagcctaggatctgcctggcaccaaggctgtggtcctacgtgtggacaaggttggtgcaatcggggctgacagaagacagggatcccttcaaggattggaagaatgaggggaccaggagcctagcactgggggacagaagcaatgaggaaaagccatggaggggcctgggagataagactcaggaagtttgggaaaataaatggataagacagtgccctaatgatgggactggaatgactgatttgaactaaatgggcttcggaaaaagaaaaaggtccatgtgtctgaaagagggtgagcagaatatgaaaaagtacattgggaattagagagcatgcctgccaccaggaccagcctggtgcagctgatgtggattcaccaggcccttgagcttggatctatgaaggatataaagccacggaagttttagggaccagagaggctggtgagaatggcactttgagatgagcctggcagggtggacaggacagatggaaggagcagaggcatagagaccagttaaatctacccctgggacacaggaagtgaaggcggccactgtatttggccctagggtctgtggtagcacagacccaaggctcagctctggattctgtgtaatcccttgtccctcgcaatcagacgccccccagaagcatgctcatctgacccctaaaaagggcagaggtgaaagggagctgacgagatggccccagagcaattgcaaaatgacttcctgcccttctcagggtcagcatctgcctggcttcctggaaacttgaaaagtagctattgatgcctctctctatggctgaaacagcagtgaagatggtaaaagaaaaaaaaaatagaagtgcattcacatactccacctttccctggtgctggtcctgagagcggaaggcccttcaagttctcctgatccaacctcacactaagccctggaatcacagaggatggggctggagagggaggcatatggaccccagtctgcatgctgtcaatgccgttgaatgtggagagccacaggggtcactgctttctctctagagtcagagtgggaggggacccagaaaatccccttcctgtgcagaacaggagagccacaactccctgagcacgactctgcttatgtagagactccttcctctgcacggtattcagtttgactccaagggcagggaagtgtccttctctccacgactccactgaatgtgaagccagggcatgctctgactatctatctgctcttgcccacaggtttgctgacaatggcattggcctgaccctggccaggtaagggcaactgtcattgtacttggtcctctgtgggatcttgtctctgggcatctcaccttaaacatcttctctctacagtggtggaaccttcccgtatgacgacggctccaagcaagagataaagaacagcttgtttgttggcgagagtggcaacgtggggacggaaatgatggacaataggatctggggccctggcggcttggaccatagcggaaggaccctccctataggccagtaggtttgcaaccatgtagctccttattctgagtggcttaacctaagtggctgtgatggaagggaaaaagttaatgggtagtttctacctgttgactatgaattcttctaccagccagaggaatcactgaggtgactgagactaacaattaagggatgaaatctggaatggggagagagaagtcaaaaagtggtgttgaatatgagtcaacagggtgacgtggccatcaaaatgcgtaatgcattcctgggctatgttaatgggaatttagtgtgtctgggatcagggactgtgagtccttttctctgacagcactctcacttggagtgtagcatccactcctgaggatggcagagcaatagagtcaggccgaagcacacttaaaggagaataaccaggagggtgacaaaagccgaagctatgtcacatgcaggttggggtcttcaaccagaagacaggatcatcactttggggacaacatgggggatattgttacatgttctcagagctgctgtgcacataggggatgagactcattctacacgggcaccgtgggttagggttggtttagtgcaagaaggatggatctttttaatgtcagatatgctcaacaacagaatagcaggactgtcctgaggagtcctggtttctgcggctgggggagttcaaatgaaggtcagacgataagcaggtgggtggagaatgaatgggtgacttggaagggtgatgagcaaacagggataatggactcagtcaattccttggaaaaccacaggctgggtcagtggtgaggaaatctcctttcttctgctggtgtttctgctcaggtgtgaattcaagccagagagcaaggctctgagcctgtgagcagcatggtagtccctgtgctcctggtgataagatcagcccttcttgtctgtctgagctttctactctttctctaggaagatataatttctactactagagtcaggacacaaaatacacattgacctaaaacttccaacccaagtggacatggaaaagactttgcaaaggcaaaatcatggtctccttcagcatgagctgtgagaagcccttccttttgtctaacctgagtaatggagcagtccctttcagcatgtgtatgagtgaccctgaatccgcacgttcaaggtttctttgccaagggttaccagcctcccggggccagaatgctctgatgacttccaaaggtgatcctgtttatggaaacctgtcagactgaggcaggttcctcaaattgcatctgcaagtaggaacctaagagcctgcagtcctaatcatggttgatccatcttgtatagagctgggtcagggtctgaagtgcaaaacctaagtatagagctagtaaaaatggactgtccctaaaatatgtgaaatgaaaaaatgcatggagccaccccttgagaatcaggattctagatcatgatgttaatcaattataaacgtaaaaatatagaaatgcaaggagtctttggtgcccactgaaggcatgttaccgtgactgctgtgcctagggtcttcctcaaggaaccatattggaatggaagggagcccagggttgaagatcagggacaactggagtatggtctctccctgtgggcagatattttttctgcttctttttccatctttctattttttcttctttatatttgctgtggaagacaatgtgcttgacccagatacagagacaccagcataagcatacatgttgggtttggagaaggagcaagcctagactggggccaggcccaagaaggaccaccaggaagcccagccagcctcgcagacccttgcttcctgtgctctgctcaggagtctgaggcaatgggagaagtgtgtctgagcaacctactccatgctaagccaaggcaaaatcttcaagtcaccagttcttgtccagtctctcctacctccacgtccaagcctgttgccgcttcccacctccttctgggtctcagggccttcttggggttctctgtcagcctacagtcttgcttttcagtggggcctccctttcttctaggggtgctgaaaatgttgccttacaattatttttatcatgtttatcaccttccattctgtgtccttttcccctctgtttcccaaacccagcacactgccaatgtgaaaggcttactcccagaggagaaactcatgtgggtcttaatctgatttaattgttatagcaactaaaactaaggcgataatgactaacagctctatcttcccaagaaacataatattggcacgctccagtggtatttacagtatttacccaatgactctttatgtaatggaaaaattggggaaaatgttgaaatacaggaccattctccaaactccaaactagcaactagatggatattcaactcatccatccattcatccatccatccattcacccggcagtcattcattgacacttagtgtgtctatacatgctttaaattaattaatgaattaataattaattaataatgatctggggcagggggagtttctagaggtggggatcaggaatggttttacccaggaagtctctgctaccatccacctcagaaggggcaaacatggcgtttagactgacgtcttacttccttaactccataggaatggaaaacatttagactgacatcttacttccttaactccgtaggaattttccaattagaggaattcagttatatgatggccccatcaacatccaaaactgcactttccgaaagtttgtggccctggagggccggcacaccagcgccctggccttccgcctgaataatgcctggcagagctgcccccataacaacgtgaccggcattgcctttgaggacgttccggtgagtgaggcgccagggcagactcccggcaaacccagactttggatggtgattcacaagtcccctgggtcccagagtttgagctattgccaccaccgcaggggttgagaagcctcctccaactaggctgggccatgtcccagtttgctcttcatccaaactggaaaagtacaagcgtaggttgccccacaggtcaggtctgggtaaatgcccgcttgctctctccctgctcaaaactcaggcgagcctctggaggaacccgacgtgtggactgaggttcctaggctgttcctccaagggacttgactttgacaaactgagtcttctgaccaggccacctgagttggcacaaagaatctaacaagccccacagtttccaagggaagtcttagctgatgatgttctgtttaatctctccccgagagcagactataaacagaggcctccttgccctagacagagaaggcagaagaggggcggaggattaggagatcaggagcaagggctgccctgtgagaccagccggggccagtcctcctgtgcatttccttcaggttatggattcccagacttttccctccttctcctccctgctcctgccttttgcctgtttgcccagttcctggcaggctgagggaaacgatgtgaaactgaaatgacttaatgtctttactcaggcaactgagagcctgaaagaggtcagttatggaaatctgcaagggctcatgctgcaaaactgtcttcctgaaacgtgccacatgcatcttctctcgcacacggatgcccccgtgtatgtgtgtgtgtatgtgtaaaagtgtgtgtaccctttctcatacacacatcacccccacctccctctcacacacagtcacactcacagtcctcagtccccctcctccatctctgcagttggtgaaggctgtgtgtcagagcagtctccaagctcatccacagcagccaaccctccagtgagcagaggccaaaagcatgtgctaggtctgggagttgaggcacagtgaacctttgactgtgactccggttgcatcggaggggtcagccacgtggtttctctcagtgcccgagagcatctttgttttggctggcttgtaacgtcagtggaaatcggaaacctcgccctggcctgatgacggctgcagtttcccttcaccttctagccctgcctaactttcctgggctctgtttagattacttccagagtgttcttcggagagcctgggccctggttcaaccagctggacatggatggggataagacatctgtgttccatgacgtcgacggctccgtgtccgagtaccctggctcctacctcacgaagaatgacaactggctggtccggcacccagactgcatcaatgttcccgactggagaggggccatttgcagtgggtgctatgcacaggtggggacaccattctgggggccggccactcacttattcactcatgcaacaagcattcagtgagtgtctactctatgcctggctctgtttcaggccagaaagagatacagaatttttttttctttttctttctttccttttattttttcccctcacccagtaggatttttacaaagttaaagtcaaaacacttggtgagcaaaatgcttagaaaaaaagaaccctctgggtcaactgcttcgattcaagtcaggctccaacacttaccattggaccttgggcaaattacttggtctcttggagcctcagtttcctcacctgtaaaatagttgaactttcctagcgagattttgggggtggcttcagaaaatacaagtaaaatgtttcatcagccttatccaatagaaatataatgcaagccacacatgtaatcttaaattttctggtagccatgttaaaaagtaaaaagaaacagaatttaattttaataatactttaattgtattaaaaatactatcattcaaaatgaatcagtgtagaaaatcattaaaaacacttcttgttttttttctaagtcttcaaagtctactgtgtattttacacttatagcccactcaattttcaaccaagggaagtgtagtcctactgaaacaataacgttgtgtttaatgtgaatttttaattttatttttaatttatttttgcatttttattgctatatcatagtatattctcttggagaatgtgtgatatttgatatatgtatacaatgtgtaatgatcaaatcagggtaatgggataggaaaaaatatttacattgcttttgttttgaaatttaaatgaattgaagtttaaaattcagatcctgagtcacagtggccacatgtccagtgctcagtggccacatgagggacagggcaggtctagatggtgcctagaacagggcagaacttaaaatattagttagctattattatattattgttacttctagtattttgatgaatgactaatgaataaatgagtaacgggagagaggcctgagaaaatgaattgtcaggttcacagtgagccaggtcgtctcagagaatgaaggaaacatgtatgaatagctgtcttcacaactatcctacaaggcaggcattattatcaccaccgtgggtgtcaggaattggggtgttagaaaggagctaaatggtggtttgggggtggaggagtgataggagagggagatggtgttgggctgaaggaaaagggccataaggggcaaagagggcacagggtgcagctggtgggggtcaggtgccagagtaggtggcagggctagcatttagcaggaagaaggaccagaggaagacagggcagagggcaggaagctgagggtgtttctctctgcagtagaatgtgatgtcatgtgctgagaatgtggggactgggcttgaggaaagtaacctccagagagcgataaagatttggaagagttgctgtagagagtggaaaatgttgacaagaagcttgtggaaggagtgcctggcagtgttgaaaacccagtggagactggaggcggtgcatttgcagaggcacctctctcccaggctgtgggattttctcagccctgctcaagagccctgggagaggcggagctgtgcaatgagccatggggtggcttctgctgtaggtgtgggcagaggaagggccaagatgctaatgggagtgagtggttgatatgatgatgtgaggaagataagaagggaagtggggtcagaagggagctgatggaggacagtcatgtcctgaataattgaaggatgaccaaaccctcaagcctggcatccacactgtcagcattacacagcctcagctcaaggtctaggtatcccatatggagccttgattttccttcccacactttctttctgatatgttgcttatcttctgtgaaaaaaaagctcatcgttagagcttgccagattatcataactggcaactggttattaacggttattcataatattttcccttcactttacatcttacaaaatgctttaatgtacgctttaccttctgatactcagggcaacttcctaagatgggcagggttggttctctttccatcttatatgcgataaaactagaggggaagataagcacttccttccaaaagcacaacatcattgcacgttggtgtgattgtctctcttggccacagttatggggatattgtcttatgaatttgggatgtgccataaaacaggacatggcgttttttttgtttttgtttttgttttgagatggagtttcgctcttgttgcccaggctggagtgcaatgggcaatggcgtgatctcggctcactgcaacccccgcctcccaggttcaagcgattctcctgcctcagcctccctagtagctgggattacaagcatgtgccaccatgcccagctaattttgtatttttagtagaggcagggtttctccatgttggtcaggctggtctcgaactcccaacctcaggtgatccacccgcctcggcctcccaaagtgctgggattacaggcatgagccaccgcgcccggccaacacagtgttttaaaccaatgctgggataaagcatccaggctcttaggtccctggaactcaatggctgacagtcttgctttcagtttttcctctgaaatgaggcaccatttattcatgcagtgtgttgtggcaccacaaggactggcctcaggggccagacactgagagggagtaggagggagaagtaggccaacacacccaggcactctctaaaatcaggcagagcaactgccagttataggcgagttgcattttatggtagaattaaaaaagttctctctctctctctcttactcccttcctcctccgtccacatctctgtcctttgtccaaaatttgccatctgactattatgcagactcttctcaaatttccactggaagctcaacagagcacttttatgaagatgaacagaaagcattagctggattacacagtaaggcctgggctgcgtccatcagcagaaagagatgtccccttatttggcctttctttcattcaagccttctaaaaagggttctgtaaagagaaagtgcctttgaaagtgcggtctatagtcagatgttagccagacgctcttggaataatccttcgtaatagcctcattgtgtgtttcctttttgggttttaaaagatgtacattcaagcctacaagaccagtaacctgcgaatgaagatcatcaagaatgacttccccagccaccctctttacctggagggggcgctcaccaggagcacccattaccagcaataccaaccggttgtcaccctgcagaagggctacaccatccactgggaccagacggcccccgccgaactcgccatctggctcatcaacttcaacaagtgagtgggtgtccagccaggagcagtgagctcaaagctgataacgatgccttgttgcaaagtcctggacttgcgtctaacgaaaccacaggctagcccatgtgatccatgcaggagtacctagaggggttgacatcacccaggagttaagaattaaaggacacaggccaagcccccgctccagcatgggtaaccttggccagcgcacgtaacctcttgagcctgagctccttgatctttgagttgaggatagtattaccttgcaggagtgcaatgaggacccaaggagataaggtatggcgggcacccaggacctggcattagccagtgctcgacagatgacaaaaatatctgggtattgttgttaccatcctacagagagggaaacgaggctctgcgagataaagtgttgaggccgagggcatctggatagggcttcatatatttagattctagtattttctatgcacattatttacttgtcacagtatttctgtgagacagacatttaccagatgtgggaaatgagaccaaagcgatgaaatcggccctacaatcaagctggacccagaaggggctcagcctaggtcctttggatcctgtgctctttaactacgaaaagaatgtctttttcccaaagttccatatgcagcacccccagggttggccctggagacacaccagtgaagcattcaggctctttgctcatgggcagccattgtctctccctctctccttgaacactgcaactcagtcaccacgacagcaaatgtgctttcaaaatttcccatacaaaagtggaggtgtcatttggtggagattttttggtctctttctccaaggcatgctccaaaggccctgtggcctggacacccttgcttgtaacctgactctacttccaatcctaggggcgactggatccgagtggggctctgctacccgcgaggcaccacattctccatcctctcggatgttcacaatcgcctgctgaagcaaacgtccaagacgggcgtcttcgtgaggaccttgcagatggacaaagtggagcagagctaccctggcaggagccactactactgggacgaggactcagggtgagcaggcgcccacttggctgcaggaaagtggctcaacctcatcttgtccccttggcctttccaataagtctaagaacagccatgtagttaatgccaattaatgtaagacacctttctaggcattttgactctaaggctgactgtcccatacattaacgacatttttaaagctattaagctttaaaagtaaaataaacaccctattaaatatacatgtgaattgtagggaatttacatatttcagaaaaaaaaaagtgaaggcagtaaatcttagaatccagaaaacatggtacattatctcaaatcctcacaacaacctgcttggagcagaggattaagagatgggcagctgggtgtggtgactcacgcttcccagcactttgggaggccgaggtgggtggatcacaaggtcaggagttcgagaccagcctggccaacatggtgaaaccccgtctctactaaaaatacaaaaattagctgggcatggtggcgcgtgcctgtaatcccagctactcaggaggctgaggcaggagaattgcttgaacctgggaggcggaggttgcagtgagccaagatactgccattgcattccagcctgggtgacagagagagtgagagatgggcaaagaaggcacagggaaaataggagagacttcctgagatcatagcataaagctgacccagctggatttgaacctagatctgtctgtcttcaaagccctcacccttttgctaacctgcactaggttctattcaatagagatataatgaaaacagagtatctgtttctgggagttctttgatcccctctcttaaaaagaaatttcgtctaatgtcttaagaatgccaacccagctccacagcaacgtcgatagcaaactgtgaggagtaagggtaaaagatcagttgatggccagttttctattcttatatggaagtcaatgataaagaaactgataacagatgatctatcttatttatggctccatcaatttgattaagggaaaattaaaatttagaatcaaaagtataagtaaaatgttgggatgggagggcaataaaaaacacctctttccccacacaagtgctacgccagctgggggcagacaagctggcaggggaagaggaagtgatccaccttactgatgataaagctgttggagaatagagctttccaatatcatccccaattttacctcctccgccccagggagcactgggcaattacaggctccccacatagggcccagcccgaaaacctcagagcatggaagacagaccagagtgcccctgctctacgggctgagccaaatacccaaaaccaaccaattatatgagacactctcttcccatgggaagaagtggatgaggggagggcccaggggccaggagtatttaggaaaatcctcccatatgaataccagaggaggaggagtgagatatgccccacataccactaggaaatattatgattaaagtaacagatgttgataaggtaaagtccctgggataccatccatgcagattttcttctttccggctcatgagtgaaatgttcaaaagatgtgaatttttcaaatggaaacttccactaagtaagttgaacctctttgatcaaagtcttaaaaatctaaggctggtctgcttgtcaccttaagcacattttttggttggtagcatagcttagccctatgcctgttgatcattgtgttgtgtttcaattcagcaacgccttagggaccaggagttgggttatagggggtctgtttcctatggagaagggctgcaaactcttgggcttttaaaaatctttctgccttatacgtttgttgtttcttatactcagagcacctgcctttagcagctaccttctaataatctactatgggctaggatacttaacaaccagcttgctataattaggggtaaaattaaaataagtcagctaaaagggaggggatttcaaagtgtgaaatatataagctctgaatcatctctcattttttccaggttaaaaaaactgttaagtgattgtagctgtgttctggatagctaagtttgcttaataccacctcagtgaattcttataatgattcttactaaattataaacaagtacattatttaaggtgcacagccatcagtagcgctgctctgcaacattacttggtcatagccaggatttgagcactgggctggcagatgcccaggcccgtgctcctttcatgccttccagggctttgcagttcagccagcttgcacacatccaagttgtaggtcaggattagggaaggcagctgctacctaccatgggctggatggtcttttaggtcactcccagtttagataatctgatatataatggcaacaaggaaacctgaatactgttaagttttgtgcagaagcctcaggaccaatcccatttctgtgcttggtcccaggagtggtttggagcatgttgggagcctccagggagacgtgaccatgggcagcactgaactgccttcctcctaagctgctcaaagcgggtgctcacctgcctccccagcttccccaccacgcagggcatggaatgcagatatggctgctctgctctcagccctgagcacgaggcctctgtaacagtcagtttctactttactctgagatcacttgatgtggatggcttgaaacataaagcctctcaaggaagctcagattaagtggaggtgctacagagagaagaccaaggggtcttcaagaaataaaaacccagctgggcctcatgggctcaggtgctgacagcaaccaagacagcagggaggaggtagcctgcctaccccttgtgtctctccatctccccatgttcacacacatacgcacacacgcatggcctcttgtttcagctacttgctgcaaactgccttcctctcgcgattccttagcaggcatggggcacaacaaggttgtcagccccaactccatgtggtcttttagttcaagcaccacccggtggtggacaagacctgctgggtcccataagagcgagaatcttggttactggttggccaatccatggcccctctgtgagtccaatgtgtgcccctggtctgagcagctgtgtggtaggggtttgggggcgagggcattgtggtgcaaacccagctccctagtctgactggactcagtgaagggttggtccccagagcaagatgggtggtagataccccatatcctatcttcccatgtttcagatgcaggactcagcctgaaagcgcttttctgcactaaaagaacaataatgaatcccaagttagtactgtgttttcctcataatctgactccctgtaacactgggtcagcttcctttacaataataattattattttaaataaattataaataatttttggaataaattatggtttggagaaaactagagataggaagacagagcatctcctcaccgggcacaatgctgggatggaaaatgctggctttgtcacttcccagctgtgtggtcctgggcgagtcacttcacttctctgagccaccattttcccatccaggaattcaggatgataatagtacctactggacaggattgtttgaggattaaatgagatatgtcgatttacgatgtgtgcacggcgtggcacatagaacgtgctcagaatagaattgccattctcattagctttttcttcaatgcatttgttccttatttctccaactacatgcaactcggtggtagacatggttccattctataaggccgctgggtctacctgctatgaccagctcagagtaaatgtctcggtgggtgggaggagaagagggaggtttgagtgtccaagcaaatgcccagcaatgctccttgtgtgcaggctgttgttcctgaagctgaaagctcagaacgagagagagaagtttgctttctgctccatgaaaggctgtgagaggataaagattaaagctctgattccaaagaacgcaggcgtcagtgactgcacagccacagcttaccccaagttcaccgagagggctgtcgtagacgtgccgatgcccaagaagctctttggttctcagctggtgagtggctgagagcaaagcctagacccctttgccgtccagtcgggcctagagccctttgccgtccagtcgggcccagacccaattaggtccctcactcagctccataaaccatttcctgtgactggggatacgggaagaggaggggaatgactacccaaacctaacaattacattgggttctatgtgttttccagaaaacaaaggaccatttcttggaggtgaagatggagagttccaagcagcacttcttccacctctggaacgacttcgcttacattgaagtaagtgcctctggcccctggaggattcgggtttgctcattgagaggtgatactgtgtcctgcggctgctggcacaaattactgcaaactgggagcaaggtgttggcaggggtggtttcctccagggggcttggggcggggaacctgttccatgcctcttctcgctcctggtggctgccagcactcctgagcattcctcagcttgcagacacattaatctctgtctttatgtgggcttttctcctgagtgtctgcgtctcacctctcctcctgcctttcttttgcaaaggcacctatctttgaatttagggcccaccctaaaaatccagaaggtttaatcaaaaaatcttttaacttaattccgtctgcaaagattctattttcacataagcccactttcacaggttccgggtggacataacttttgcagggccactatttgacccactactgagggctacgaggagttaagtggataatggagtttacgcttcaaatagatgcataggcaacttctgccttcagggtctgcttgggaaccacctgggcaggagaaccatggggccttggcaccctgcctcacacctggattgctctggctctgtaggtggatgggaagaagtaccccagttcggaggatggcatccaggtggtggtgattgacgggaaccaagggcgcgtggtgagccacacgagcttcaggaactccattctgcaaggcataccatggcagcttttcaactatgtggcgaccatccctgacaagtgagtctgtacctctgcttctggaattggctgctggcacagcagacccctgggcaagggccccctccctctcacaaaggccctcatcacagatcagtctggaaaagctcaggcagtctccacagcctgcccacaaatcatgggtgttggacaagagcgtccttgcctgtggactctggtgttggagctgggctgctgtgaatgtaggtcaggcggaggcaggcgggacagccccgctgcacatgggaaggttgccctggccctcttcactacactcccagcatgatctcatcccctcccacaccttcaatacgatccaagtgctggtggctactatctccagcccggatctccttcctaagcaccagacattccagtccaactgctacttggacaacgccacctggacatcttgtatggaactgaattctcagccttttaaaatgtttaacctcccaaaccagccactcatcctacttcttcagttttgatgaaatcatcacaattcatcctgatagccaggccagaatctgggcattctgtttgtctcctctttctttcctccacatgctatcatcacaccctatcaattctgcctgcagtactgctcgcctgctggttccctccacagcgtcctctcttctgccactctgccccggcctttgctgttcatcaccaacactgttggcacagtctcctaacgggcctccctcttccagttgccccaactccaacccatcttccatattggccgctggtttaaacttcttaaatgtagggaaaacctgtgtcccctctccttagcaaactttggtaattccccagtaccttacaagtctccccacatcgcctcctcggtgaggtcttttccgatccaacccaaaagttctaccttggcagggcgcattggctcacacctgtaatttcagcactttgggaggccgaggtgggtggatcatgaggtcaggagtttgacatcagcctggccaatatggtgaaaccccatctctactaaaagtacaaaaaaattagctgggtgtggtggtgcacacctgtagtcccagctactcaggaggctgaggcaggagaatcgcttgaacccaggaggcggacgttgcagtgagccgagattgcgcagctgcactccagcctgggtgacacagcaagactccgtctcaaaaaaataaaaaataaaagttctacctctgctaaagcactactcacaataggtctggtggacacatctgttgccccatcaagagtgtggccttctcaatgttggggccatgtctaacttccctttgcatttctagcacagaacatggctagttaagtgagtgtacagttcactcaggagccacaacctggtggaaagtctaagcgcttcatgtggtacctgctacatagtaggtgcttagtaaacattaatagttattaaatgaaagcaaatgtacttcccagatgctgactccatgaggggcacgacgtgaactgggcacctggcgagattttggataatgggattttgcttaaccacatttactccctccctcattcccccatcagatgcttcttcggcattctatttttcatatgcagattcagacagaggacaaggttgaccaaattgggaaaaatagttatcctctagagatcatgacgttttgggcagagaattttcttttgaaatgaaagatgatgcagaagcttggaataagaaactagactgcagtgctactctgtttggaaccatgtgcaaggctcccaccagcccgagcagcagcacctctctgggggaagcccttactggaatgggccactccctgggctggcgctgggcacccaggcaggcattggtaccactagacccctctctaacctcctggaaagcagcagggaatgaggcaaggtagatcctgttctactgtggctgcgggccctgcctagcctggcccatgcttcctaccccatccagcaggccactactggccccagggtcctggggagagaagagggcagctgctcacaccagaaacatctagcatggcttctgggagctgcctctgcactgccactctgtgggagactgtgctggctggggcatgggcttataggccatgaggatggcacaccaggcaaagaagtgttcccaacataggtaggcaggcttctgggcatcagtgggaaggggtggggacacaagaagcccatctctctgtcccgctcctgtgagctaacttagatccccatcaggagggcaagacctacatttgagtcccccaagtaggaaggctgagctccaacaaaggaccattagcttttgttctgaaatgaaacaatgcagaaatatcctcctgagaacagatcctgaatctagagtggaggatgtgttagcaatgagacctgtctccttaaggggcctcaccctaccaaccctttgggcctccctctccagccttcctcaagggcctgaggcagccccagctcccttcccatctatccttatttcacacaagcccttcgcatcttaagatctttcccgctgttcccagtgggacacaaatgggggtaacaacaggttccagaatcctatacagtttttccatgtctggactgtggtctgtggttacagagttcctttgagatacaaactggacgccccattgagcttctgccccatttctattcccaagggaggtgctcacttcctcctatctggcccagtgtgctgagtctgccactgtgaaggctattttcccagcactttggactgaatacaccccgaggcaggggatagacactccttattcccaagtcgaacttttgcaatttgggaccttcaggctgggtgcacacattgctccaaacctctgtgtctttcaagcacatttccctttggtaggtcctctgagatacttggtaactatttgcttcaatctccccatttgcaaaatagaggcaatagccctgtgttgcctaaccagagagaggtgacgtgaacgtaagaggtcaatctgagctcttggtacaacccgagcatcatggtaacgacatggtgttctcccagaaagacttcaaacctggccatgctcttcctgcagctcagagaaggctggctctggactacactaagcctgtgtccatcaaaagaagacagcaaaagaaagatgcgctccaagagaaatcttctagcatggggcttctcgagctttaatgtatacatgatcacctgcagatcttgtaaaaatgcagattctgattcaggaagtctgcaatggaggaattctgtggttctaatgaaatcccaggggatgccaaatggagctggtctctagaaccttcaggatctagaaccttcaggagctcctggatggttttatgatttgacagatgctcccctccgccttcccgcacctcctctctttctcttccctttctccttccttcctccatcaccacatttctatctggtcttacctaaccagggttgagaacattcaagggaagagatacatatcgaagtcctactgtgtgccgagccctggcatggtacgctctgcttacatcctctcctctgtttggagagagacatgtaaacgcggtgagccaagtccaggcttggagaaggctgtgggcaccaactgtggccagatgtgtgggagggagctcaggatgttcgtcaccacatggaaagagcccgtcagctcagaacacaggagaggctgccctttcccgaatccctggacaggcctctgggcactgctaactccagtcccaccatgcacaaaccaacatccctccccatgcccactttctccagtttgctctctccctctggtctaattggtttcttctcacacagttccatagtgcttatggcatcaaagggaagatacgtctccagaggcccatggaccagagtgctggaaaagcttggggcagacaggggtctcaagttgaaaggtaagggtttgaactggggtttaaactgaccccaaaaccagagaaggcaaatgcctggcatggagggtgctgtcatcttttgctgagttgagaacatgctttgtactaaacgtgggtacaacctaagaatcccccacacaactagtggtctactggaatggatgggcaagatgccacctgtttaccacccctgcactgcagcaaatttattataacttgccaccagccactgaaagaaaattgctatatttgttgactcatttgcttggaaagtggccctttattcaacaaaagtatcataagaaaagtggcttagtctcaccctcctacccaattcctgctattcagactggccaggggtcctgcatcttcttcaacattctagctgatgcctagcgtttgtacagtcctttgcagcttgcaaaactcttatttgttccagaaaactaaagcccagagaacctacatggcttgtccaaggccaggcagcttcggtggtgaagcctagcacaggcttgctggctgtgctggaagaagccatccaggagggacatgtcagcatgacacccattatcatcacaaaaactaggtgcagggagagtcctcagagaggctgtatgggcggcagagaagctccacgggcaataatgataatgatcattgtggttgctattcaatgttcagccttgcactttgcacaacatgttataattatctcacttactcattaataacctgtgcagcaggtactattatttccatttaagatgaggacaccaagaatttaacagccaagccacttgcttaaggttaggacttggatcctaatcttcctaactcaaagctgggcttcttagttatacaccatcctcactatggaaaacatcaaaatcagaaacccatcatatggggcaatgagaaaaatcagaagcaatgcaaacccttcaaaccagccaaaggaggacataaggaaaagagaagtatcctttccagcccagtcctgaaatcattttggagcctctgtcttttaaattaagatcccggttgccaaaagctgatgtatgtaaggtgacctaagttgaatggcactttcccggtggtgataaatgcatgttgcctgccaagatgggctgagtatagacgtggattcccatgcccctcggatgctcaagctgtgaactgcaagatggagagtgctgtgtgggtttcaggggtttagagttctaatctggggtgcaccatttactccacactcttggtcaaatttcttcacctctcagaactctttctagagccacagagtgatagagtggggaaggagatcttgtagatcaatgccatcatttgatggatgggaacactgggcttcagagaggggcagggacttgctggttgtcctaggggcagctcaaaggtaggcaggttcctaggaggtctcctcccttacagtttgccccatttcctgctgtgcatggctcccctgtctacaacaaagccatcaccctgcctaggtggcagtgaggctcaggtgagaccctgcctgccccatacaaacacatgtcaggcaccatcagtagctgagcacagagctcttcccaaggggccacagtgcagtgtggctaggcggtacctggtgggcgtggggggctggcgatggggagccatggaacggggtggggcagccgtcctctcatagggcttttgctcaggagactcatcattgcttttcagagcaaatggcattcgttggcttcaaaggcagcttccggcccatctgggtgacactggacactgaggatcacaaagccaaaatcttccaagttgtgcccatccctgtggtgaagaagaagaagttgtgaggacagctgccgcccggtgccacctcgtggtagactatgacggtgactcttggcagcagaccagtgggggatggctgggtcccccagcccctgccagcagctgcctgggaaggccgtgtttcagccctgatgggccaagggaaggctatcagagaccctggtgctgccacctgcccctactcaagtgtctacctggagcccctggggcggtgctggccaatgctggaaacattcactttcctgcagcctcttgggtgcttctctcctatctgtgcctcttcagtgggggtttggggaccatatcaggagacctgggttgtgctgacagcaaagatccactttggcaggagccctgacccagctaggaggtagtctggagggctggtcattcacagatccccatggtcttcagcagacaagtgagggtggtaaatgtaggagaaagagccttggccttaaggaaatctttactcctgtaagcaagagccaacctcacaggattaggagctggggtagaactggctatccttggggaagaggcaagccctgcctctggccgtgtccacctttcaggagactttgagtggcaggtttggacttggactagatgactctcaaaggcccttttagttctgagattccagaaatctgctgcatttcacatggtacctggaacccaacagttcatggatatccactgatatccatgatgctgggtgccccagcgcacacgggatggagaggtgagaactaatgcctagcttgaggggtctgcagtccagtagggcaggcagtcaggtccatgtgcactgcaatgccaggtggagaaatcacagagaggtaaaatggaggccagtgccatttcagaggggaggctcaggaaggcttcttgcttacaggaatgaaggctgggggcattttgctggggggagatgaggcagcctctggaatggctcagggattcagccctccctgccgctgcctgctgaagctggtgactacggggtcgccctttgctcacgtctctctggcccactcatgatggagaagtgtggtcagaggggagcaatgggctttgctgcttatgagcacagaggaattcagtccccaggcagccctgcctctgactccaagagggtgaagtccacagaagtgagctcctgccttagggcctcatttgctcttcatccagggaactgagcacagggggcctccaggagaccctagatgtgctcgtactccctcggcctgggatttcagagctggaaatatagaaaatatctagcccaaagccttcattttaacagatggggaaagtgagcccccaagatgggaaagaaccacacagctaagggagggcctggggagccccaccctagcccttgctgccacaccacattgcctcaacaaccggccccagagtgcccaggcactcctgaggtagcttctggaaatggggacaagtcccctcgaaggaaaggaaatgactagagtagaatgacagctagcagatctcttccctcctgctcccagcgcacacaaacccgccctccccttggtgttggcggtccctgtggccttcactttgttcactacctgtcagcccagcctgggtgcacagtagctgcaactccccattggtgctacctggctctcctgtctctgcagctctacaggtgaggcccagcagagggagtagggctcgccatgtttctggtgagccaatttggctgatcttgggtgtctgaacagctattgggtccaccccagtccctttcagctgctgcttaatgccctgctctctccctggcccaccttatagagagcccaaagagctcctgtaagagggagaactctatctgtggtttataatcttgcacgaggcaccagagtctccctgggtcttgtgatgaactacatttatcccctttcctgccccaaccacaaactctttccttcaaagagggcctgcctggctccctccacccaactgcacccatgagactcggtccaagagtccattccccaggtgggagccaactgtcagggaggtctttcccaccaaacatctttcagctgctgggaggtgaccatagggctctgcttttaaagatatggctgcttcaaaggccagagtcacaggaaggacttcttccagggagattagtggtgatggagaggagagttaaaatgacctcatgtccttcttgtccacggttttgttgagttttcactcttctaatgcaagggtctcacactgtgaaccacttaggatgtgatcactttcaggtggccaggaatgttgaatgtctttggctcagttcatttaaaaaagatatctatttgaaagttctcagagttgtacatatgtttcacagtacaggatctgtacataaaagtttctttcctaaaccattcaccaagagccaatatctaggcattttcttggtagcacaaattttcttattgcttagaaaattgtcctccttgttatttctgtttgtaagacttaagtgagttaggtctttaaggaaagcaacgctcctctgaaatgcttgtcttttttctgttgccgaaatagctggtcctttttcgggagttagatgtatagagtgtttgtatgtaaacatttcttgtaggcatcaccatgaacaaagatatattttctatttatttattatatgtgcacttcaagaagtcactgtcagagaaataaagaattgtcttaaatgtcatgattggagatgtcctttgcattgcttggaaggggtgtacctagagccaaggaaattggctctggtttggaaaaattttgctgttattatagtaaacatacaaaggatgtcatcatc

SEQ ID NO: 379 - DNA, 3867 bp, Homo sapiens
actgtcttcctcattggcgccgtgcagagaggcggaatgttcaactcctaactgcggcggaaacgtgggagccgcgcgggccgctgtcgtcccaacccccgccgccctcgtcgcgcgcggggcctccgcgcccccggctgctgctcacgccccgcccgggagccagattttgtggaagtataatactttgtcattatgagatgtcgtctctcggtgcctcctttgtgcaaattaaatttgatgacttgcagttttttgaaaactgcggtggaggaagttttgggagtgtttatcgagccaaatggatatcacaggacaaggaggtggctgtaaagaagctcctcaaaatagagaaagaggcagaaatactcagtgtcctcagtcacagaaacatcatccagttttatggagtaattcttgaacctcccaactatggcattgtcacagaatatgcttctctgggatcactctatgattacattaacagtaacagaagtgaggagatggatatggatcacattatgacctgggccactgatgtagccaaaggaatgcattatttacatatggaggctcctgtcaaggtgattcacagagacctcaagtcaagaaacgttgttatagctgctgatggagtattgaagatctgtgactttggtgcctctcggttccataaccatacaacacacatgtccttggttggaactttcccatggatggctccagaagttatccagagtctccctgtgtcagaaacttgtgacacatattcctatggtgtggttctctgggagatgctaacaagggaggtcccctttaaaggtttggaaggattacaagtagcttggcttgtagtggaaaaaaacgagagattaaccattccaagcagttgccccagaagttttgctgaactgttacatcagtgttgggaagctgatgccaagaaacggccatcattcaagcaaatcatttcaatcctggagtccatgtcaaatgacacgagccttcctgacaagtgtaactcattcctacacaacaaggcggagtggaggtgcgaaattgaggcaactcttgagaggctaaagaaactagagcgtgatctcagctttaaggagcaggagcttaaagaacgagaaagacgtttaaagatgtgggagcaaaagctgacagagcagtccaacaccccgctgctgccttcctttgagattggtgcatggacggaagacgatgtgtattgttgggttcagcagctcgtcagaaaaggtgactcttcagcagagatgagtgtatatgcaagcttgtttaaagaaaacaacattacagggaagcggctgctgctgctggaggaagaagacctgaaagacatgggcattgtctccaaggggcatatcattcacttcaagtcagccattgagaaattaacccatgattacataaatttgtttcacttcccaccactaattaaggactcaggaggtgaacctgaagaaaatgaggaaaaaatagtgaacctggaactggtttttggttttcacttgaaaccaggaactggcccacaggattgtaagtggaaaatgtatatggagatggatggggatgaaattgcaataacctacataaaagatgtgacattcaacactaacctacctgatgcggagattttaaagatgacaaagccaccatttgtaatggagaagtggattgtaggaatagcaaaaagtcagactgtggagtgcactgtcacatatgagagtgatgttagaactccaaaaagcactaaacatgtccattcgattcagtggagtagaacaaaacctcaggatgaagtgaaagcagtccaacttgccattcagacattattcaccaattcagatggcaaccctggaagcaggtccgactcaagtgctgattgccagtggttagatactctgaggatgcggcagattgcatccaacacttctttacagcgttcccagagcaatcctattctggggtcaccgttcttctcacactttgatggccaggattcctacgctgctgctgtgagacggccccaggtgcccattaagtatcaacagattacacctgtgaaccagtccagaagctcgtctcctactcagtatggactgaccaaaaacttctcttccctacatctcaactctagggacagtggcttttccagtggcaatactgacacctcttcagagaggggtcgatactcagacagaagcaggaacaaatatggacgtggtagtatatcactcaattcttctcctagaggaagatacagtggaaagagtcagcattccactccttcaagaggaagataccctggaaagttctacagggtttctcagtcagcactcaatcctcaccagtcgcctgacttcaagagaagccccagggacctccaccaacccaacaccataccagggatgcctttgcaccctgagactgactcaagagccagtgaagaggacagcaaagtcagcgaagggggctggacaaaagtggaataccggaaaaagccccacaggccatctcccgccaaaaccaataaagagagagccagaggggaccaccgtggatggagaaacttttgatgaattgaactacatagcttttctaagcaggttaaaaaaaaaaaaaaaaagaaatgtaatggtttttgataatatgatcccttcagattgaattaacgaaaagacaacacttccagtttttggattgggaaataccttctaattgagactatagccaaaccagggccaaaattatggatattggtcacccagtgatcataactaggcttgaaaatcactacacatattttctgccttgagtgaacatttttagaggaaaggttatgccatctttttaccctaaccactgatattctggttagcagggccaggacaaggggaaggaaaatgaggtcaacaaaaaaatcaaatttttaggaaaagataagatgaatgttactgatttttccttttggctgaggctgcaatatggcctggcaaggcactgttactgatcttgtctttaacattttgatattttgttcatcataatttttgcatttatttttttaaatattgcattaaaatatcatttagcttgattatcgagttttttggtttgaggttttttgttgcttcttttttcttttctttctttccccctcttttttttggatgtccccttaaattttgtgcccaaggcaggtacctcactcatctcatccttggctcagccctgctggttagtatttagtatttattttagtaagatatttgtgtctgtatgatggtcagagttgaactgatctggcttgtcatttttcagtaataaaaaaagttactgaatttaatgttgaatatgatgcatatctcattcattacgatttatcagaaaccaaagatttaaattgcctagatttgtggttctttctcttcctaagttcccagcgactgctttcaaatactattttctaaatttcaccaaaggagcaaagaggataaaacaacactccataaaggcctcttgggatgtcagaaatctaaaatctaaaagaaaacagacacagagcaagacaataacatcacaagctaaaagccagagaaatttaaaattaccaacatccttgttggagtaagacagtaaatatcagccttgcagcaagacagctctgagcagctgtgggcaaagaggtaaaccagtgggggtgcaaggagactgtctgcagcttagggcagaaatggtgggatccaacttgtgaaatgcttcatgttttacaaaccaaaaagtcaggtagcaacaaacttattgtatgtcaaatcaataaatgttactttcaataaaaaa

SEQ ID NO: 380 - DNA, 34487 bp, Homo sapiens
gtcacatggtcgcggctgccctccccgtcagccgccctcgccgccgcggtgcgctggctgcaggaagccgccgcgccgccgcttttgttgtcagggacccagcgaggagcgccgctcgccggccgccgccaccctctctcgctgcagcctgctgtgcgctgcacggcctggggcccgggagccccgcccgctctgcccatgagggggccccgcgaccaccgctgcttccagcccggggcggcgcggcgctgaggcggcggcggcggcgctgccccctctgcgggaagcgggcggccccggccgcctccgcgagggcaccatggaggtgaatgcaggtaagaaccggactgcggcgggtgggggatggccggagggagcgctcagagcccgcggggcactttggggggcggcggcagggggtgtccccatggccggtggggcggggtgggctgctgcgcgccgcgtgtccgcctctggctcggttcccatcgccccccgggccgcccggcgcccgccctcttgtctccctgcaaagccgcagcgcggcctgccggcgcccggcccggcccccccctcacatggcccggccgcgcgagccacgtgcgcgctgtgtttacgttcggcggcgcgcgggcgccggttggctgggcgggcgcgtgacgcggcattacataatgggcgctgaggcggcggcggcgggcggggacacgtgaggccgctcggctccctgacccacattccccggggccgcagggacacgtgggggcgggggcgcgcgcgcgcgcgctggctgggagcgccgcagcctcccgggaggctccgcccctttggaagcctcggggcagtgacgtcgccgcgattccctcctcccccgcggggttgcacactgcggaggaggccgcgcgtgcgcgcccgctgagcccccgcggcggggcgtccccgaagcgggcgctgacaccgcagtgcaccggacgccgcacgctcttttcgcgaggtgaccccaaggcgcggaccccgcgcaaaccaaacgaaccggcgcctggggaggctggtagctgcataccttgcagattccgaggaggaagtgcaggacgagggcgtgctgcaggccggaggaggcgcctcggggaaggcgtggggctttcccgaagggatacgctcgaaggagctctgaggtgcttcgatcccgagcgactccccgcagactgggtagcaccgcccctgttaggatgccgtctgtttacaaaaaaaaccgtttgctctaggacgcgacctgtctcatacacacacagtcttaaaaactgcttccagatcccttcgggctggagttttccagtaaacgggtcacacccgcagctgagcgtgcagctcacgtatggtcaggatgactcaggtgatcataggtgactccaacaccatatgtaagactggacattcttcatttaaattaaaaaaaaattaacctgtgggtcgctgacttttcctgaatctgatcaagagaatttggctttataaatatttttcttgtcacattttgttacattgcaacggaacaacagggtgcccttccctccttttgtctgccccaaatgatgaggtagatctgaagtgagtgaggttatggaaacagccagcttttgttttattttttgagttgcaatgcgcctctaagaatcttgcctcgataacaaatgtattgtgaacttttcaccaaaagtaaaaataaagtcactttctaattttatttacgtatttttagaatttacttattttttttaacctgttgtctcacaaaaatctggatctaattgtgttttgattacctaatcggcctacttagcctttgagggtatttttaaaattttatgagtttatcatagaattaaacttctacatgttagaattcagaggtgatcagggtgaacctcttctaacccaccctttagcatgaattctaatagctttagtaacctcataagggctggctcaattaggaagtttttctctggtttgagccctcttccaatacttcgctgatctaaatcttgcctcgtggagcaaggcacattataaaaattcctccggatgaatgttgaccatccccttcccccttcagttcttccatttacagttctcatctctttgtccttgcccagcattgttttttctgatcactcatcatccttgttgccgtttgggatggagcacccagaagtgaacaggctcttgtggaagtggttggatgattatcaagttccaagttgccctctttgtcttgaatcctgttgcaaatgaattccctggcaggcttagtatttttggcatgttgctttgctgactcacagtaaccttgcagtcaactaggacctttcacgtgaactattatgaagttagatttcattcattgtgcagataattgcatgacttgaagtgtaggaatttacaatgaccattcttaaaatttctctcgttcatttggccttaagttcaaagctgttacaagctgttacccaccatgtttacagtttctgctatctatcagtaagcaggaggtctaataagaattgccttaaactggccgggcacagtggctcacgcctgtaatcccagcactttgggaggctgagccgggcggatcccctgaggtaaggagttcgagaccagcctggccaacatggtgaaaccccgtctctactaaaaggacaaaaattagccgggcgtggtggtgggctcctgtaatcccagctacttatgaggctgagcagcagaatagcttgaacctgggaggtgaagattgcagtgagccgacatcgcgctactgcactccagcctgggcgacaagagcgagactcccatctcaaaaaaaaaaaaaagccttttaactttcgaatttttgtaaacattgaccaaggtggggccagattcagcgctgtgtggcacacctctacccttccctctagtttggttatcagttgacaaacattcaaccagtgatcctgtaatcttactgtccttcgtgacatctctatgtctcctcgccccatgagtaacaagtgaaaacagtggagtaaaagacttggaaaaaaattggagaggtggagcaaagaaatctttccttggagcaaggaaaagcaagaattgaagaaaagttgctctactggtcagtagggttaagagattcaaaaggtagtgtggaaataacctacaaagaaaccactggatccttaacacacattaaaaaatgaggtgaataatgggtagggaggattagttactttggtttgaaccattctgttggaactcttctagtataatgatgacaaaaaaataatcatcagcttcttactctgtgccaggccttttacatgtgttcctcatgttaattccatgaaggaaggtgccgttgccaccatcttaatgatgcggggctaagtaaattgaagctaaataacttactcaggcaagtagtagagccagaatttgaatccacaaaatttacttgggaacacaaactgttaactactgtgctataatgtactttagcctgcataatatttgaagatttatacgcaacttggtggtcctgtcttcttgagggtgaaggagatactgcatgtgtatggatccccactcaatttgcagtgatatatgtaggttatagctagtggaaaaggatagtcatctgcagggcctcccagtttcatcagtcctctctttagtcatgctggcttatttccagacattagattacaccttgacctcccttctccagtaatttacatggagataaaaataatgtctattttataaaataagaccgatttggctgggcatggtggctcatgcctgtaatcctagcaatctgggaggctgagatgggcagatcacctgaggtcaggagttcgagaccagcctggctaacatgtgaaaccctgtctctactaaaaatacaaaaattagccgggtgtggtggcgggtgcctgtaatcccagctacttgggagactgaggcaggagaatcgcttgaaccgaggaggcggaggtggcagtgagtcgagatcacaccattgcactccatcctgggtgacagagcgaaactccgtctgaaaaaaaaaaacaacaaaaaacacaccatttatttttgtgtcaccctatttaaaaaatgtctcttttgatgatttaaacagtcttcaattccccacttagatattgcaaccttggatgtgtttgcccctattgatttctgccctctttagtatgatcctcagcagtcacaatcatgtgtgtgaaacattgctcctaataacataggtgtttccccagttggcctataaggcattttagggaaaggaccatgctgttctctggagccctgacacctaggacacaattggaattttagtgcttcagttagatctactctaccacccttggagtagaaattatttataacacttttaaaatgagggaaactaaagcttcttggtgataaaatgttttgttctaagtcacaaggcagaaaagtacagtcatgacttgaagtcaaacataatctccaggatggtggacagaggaagtgtgagggttttgatgatggacaagtgtagaaaatgggtaagaagaccccaatatatgcaggaatatcagtgcttcctagcagtacaaaattggatattgacttaaggcttgtctgaagttgaccactgggtaagccctagcctgggaacctggcccaggtccagggtccctttcaactgaaaatagagaagactgcttcagctaattttagctcagggtttcaaagaggtacatactgcctgtttcttggaggtgttgggacttgctggtttggggatttttactcttcttactttatcatcaaaaacagtgtatgaaaaaagcacttatgaatgccatttcatttcagtcttgtaataagtggcagatattccaattttatagaagaccactcaggtttagaaagattgaaagtgacttgcttgctcaggtcttctcaccaaataagtttgtactctggaattggacaaccttgactttaaactttggcctgccacttagtggctgacttatcctctctgagctccttgtttaaaaaatgatttgatgaaagttaattcacagagttcttcttgtgaggatgaaattgtgtcattttattcctgacatccagtaggtacttggtgacttgtagtttcactttcctttcttcattaggttgaggaactactagatgtactccttttcttctaagaaattaaaatttaacccatttgggttgctatcagtcaggttcatagatgggtgtctagtagcaagaatagatgccaagacaactaaatcaatattgaaggtcttgctaggagaatgcagctacttctagatgggtcttctttgattttctggtgcctggcacagatgcttgttttcttaagacaggaattggatcttcgctggattgataatagcccagtagtttcttttaggttggatattgaagcttttgcaaaggaaattgttttttggttaattaattacgatacagtccattgccccgtcagtgcttgcaaccaatttttaagccatctgcatagctctaatttcttttcttttctctttctttttctttttttttttttttttttgagatggagttttcactcttgttgcccaggctggagtgcaatggtgccatctcggctcaccgcaacctccgcctcccgggttcaagtgattctcctgtctcagcctcctgaggagctgggattacaggcatgcgccaccacacctggctaattttgtatttttagtagagatggggtttctccatgttggtcaggctggtcttggactcccgacctcaggtgatccgcctgcctcggcctcccaaagtgctgaggttacaggcgtgagccactgtgcccggccagctctaatttctaaaagtttatttcttagctaaggtagtcagcagatcttgtgaacataaatgactgaaaatgggggccctaggaaagtcttacttccaaggaaaaacatcactttcttatcttttattttcctgagatgttagatgtgaatttagtacttaagacactattttagagaagacaaatagctgtgagatcttcctttggaatttcattgaggactaagaatatttgtctttgtaaagtgtcctattgtgagtggagacatctgtgaaaaagtagcagtgtgctaatacctggaatttttaatgtggacttaagatctctaaagttatataaagacagcacaatggttttatccagtaacatgacactggctaggtttctaggttaagttggtttctctttggattcacagggtattaatgatattctggcggttgtatcgatgaaatcatcaatctttaaaactatgggccaatttgtgtttgaattcactgattgtagccattttgaaacttcaatgtgcaaataattgcttggagagcttgttaaaattgcacattcctgaggatgtgttctcgtctgggcagggccttggaaacatgtattctgaaaaagcaccagctagttttgaggatatgtattttacataatttctctgggtgatgaaaataaactcgaagttgggaatctttcttcttgtgtttgtagttttggagtttttagattttagaataaatggtagatgaaaactaccttggtcactttgtcttccagggagcacagatgaagtagttggcttgtggcagtgttcttcaaacttggatgtgcatcagaatcaccaagagggcttattaaagtttctgatccagtagatctggagcggagcctgataatttgcatttctaacagattctgggtgatactgatgcccctagtccagggcccacactttgagatggttggtttgtagttagggaccatgttgcaggaaaaatattaattgcaggattaattaaggtgagatgcacatagcaagagagcatatggacagtgggtttaactgggaagagcagatttgcacctctcacctcatgatcgagtccaggcataggcttcatgaataaaacagtggatggaattgtctacgttagtgatatttttgtcttaaaaatcaagtgcatatagttgaatttatgtatgttaaatttgtgtctgggctgggcacggtggctcacacctgtaatctcagcactttgggaggtggaggcgggcggatcatctgaggtcggaagttcgtgaccagcctgggcaacatggtgaaaccctgtctctactaaaaaaaaaacaaaaaccaaaaacaaaaattaaccaggcgtggtggcgggcgcctgtattcccagctattcaggaggctgaaggaggagaatcgcatgaacccgggaggcggaggttgcagtgagctgaggttgtgccactgcactccagcctggacaacagagtgagactccatctcaaaaaaaaaaaaaaaatcgtgtctgatgaaaaacattgtgtgtttcttggcatagtaggcacctgttttatcttcccttctgggttgcactcaaaccccttgagagttgtggttgtgctttcctcctcagagggtttgtttcttagcctcaatatatataattggtgcttaaaaacacatctgatatctactacatgacagactaaaagtgactctaaatttctctgcctgtttttttttttcttgcctaaagacggcaatgtctgtctttttgggattgttttggcctcagcattttgctttgtggatttttgtttaaaaatgattgataggcccggtgcggtggctcacacctgtaatcccagcactgggaggccaaggtgggtggatcacctgaggtcaggagttcgagaccagtctgaccaacatggtgaaaccccatctctactaaaaaaaaaaatacaaaaattggctgggggtggtggcatgtgactgtagtcccagctattcaggaggctgagacaggaaaattgcttggacccaggaggtggaggttgctgtaagtcgagattgtgacactgcactccggcctgggtgacagagtgagactctgtctcaaaaaaaaaaaaaaaaaaaaaaaaaaaaatgccagttttcagaagggttgtggcggttatataaaattgggaatcacattttgacaatagctctgtgtagagggaattagcttcagccttactgttattctggtatagcatgcattcttctagcatctttaacacctataaagagcgagtcagaagaacaagtagtgagtctggatttcttaagagctgcttagagatgaatggcagaatggggtagagaagggagagtattgaactggggattggttagtggatagccacatatgtcttctgggaacaccaaaacagaaaggtgtgggagcaagggctgtgaaacgatccctgttttgagataatttaccttatctaccattctaaatgttacatctgttctggattaacctgtgcttctagccaagtgttgggggaggcaaatgataaattcattgtttctaggattgtgtcagataactataacaggaggcaaagaagagaccagaaccagatttcttcatggccagtttgtttgagcaatgaagttacttaggagcattttttagtccttttaggaaaatactggaaaatgaaaagctttaggtgtgaggatctccatgtgctcagaatatccaagccagtgaaatccttctcacttaattttttctttctttgagatggggtcctgctctgtctccaggctagagtgcagtagcatgatcatggctcactacagccttgaactcctgggctcaagtgatcctctcgctttagccttctgaatagctggcactactagaggtgctgggtgcaaaccacatgcagcaagtttttaaatttttttgtagaaacagcattaccttatgttgcccaggctggtctcaaattcctaggctcaagcgacaatcctcccacctcagcccccaaagtactatgattacaggcatgagccagtgtgccgggcctatctccctttttaaatcagtgggagttacatgtgctttgaactttgcggaagcaggacgaataatgggaaataaggaaatactttattttttgcttttggtgtaagcaaacatttcatatcagtatcctgtttctaaagttaatggctttactgttgagatttgcaaaaataaaaaatacgtattatcttgtatctaattatgtgattttcctcctattttctaggaggtgtgattgcctatatcagttcttccagctcagcctcaagccctgcctcttgtcacagtgagggttctgagaatagtttccagtcctcctcctcttctgttccatcttctccaaatagctctaattctgataccaatggtaatcccaagaatggtgatctcgccaatattgaaggcatcttgaagaatgatcgaatagattgttctatgaaaacaagcaaatcgagtgcacctgggatgacaaaaagtcatagtggtgtgacaagtaagttactttggttttctaaagattgctgccattaattgcaaatggggcttattttatcagcttttcatttaggtggccattatgtttctgggtacagttttcactccttgctgggtaatcatacatcagtagttagggaagaaatcagtgatgatgatagaagttataacctaggggctgtcattaattcttgcctcagagcaagacatgtgattatgtactctgcctgaccctggtccctctagggtaccctcttttactacatttcacagttacttttcttctgaactactagaactaagtcttgtttctagaacagagtacttgctcattgtgggaaggggttacgttagtgaaactggatttgggaatatttgggatgaggaaatgttggattgggataaccaaatgagtagggggatttggacctatctggcctctgtaggtgaagtaaattgacacagctgcctgtggagagatatccctttccaccttttattgattgacttctctgtctgaattcttaattgttatccagagaattgttttcttagttctggttgcatatctggtataaagtaactctaaatttacaaaatttcttatttcctgctgacaggtctggaaaaaaaataaatttacaaaatttcagtgtaattctaaaatcaggaaaggaaaaatccgggtcagcgaggtatttttgtcagtgccataagttgtatttaaaagaaaattatggctgggtgtggtggctcacacctgtaatcccaatatttttggaggctgagtggggcggagtccaggagttcaagaccagcctgggcaacatggcaaaaccccatctctactaaaaatacaaaaattagctgggtgtggtggtgcatgcctgtagtagtcccagctacttgggaggctgaggcatgagaatcacatgaacctgggaagtgtggaggttgcaatgagctgagatcacgccactgcgttccagcctgggcgacagagggagactctatctttaaaacaaaacaaagcaaaacaaaaaaaaaacaccgtaagaaaattatgattgtgattacttttgatttgaaaatatttttcttttacattatgaaagtagatgtgtatcttctaaaagctcttacacgttgaatgaaataaaatatctaattggaaagaaaacagactcggtgtttcctcctactttttacttcgtgtccttttgtgtcctagaatttagtggcatggttctactgtgtaaagtctgtggggatgtggcgtcaggattccactatggagttcatgcttgcgaaggctgtaaggtaaagcatgcttttgtttctttaagctactgattctgggatttaagaagttgggtttagatttacccatttgtgcaattgatagtctgagagacagtgagaagtcagctgctctttttaagttttaagcattttatgtagtgtataagcataacttgttttgaataatattcttaattcagtgaaagtatttcttttttctttaagattttgaacaaagtaaatttgctatctcaattaaacatacttattgtgttaaaccaagtgcaccaaatgctcattcattaatgtgtcaagcacagttctaggtggtagtgaaataacaaggaacaaaacagagaaggcactacttctgccttgtgggaacttagtttaaaccaaactttgaattaggatctcatcatatactttgacttaatgacacgtcaggtactgggagctgggaataattgctacatacttgaaaaaaatgtggtatcttaaaaaataatgccaagtgagtaaaataatcctgaatataagttgagcccttgggaaagctagtttatttgtaagtttagttgactattttctagttattgctattagagtattggtcaaataattccaagtgagatggtctctacctccctacctatatacagggaatctttctctctttttaaaaaacttggcacaatcttttctcctgagtatcaaaaattaacgtgatgaagacacatgttcttgctgttctctgacttgaggccacaagcaagaatctagtttggcgagatatgatgggtaaacaagataatgaatatacatgatgggagaggaaatattttcaagtgtggctctgaatgaattgcgagtttgccagtttttttttttttagatggagttttgctcttatttcccaggctgaagtgcagtggtgtgatcttggttcactgcaacctctgcctcctgggttcaagtgattctcctgtctcagcctcccgagtagctgggattacaggcacacgccaccactccaggctaatttttgtatttttagtagattcggggtttcatcacattggccaggctggtcttgaactcctaacctcaggtgatctgcccgcctcggcttcgcaaagtgctgggattacaggcgtgagccacgcgccctgccaagtttgctaacttttaatggccgggtaactttgtaagacaagtcagtattttttatagatgtagcatttttttcattgtttaaaaaagattctccttctctatatatctttttttttttttttttttttttttacaaaaatgtgaagtaataggccaggtgcggtggctcacgcctgtaatcccagcactttgggaggccgaggcgggcggatcacgaggtcaggagatcgagaccatcctggctaacatagtgaaaccctgtctctactaaaaatacaaaaaaaaaaaaattagccggacgtagtggtgggcgcctgtagtcccagctactcgggaggctgaggcaggagaatggcgtgaacccgggaggcggagcttgcagtgagctgagattgcaccactgcactccaagcctgggcgacagagccagattccgtctcaaaaaaaaaaaaagtgaagtaatattggggaaggcattattcttactttatagctagaaaataaaagcacaaactgaatgagctgattgcatattcttgataaatacacatctgtgcagtactcttaaaatgtctagttcagctcttgtagtatctaagtcaagtgtatagtatcacaataataaaatataaaaatgttgtgtcccatgactacttagtatagattcgggaaatgtgtttagttgtcatataaaaggaaaatgcagtttaaaataatttcagtaattgcattcttgagttttctgtcctccctggtaccatgaaactggagatctttggagacctatcacagaacatgtactggaattgtttgtgtgtggagtaaaggcagctgtttgtagccatctagttgggaactgtctttccttggatagttagctactctgttggtgtgtggtgtaacacttacctgttgctggcacgtagtcagtgatttctgtcatgtataagtaggccttgccattgtcagcaggtaatgatcctggaaagaccaacttctgttaatgtaatccacaatctagtgaggggattatagctatcaaacatatttctcagtccactttttaagaagtagtcatttaggctgggtgcagtggctcaggcctgtaattctagctctttgggaggctgaagctgtaggattgcttgaggtggagtgtgagacccacctgggcaacatagggagaccctacctctacaaaaaataaaaaagctggatgtggtagcacatgtctgtagtcccagctcttgggaggctgaggcagaaggattgcttgagcccgggagttcgaagttgcggtgagctattattacgtcattgtactccagcctgggtgacagagcaagaccctgtctctttaaaaaaaaaaaaaaaaaaaaaaagcctggacatggtggctcgtgcctgtaatcctagcactttgggaggccaaggtgggcggatcagttgaggtcaggagttcaaaaccagcctggccaacatggtgaaaccctgtctctactaaaaatacaaaaaattagccaggtatggtggcacgtgcctgtaatcccagctactggggaggctgaggcaggagaatcccttgaatctgggaggtggaggttgcagtgagctgagatcgcaccactgcactccagcccgggctacagagcaagagtctgtctcaagaaagcaagcaaacaaacaaacaaaaaatcaggtccggagtggtggtggcttacaccctgtaagtctaacacttcgggaggccaaggctggcagatcacttgagccctggagttcaagaccagcctaggcaacatggcaaaacctcatttctacaaaaaatacaaaaattagctgggtgtggtggcgcatgcctgtagtcccagctgtttgtgaggctgtggttggaaaattgagccagggaggtcagggctgcagtgagctgtgatcatgccactgcactctagcctgggcaacagaacgagatcctatctcaaaaaaaaaaaaaaaaaagaatcagtcattcatacttcaagagttttggaatttgtagtgaataaaagtatgagatggaaaatgtgactgcaggcagggtctggtaacagggtagtgtggttgttgcaaggggtgttttgggtaaggacaaagaatctctgaagggaagaagaattttgtttggttagtaggtgttaggtgcttactcataccaataagaatcgaaattaaattctgtgtgtcaacattgtatttccctctgtcctaagacatagtgtttcccagatagtgagtcatatactgggactgtagttcgtcatatacactagataggtatgggagcagtgtttataagaagttcatttgggtgtttttaaatgggtaagtaaatcttcctttgttcttagggtttctttcggagaagtattcaacaaaacatccagtacaagaagtgcctgaagaatgaaaactgttctataatgagaatgaataggaacagatgtcagcaatgtcgcttcaaaaagtgtctgtctgttggaatgtcaagagatggtatgttcccagtttaaagagtgttcctaaagtgtatggagcttggcttttattcctcatcatgaaccagagctataaaccggttaccaaggaccctcttgtatttaaggtgaagcagaaaacatattttcatgctttacaggacaccaaattgattaaagtcgtattttagcattatcatcccagaaacagtttttggctaaacttctgttgttgttgcttcttctaaaaagagccattttttttctgtgcaatttgattactttttattttttcctaaaaccaatggagtttaaaaacattttttatatggccgggcatggtggctcacgcccgtaatcccaacactttgggaggctgaggtgtgtgggtcactttaggtcaggagttccagaccagccatggtgaaaccccatatctactaaaaatgcaaaaaaaaattagctgagcgtggtggcatgcacctgtaatcccagttactcgggaggctaaggcaggagaatagcgtgaacccaggaggtggaggttgcactgagttgagatcgtgccactgcactctaacctgggtgacacggtgacactctgtctcaatgtagcctctatctcccaggttcaagtgattctcctgcctcagcttcctgagtagctgggattacaggtgcccgccaccacacctggctaatttttgtatttttagtagagatgggggtttcaccatgttgaccaggctggtctcgaactcctgacctcaagtgatccacctgcctcggcctcccaaagcgctgggattacaggtgtgagccatcaggcgtggccaggagttttttgagtaacagatttcagcaattgatgttttgttttttcaattccctgaaattttttttatagtgctaaaagtactaatgctataaaaatagttgatggatattgtgattgccctgaaagaataaaactgacaatcatttgtgaagggaggagtagagataaagtatcaaacatgattaagttgtttgtttttggtagcaataatgttagaggctacaattagattaacgaggctttctgggcaagtatactgaatttttattatctctgtgtaaatactagactgtgaaagaagcttttctttctctcatggataggattattggagacaagacaccttctaagactagcttctaaaagaatagaggatgacttatctcatttttacttatttcactggttttaattaaaatctaccaagtttatttttcagtaagtgcatttctactgattgtggaattttttttaaggattttttttttaaagaggctggaaaagaagacagcagataatttcatagttagatcttgagagcaaagttacaaaaatgaattgacaagggccaggtgttcagggaatgatttcacctaccagattccattaatggtaatggatgtgtgtagctgaatcacacatgccttgctgggaacagtcctcagctttgttagtaaggagctgtgtagtaatactggtctgcttcaaactggttttcattagctaatttcatatttcttttttctttttctttcttttttttttttttttttttttttaagatggagtattgctctgtcacctaggctggagtgcattggcaccatctcgacgcactgcaacctctgcctcctgggttcaagcgattctcctgcctcagtctccagaatagctgggactacaggcgcccgccatcacacctggctagtttttgtttttttagtagagacggggtttcaccatattggctagtctggtttcgaattcctgacctcaggtggtccacctgcctcagcctcccaaagtgctgtgattagaagcatgagctactgcacccatccgaatttcctatttcttttcttagactttgcttataaaatacctaggaggtagatgtccttaactttgttgtggggggaaaatagaaaattttctctccctctcctacttcctttggtgcatcaagaccagcaagtttagaaaaatgtggaccagagacatgtagactcattctttatatgtatgactagaggccataactgttggataattttgtgttattcttttatacaaaacaggtcttatttagaatatagacgttaaatatctttttcttcaatagctgttcggtttggtcgtattcctaagcgtgaaaaacagaggatgctaattgaaatgcaaagtgcaatgaagaccatgatgaacagccagttcagtggtcacttgcaaaatgacacattagtagaacatcatgaacagacagccttgccagcccaggaacagctgcgacccaagccccaactggagcaagaaaacatcaaaagctcttctcctccatcttctgattttgcaaaggaagaagtgattggcatggtgaccagagctcacaaggatacctttatgtataatcaagagcagcaagaaaactcagctgagagcatgcagccccagagaggagaacggattcccaagaacatggagcaatataatttaaatcatgatcattgcggcaatgggcttagcagccattttccctgtagtgagagccagcagcatctcaatggacagttcaaagggaggaatataatgcattacccaaatggtcatgccatttgtattgcaaatggacattgtatgaacttctccaatgcttatactcaaagagtatgtgatagagttccgatagatggattttctcagaatgagaacaagaatagttacctgtgcaacactggaggaagaatgcatctggtatagtgaaatcgattttttgcttacattgtatcagggaaagctttgaaaattttcttttattcgggagatatgctaacttggggggatggtgtcaggaaacctaagaaatttacagacttaattttgtacagtattttaggtcaaataattttaataaacatcttctgatgaatgacctaatttcacacccagctaggtacaagcatgtgatttgattgatctgagattgggattaggattttatgtaaaatatgattcatgcagaattggtcctttaattcttggaaatccctttgaaaatttaagcattctggttaattagtaccttactagctttgggattttctcaaagggccgaacttttcgcttgccatagttagaaattctttgatttctatagaaagaggttttttttttttttaaccattattatgcaagaaggtctttggatatagaacatagatgttttattgtttgataaatttaggagtattttaatttcataggctaatttctaaggattttctcagacttcatcttatgagatgacttaatgttggtcatatcattgaagcttttctatttttccatcaaatacgacattctacatcaaagtacagtgttcatattcagccaaaatttcaccaaaaacagcagtaccacaccatttccagtttaaaccatgaagtcctttgatagtgcttggtattttctactgacaggtaattaaagtcgtctttttcattttcaaaatagttgactctacctcaatcttcattaaaatttttgttgtcacttggagttatttgattctgtggaccttatgttaggctaagtcgttgcttttttgtttttttttttgagacattcttgctctgttgcccaggctggagtgcggtggcgcgacctcagctcattgcaacctccacctcttgggttcaagcaattctcatgcctcaacctcccaagtagttgggattacaggcatgcatcaccatgcctggctaatttttgtattttcagtagagacaggtttcaccacgttggccaggctggtcttgaattcctggcctcaagtgattcacccacctcggcctcccaaagtgctgggattacaggcatgagtcaccacgcctggccaagtggctgccttaatgaaggaaaaatctgtgggcattttggttctgatttcatgatattctctatggttttgtaatcatcccattcctagattttgtatggatttagtgaaaatttaaaggctgattttactaatagaatatacaggtgtgtttcatcatctttttggtgttttttttttttttttaataacttcttggcttcctattttccctcacgcagtcgtcatttagaagacacacctgtatctgcagtccttgtttcctgattgaacaagtagaagtcagtgatcacagcattgtttttgaaataaatgggcagtgacttttttttctttttttttttttcgagacggagtctcactctgtcacccaggctggagtgcagtggtatgatctcggctcactgcaacctccgcctcccggttcaagtgattcttctgcctcagcctcctgagtagctgggactacaggcgcaagccaccacgtctggctaatttttttaattgttggtagagacagggtttcaccatgttggccaggctagtctcgaactcctgaccttgtgattcgcctgcctcggtctcccaaagtgctgagattacaggcgtgagccactgcgcccggccaggcagtgagtgaccttttcaacaaaatgaggcaccttgctgttttttcttcttggaaattacaacattgtaattctacctatatagaaataaaggagtttggaaatattaactaaatgtgaatttgggcctaggcttgtgacttctggctgtgttggacaaatcactaaacctctcagagtctcatttctccacctaagaaatggaaattataatctgccatgaataatagattgagaatcaaacaattgaatttgtttgcaaaattataaaacaccatatactagcataaggtggcagcagtgttacaaaataaactcttaaacctgtgcaacaggtgtttgaaatagcttgttatagatgatatttttgcttaggcttttttttaatgataagttaattgctatttatattaggttgccaagaggctttctacagtatggtgggcagcaaatggatgaagtgctaatatctcagtagattttacttgtgttttgggggttaaattcatgttggggtttctgataattgagatgctgcttttgacatttctttaccacctcttagtatttaagagtttttccgttttatgtatactaggtttgtccattgagtaagtctccatatgtggatcctcataaatcaggacatgaaatctgggaagaattttcgatgagcttcactccagcagtgaaagaagtggtggaatttgcaaagcgtattcctgggttcagagatctctctcagcatgaccaggtcaaccttttaaaggctgggacttttgaggtaggttttatttatcctgaatattgatgcaggcagggcatgtagtattttattttcatggatgttttaattcttttttttttttttttttttttgagacagaatcctgctctgtcacccaggctggagtgcagcagcgcgatcatagctcactgcaacctctgcttcctgggttcaagcattctccagcttcagcctcctgagtagctgggactacaggtgtgagctaccacgcccggctaattttttttgtttttttttttttgtagaaacagggttttgccttgtggcccaggctggtctcaaactcctgagctcaaagcgatctgcccactttggcctcctaaagtgctgggattacaggtctgagccactgtgcccggcagatgttttcattcttttctaagtcagtatttatagtccagagtctgaaactatcaacaaaataatcatcatctcaggattttgggaacagacttgggagacttggtaaatccagaattgtttaggattttatatatattttttacttattatttaggatttgaaatataggtattctgtatctacagcatatgaactcctgagttctagtattgcttttagatgtggacttaacaagtttctgcagtgttagacacctcctgaaagcctagcctagcatttactgtattcgatacagaataagaagggcaaatagaatgtgatttcgtttttcgagagactgtagaatattttggggatatatcagacatttcttatgtgccaccttagctcttcctggtttcaccttgcttcaggatccttggctacttttctgtcccgcttctcttgcaacactgtatcctgcttgggcttggggtagtctctactgtataacttaacagatgtgcctctcctggtccttagttaggtgtctttcaccttctgtctgccccagggcatcccttttgctgccaaggtgtgagatgccttgggacctaattaaggacaactctgagattggggtggtgagaggaagttgatgtttggtgggccaaatctttgaaccttttatggatggaagaagtgagccagggctatattttcacttctccctggatttattataacggagggagtgagataactaagtaatataattgttaaccgatttaacttggatgtcaattataacatggtgcttagaacacttactgtgatagctttctttgtggatagtctctttgggtgttggtttcttgaagcagttcagttagacttcatctgcttcctttgccttggctgcatttgatgtgttgatgtttcgaagtgttgctgcattggaattttgctctttttacttaaggcatagaggccatgtgttatacttggcagcctaaagagattctttaatgcctttggccagggcccagttttaaatttactggcactatttcttgctctaattttatattgcatttcagaatctttgttaatagagtggcagagtatctttgccatgagtggctagaatttcttttgatgttcttcttggagtatttattgctttggtagagaatctgtcttaagaaagtggttttgggaccgggtgcagtggctcatgcttgtaatcccagcactttgggaggccgaggcaggccgatcacttgagtccaggagttcgagaccagcctaggcaacatggtgaaaccctgtctctacaaaaaatacaaaaattagctgggtgtggtggtatgtatttgtattctcagctattcaggaggctgaggtggaaaggatcacttgagccggggaggttcaggttgcagtgagctgtgattgcatctccggcctgggcaacagagcaagaccctgtctcaataaataaataaataaataggccgggcgctgtggctcatgcctgtaattctagcactttgggaagccgagatgggtggatcacctaaggtcacgagtttgagaccagcctggtcaacatggtgaaaccccatctctactaaaaataaaatcagctgggcgtggtggcgtgtgcctgtaatcccagctagttgggaggctgaggcaggagaatcgcttgaacccaggaggcagaggttgcagtgagctgagatcgtgccactgcactccagcctgggtgacaagaagaaaactccatctcaaaaaataaaatctggcatggtggctcacacctgtaatcccagcactttgggaggctgaagcgggtggatcacctgaggtcaggagtttgagaccagccttgctaacatggtgaaaccctgcttctactaaaaatagcaaaaattagttgggcgtggtggcgcacacctgtaatcccagctacttgggaggccgaggcaggagaaatgcttgaacccgggaggcggaggttgcagtgagccaagatcatgccattgcactccagctcgggccacaagaacgaaactccatgtcaaaaatagaatagaatagaatatagaatatagaatagaatagaatagagtggttttgagtaaaagtataccctgtttttcttttataactttcttttatatgtgggatgattcataactgacttgattgaatactaagttatttttttattattgctgttagacttctccaaatacatttctttttctttttccaggttttaatggtacggttcgcatcattatttgatgcaaaggaacgtactgtcacctttttaagtggaaagaaatatagtgtggatgatttacactcaatgggagcaggggatctgctaaactctatgtttgaatttagtgagaagctaaatgccctccaacttagtgatgaagagatgagtttgtttacagctgttgtcctggtatctgcaggtaagcaagctggttcaaaattgtgccacacctagcatatagtgaccaactggggagaagatggcagttaacagggttccagaaagttatatagagggaataaggccttaaggaagatgctaaattgtatgaccctgttatttttgtgtaactaattttttcgttataacaatatatgtcaaagtactataggaataaagtaatacttacatctaggccttgtgtttaccactgttagtctttagctttttgttcataatttttctatgagtctaaatctttatttcatgaatttgttagaacattatgtatctccaggtaggtagttgtaatatgaatttcagtttccattcaaatacaatgtgggttacttgaaaacattaaaagtatcaagaggtattagtgtggtttgttgcagagaaatgtgaattagttgtaggctttagtccagttctgccattgaattatgtgggtaacttgggtaagtaactttactcttttgggtcttggattccttcctcatcctgtcaaaggaaggggttgtaccatgtgagcctagtgtggtgtctggcatagaagagctactcagtcactgtttgaatgagtgagcaagatttttgagtttctaatgtttatttatatgagtcatttatgatgtttcccaatgcccctgccatcttgcattaatattacagttatttctgacagtacccattaaggcagagattgttactcccaataacaaatggaaattgaggtactttcctgggtatgtctaagtaagtgccagctatttttaggcatcattttattgtataacatttgggaattttttagtatttggttatgactttgtttcccatttgcttcctactgtgtaaagggcactgtgctaggcattgtgagagttataagttacggcctctgattatgtagctaaaccataaattagtagctcttgaaagagaacaagttcttggccaggcgccaggggtgcacgcctgtaatcccagcactttgggaggctgaggtgggtggatcacctgaggtcaggaatttgagaccagcctggccaacatggtgaaacccccttctctactaaaaatacaaaaattagccgggcatggtggcacgtgcctgtagtcccagctactcaggaggctgaagcaggagaatcgcttgaacctgggaggcagaggtggccgtgagccgagatcacaccagcttgcattccagcttgggtgacagagcgagactccgtgttaaaaaacaaaaacaaaaacaacaaaaaaaaaacaagttatttgtataattttgaggacctgtacctcagtggaataaagacttgccatttggtaacataatttggctaccttttctgaccagctctacctggataactaaaaatgtgtatatgacgtgggagtagtatgaaaggaatatgtcaataagggatatctgttttatagctaatttataatgcctcttgcattttacctatcatttgcagaatctcttgataagtaattagtattggtttgagttgacatcagattaatcgattattttgaaaccacagataatcaatacttgttaaattatttatctgatgaatatgccgtacctattaggtgctcagggggagacagaaagctttaaggcacaagcttgctaagtgttttcattctttttggagagatgaaactacacaaagagctttatgctactaaaccgtgtagttctctgtctgaggtaagctggagttgtagaaaggaaggtgaaatcatcttggaaggctctgtggggaaagatagaagtggagctggaatttgaaggttgaattattaagctttcccagtgaagaagagatggaaaggcatgagagagtacgagatagggccggggaagggtcaggtggccaaagcctggagtgtacatcaaggaggaagggggacaaaagccttcagagttaggggagcaccaggttatggactaacagctatgagaactaagcggggagattttaaccaaaatatggggcagaagaaagtctgtgtaccttcttaagtaggagagtgatctggttgaacaaagtgatgtttaacattaattctgcatttttattgtggtgggcagattagataggtaagtcattagtgctagagagttaggttgagaagcttttgaaatgacatcaggtggggtgaactcttctaaaataaattaaggcaggtgagatgaagtagaagggccaacttcccagaggtagttcagaggaagaaatgatggcaaaggggtagagggaaactctgtatgccaggaacgaaccttgttatttcaggataggaacatgatttttagtttgatttaatctgtttttgaaaaagccttttttctgattataaatttaatatgggttctttgaaaatgtagaaaatattaaaatggaaaaaaaaggttataatatcactaccagaaaagatcactattaatattggggagtctttatccatttacctatccatctatccattcgcctatccatctatccatttacctgtttgtttatataggatatattttaaaaatggaaaattaagtgtgaaagactgattgtaaaagaatacagtgcattctaatttttgttatgtcactgtatgaacatatacaagtacacatatatgaagtttcatgtcaaattttaatccttaccacttaaaaattactagctgttttttgttgttgttgttgtttgtttttttatttttatttttggagatggagtttctctcttgctgcccaggctggagtgcaatggcatgatctctgttcaccgcaacctccctctcctaggttcaagcaattctcctgcctcagcctcctgagtagctgggattacaggcatgcactactacacccaactaattttgtattttcagtagacagggggtttctccatgttggtcaggctagtctcgaactcccaacctcaggtgatccgcccgcctcggcctcccaaagtgctgggattacaggcatgagccaccgtgcccggccaaacagcagcataaattactagctgtttttaaagcagtatctaggcaggaaaatgaaattcaaacgctacagaagagtttaaaatgaaaagtctctgcttttttcctctttcctccaccccagccttattcctcagaaaactggatttcttaacacccttctttttaattttctggttgttgaccacccaactctgaatataatgcttatatctctatacctattttttttttttttttttttgagacagagtcttactctgtcacccaggctggagtgcagtgatctcagctcactgcaacctctgcctcccaagtagctgggattacaggtgcccaacaccatcctcagctaatttttgtatttttagtagagacagggtttcgtcgtgttggccgggctggtcttgaactcctgaccttaggtgatccaccctcctcggcctcccaaagtgttgggattataggcgtgagccaccgtgcccagcctatacctctttttatttagtgagtataacttataaataaaagtatccttccttttccctctcaatttttttatgttttattttttaatttactttaatggttttgttggtaattttaatatactcacagtttttgaccttatacataatgtcttttggatagtttagatagaatctcttaattgttcaaagacagttttttctttgtactctgacttcgctgtaacattccttttatgtagtcaattaaaacatttatatcttgttctatcactgtttgtcatgatttgatcagtcaattcccaaagttgaaaagttgaaagtcagcatttatggtattatgattatgtaaatagtacttacagtgttcacacagtgaggttgaaatggtaaagaataatggaaacctcttctccaaacctctgcaccttgaatcagggaacaaatggatagtttatttcagttctctattaattgtttagaattaagtaacatagtttgctttatctttaaaatagctttttcttcttggaaatgtatagtggtcttcttttgttgtttttgggttgtcagaagaaatggtagttaatttctatatctcattatattactttatcctcacagtagatccctgtgagctgggacatgttattcacagttatacagacaagggatttgaggaacagagggattaagtaatttacccaatgtccatttttaattactggctaagcaagtatttgaactcccattagtctggcttcaaagcctttccattatactgcttgttaacagaatagctctagctgctaagggggagaaaaatctcaaacatgatgtttgcctgtaagattggaagaatcctagtatcatggaaggggaattatacctggaaggtaagtttcttttcaggttgtttaaagtaacagcagccacttccagttgaagattaaggacttgcatgtaggtgtgaggtcaaggctcatttacatacagacttcagttgtcttcatagagatttttgttgaaggtttgactttcatcctgtaggaagtgaaaataaatagaatatttggtgaggagtacaagcttgggagtgcaatgaagaaccagctaaggagagagaagatagaagtgtcataaattaaactctgcagtactagtgtagcatttagtacaccatttagaagatgaatttccacttcaacatgtgtactcttaacattatagtctccagaagattgtttaccatccagccaggtttgtaccttaggttctttggccttgaaatcttaaaaaccatggttttagaaatggaggctttagaaaaatttaatacaatctatggttttagatataggcatccatttccctgaagttctgagttgtataacgaagcataggtcatctaaacacaaaatagccactgaaagaccaacaacttcaaacatttttaaattttttgtgtgacttcctacacctgtccaaccaactactactaatactagttcccactcaggtatcttcccaacttatcagttgtttctttctttgcccacctagattattttgtttgtggggattactgtcattctttctcagttttcggtattataaattactaatcatatgattgaaaccagagtcatgcgtcgcttaatgacgtaaatatgttctgagaaatgcattgttaggcaattttgtcattgtgtgaacatcatagagtgtacttacataaacctagatggtatatcctactacacacctgggttttatggtatagcctattgttactagggtacaaacctgtacaccatgttactgtgctgagtactgcaggcagtttgtaacacaataagtatttgtgtatctaaacatatctaaacaaagaaaaggtacagtaacaatagatatgaaagataaaagctggtatacttgtgtagggcatttaccatgaatgcagcttacaggactggaagttgctgtgggtgaatgagtgagtgcatcgtgagggcatgtgaaggcctaggatattactgtatatgactgtagacttaatcactgaacacgtacggtacactaaatttattaaaatttttttttcttccataataaattaaccttagcttgctctgttttactttataaacttaaatttttaaaagctttttgagtcttgtagtaacacttagcttaaaacaacacattgtacagctatacaaaaatattttctttatatccttattctataagcttttttctatttataatttatttatttacttcttaaactttattgttaaaaactgtgacagacacatacattagcttaggcctacacaggctcatcatcatcaatatcactgtcttccacctccacattttgttctactggaaggtcttcaggagcagtaacatgcatgagctgtcatcatctatcaccttctatatttctatgataacaatgcattcttcaggaatatctcctgaaggacctgcctgaggctgctttacagttaccttttttttttttttttttttttttttaagtagaagggacgggcgaggtggctcatgcctgtaatcccagcacttggtgaggcccaggctggtggatcatttgagttcaggagttctcaaaaaatgaagtagaaggactatactgtaaaataatgataaaaagtatagtatagtaaatacttaaatcagtaatatagttgtttactattattaagtgtaataggtttgcttaccccagcatcactataaacgtgttagttatgtgttgtgctatgatgttacgacaacaaaagctgcaacgtcactgggcgataggaatttttcagcaacattataatattatgggaccacccttttatatgtggtctgccattaactgaaacattgttacgtggcacatgactattttcctctgtcagaatgtaagctccttaaaggcattcttgttttgttcaccgctgatttccaagcaccttagaacagtaaccagtacatatgtttaataaatgtttggcaaacgatttcatcaagtgaaatagtgttttttttaaaaaaaccattacttgaatatcaaaggcaagagggactcttcaaatcattactgaaggctttatttttatgaagataatttatgattgaccaaagttaaatgtcaagagaaagaggtctctgccagtagttttgtctgaaaaattgtgaccctccccctacccccacaaaccaatatccaattttttttttttttttttgagacaggctcccactctgtcacccaggctggagtgcaggggcatgatctcgactcactgcaacctccatcccctgggttcaagtgattcttgagcctcagccttccaagtagctgggattacagatgccaatcaccatgcccggctaaattttgtatttttagtagagacgaggtttcaccatgttggccaggctggtttcaaactcctgatctcaggtgatctacctgccttggcctcccaaagtgctgagattacaggaatgagccaccacgtcctgcccaacattctttttattttttgagacagcatctcgctctgtcacccagactggagtgcagtggaatgatcgtgggtcactgcagccttgacctgggtttaagtgatcctcccaccttagccacccaagtagctgggactactggcatgtgtcaccatgcccattcaattaaatttttttttttttttgtaaagacaaagactcactatgttgctcaggctggtctcaaactcctaagctcaagcaatcctcctgcctcggccttccaaagtgctggaattccaggtgtgagccaccatgcctggcctttttttccaaataagaattaacatatagttgtaatgttcaaattttgttaaatatgagataaactggccaggtgcagtggcttatgcctgtaatcccagcactttcggaggccgaggcgggtggatcacaaggtcaggagttcaaggccagcctggccaagatggtgaaactaaaaatacgaaaatgagccaggtgtggtggtgggtgcctgtaatcccagctactcaggaggctgaggcagataattgcttgaactcgggaggcagaggttgtagtgagccgagatcgcaccactgcattccagcctgggtgacagagtgaaactccatctcaaaaaaaaagataaaacttatttttatcattcttctgcatttagagttaatcaaatttttctttttttgccctttactattaaattttagtccttgttttaagtgctttcatggcaaatgacctttttcagctatcacttataatggaagacctcctcaatatccttgtaaaaaaacgaaagggcatgaatggccagaagttttgattccttgtagaagttagaaatctttttcttgttaattacaacctcccatgtgggggaccattgaatatttttgtatactcctgcctcctgttgtaaagggaaaaaaatactcttgctgatgaaaacatctatgggtgatctacataggtttgcctgattttaagatactttattgcaggcttatgccaaatgactggtttataaacatattgtatgacaaatttaataaacacaatatgctaaatgaaagtgaatgtagggttacatagcaataaagttgcatagtgtattagttacctattactgcataacaaattgtcccaaaattcaggggcttacaaatgcaaacatttatttaatctcacagtttttgagggttaagatatgatatgagagataggatatgatatgtgcctctgactcagggtttcttaggaggttatagttaagctgtggacagggctgtggtctcatatgaaggcttgagtagggaaggatctgctttcagttgtatgtagttatcggcaagattgagttccttgcaagctgttggactgagcacctcagttgcttgctgactgttggctagagcccactcttagttccttgccatgtgggcctctccacagggtggctcacagcatggcagcagcttttctcagagtaagtgagcaagagcgtacctaagatggaggccacagtttcttgtaagctaatctcagaacggacatcctatcaattctgccatattttttttcattagaagttagtaagtctaggtccacttagtaggaggaggttgcgcaagggtgcgaataccaggatgaagggatcattggaggccattttaggggctgcctaccacacatggtgacatacaaatgggagtgtattccatatgtattgaaaatatgtttatatactacattattttattttgctaattagaagcagttgaaatcagatgacatctaattttaaaaagtcagaacctctatgttcttgtgaataaaaattcttaacagtaaagaattttgattgatcaaatgttttatgtgatatatatgctttataatatagtaactagctaacgatttgttactgagattttgagaaatttgtcaacttttgcctttattcagatgtataaaaccttgctttctattcgttagtgacactgataagcaagaattttatttatatttaatgttaataatttatcctgtttttcctatttccctattcctgatctctcttagatcgatctggaatagaaaacgtcaactctgtggaggctttgcaggaaactctcattcgtgcactaaggaccttaataatgaaaaaccatccaaatgaggcctctatttttacaaaactgcttctaaagttgccagatcttcgatctttaaacaacatgcactctgaggagctcttggcctttaaagttcacccttaaggcctttgtttatttaaacatgaactgatggtaactgtacattttgtgctaaaatgcatatttatatgtgtataccatatgtggagatagaaaagacctttaagacaataaaagattgtaggctatctctgtaatcatgcaatagctgttcggattgagaactcttcagccatgattagacgttgactgcatctccctgatagaccaatcagctgtgtcgcacttaaactggagaagttacactgaagtataatcacactgaatgttagactttttcatctgccaaaaccaaaaaccattttgatctccctgtggttatcaatataacgcacaatcacaagtgtatgaggacttagaaattaatcctttgtggtaggagttctgttgaatgatggaaatcttattactaccacaagactatttgatctggtaattggagacttcgggatttaggagatctccatgtctgtatttactctaccactgctaaagtgtgtggtcctgggtagtttacttgcttgcggaaaatgagaattgatggtgtccccaatgccccacctcacagagttactaaaaaatgtctgtaaagcatatttacctcttgggagataggcactatgtaaataaggtaaaatttctgttattacaattattcataataatattcttttcttatttctaagcctttctgggaaatcatttcagtccacaccaaccatattattcagggttcctgccatatgtgtggggtatcctactgatacacacgtattcaaagtttatgggtacaacaaagacatagtacatgtacataatatgtatgtgaatatagttaaatatatttcttcacaatattttaaactgtgaagaactttatcatacaggaaacttaaaacaagaggtgtcaaaagacccaaattaggtgcattttacttgtttatgatggcataaccattgctttaaaatgtttagacagtagaatattgaatttatgctctatttttgtttatttaagcaacacttaatgtaaaagtgcaacaggcaattgaatccaaatttcaacgacaaaaaaaaaaaacatgtattttagagttcatctttggcaaaatctttggttcagggtactagttgtttaaaagttgattcatattcttaccttgtgctgagaaaggttgcattgctgccccttatacacatgctgcagcttgatgttaaagaatttttattctttctgaagaactaattaatgtttaaagcaactgtttaatatgatggcatgtgtgtgtgtgcgtgcgtgtgtatgttctgagtccacttcttttttcctaaataacactacagggattttgtcatattagatttaatttataatttgaaaaatcatctagtgtgtgacctacaggcttagaaatggtatagtcaaagacattttatccacatttctaatagtggacttgattaagtagataagatcagcatctgtttatggtagtaggagaaatagccaaagttgaggattttatgtatgttttcctgtttacctggaaaatagcaattaattggattttttggtaaagattgccttctgtataatgtttggattatataaaattgcaaaaatgataacagcccgctttactgtactaagcctgttactttcatgacgtgtgagcagaatgccttattttgtaatcttgtttaacttgttgctactgggacttgatttactgtggcactagttaagtaagttaaaaaaaagttaaaccctctcattattaaagaggaaaggcgatggtgatgtctgtagtacaatataaaccataattgtgatttaccttaagtaggtataactcttatgggatatacagtatagtttttgtgaatctttacatgatagcattatctttttataattttttttcctaagataaacaaatgcatagttttcttctatgggtgatagaaacagctttttgaagtaatgaaaacctcaaaagatcatgttgattcttaatttttgccttttgcataagcctctttataacatgtatctttaaaacaattaagtctttaggaatgtgtaaccagaactatgttagtattgcttataaaactttagttaggttcaatatatacatatatacatctctatataggtatatagatttgcattttgtcttgtaaaattttatttgaataaattcttcctgtaggtaatgggaaacaaaattaatagttcatatgtcactcatagcatttctatatttgaaagtagcccaatataaaacttttgattctaaaattaaaccagcagcctattacaagca

SEQ ID NO: 381 - DNA, 22396 bp, Homo sapiens
aaacgaactgaacgtctgaaacgaaggtggcgcggcctggacaaacctgacccttcgacatcccccgcccctgcgcccgccctcgctaagcggggaggagcgaccgctacaatggatcctcccgcaggctttgtgcgcgctgggaatccagctgtcgccgccccgcagagccccctgtccccggagggcgctcatttccgggccgcccaccacccgcgtagcaccggcagccgctgtcccggcagtctccagccgtcccgcccgcttgtggccaactggctccagtcactccccgaaatgccagtcgacttcactgggtactggaagatgttggtcaacgagaatttcgaggagtacctgcgcgccctcggtaagcgctgcccgctgcgccctgggcgccccgccgagcagctccgggccgctccctagagccctcccgagacgctgcctgcctgcctccatcccggcgagccgcggtccggtgcccccggacgccagaaagggcgtcctcggccaccgctcccagggcagcccccaggctgcagattggagaattcggggttgttaggttaaccggtggcaaatgtctgctcgttggccctggaggtgggtaatttcattagtaaatctggggcttggtttgctactttttgtttttaaacggttaacataagagcagaaaactttgttgggggcggcaggggaggcacaggcaggctgtgcgcagagacaacgcaaagccagcgggaaccctaacagtgttcgcgggcggagagggctcctggggccccgctaccttgggaacggttctctgagtttccctgccaactctctggcgctctctctctccccgttcaacccccaccgcagacgtcaatgtggccttgcgcaaaatcgccaacttgctgaagccagacaaagagatcgtgcaggacggtgaccatatgatcatccgcacgctgagcacttttaggaactacatcatggacttccaggttgggaaggagtttgaggaggatctgacaggcatagatgaccgcaagtgcatggtgaggattcgcgtccacctggtgtctcctgcccagggggcctgaccaagggctgggctagttcatccgagagggggcaagggcctgagggactgaaaactcttcccactctcagcccccatggtgggcagcaccaactcatgaagcatcctgctctatctacactggaaggtgatggttatgaaggctgccatgtgctgtgtctccactgcgttcaggcactctgcccggtgctttatgcacatgacttcacctaagcctcacacagcctttgagggagatatgaatatgcccattttacagatgaagaaacagtctcaaagagatgaagtaacatgtccagagtagcacagctagggagggtctggagttcaaagcatgtctgttgatgccgttctctggctgactgggctggtggagggtaaaagaaaagaaaggaggaaagaaaaaagaaacacaggtaacccctttgaagtgtaaactttcagtatgacttagtgtgaagtcactccaggaagctgggggccccttgatctctgctggaagccccctgatctgcccatccttgccccagagctgggatttggctcctggccatcccctgccccaccctgtcatccaatgcctactgagcattctttgaactttgcagctgacacctattcagtaagtcagggcccctccagcccagaccagaggaaacagcagtgggggaagagggagggccaagagctcccttccacaagggtgggaaactcctgacccaggacatcccaattagtactgccacagcagatgccggaaggccagccccaggcctccatcaacattatctggttgctgggaggtcaaggtactcttgttctccctttatagtcttgggttcagaagtggcttatgttcatcccaggagccaccttgcttattgatggggtcctcacccaccacctcccaccatttaccaagggtctttaccgctggtctgctgtgtgtccagcactgtgctagtcatcttacagcacagcacagtgagggagggataagtaaccccatgttatgcagtgactgaggctcagacagaggaagagacttgtaagagatgagacttgagccctgggccttctgatgttgaagcccacagtcctgctttctgccagcttctctgctggtagtctgtgcagaaacaagatagctgaggtctgttaggattgtagttgaagggatgcccatgtctgggaataggcatctggagcctggatgactcatccccccaccttgtctattcatctgaaggcagtcaggattggtatctgagtctgctgtttggaatgatgggaaagagggggtagtcagcagggagtggccttggaaggaccactaatgggagaaaacaccattgttgcagagaaatgtcaggttgtgcctttaaaaatctcaaggactcttaatctgcaggaaagactcacaataggaaaggagaccttcagatggcatctgcctttctcattactgcccaagacctgctccccggcacactgcatggaactttgctccttaagaataatccttacccccactcactattgtggaactcacagatcacatcgaacctttattttgggtcaccacaaatctggcatgtgctggcttgtactaattatcttcactctttccttcctttcttcatccattaacacatgaaacatttattgatcacctagtaatactagcaaatgcagtactcatcaagtgcttactgtcatgccagatgctattcaaacgttacattagctgacttaatcttcacaacaccctttcaagcctcattttacagataagaaaaccactgcaggatttcttgctgtgtgaccttggggaagtgcagagggaggattttagttaaccactgccctgaacatactgcttccctcacgggctggtcaccacggcaggcacaggacagcagagcatgtcacaggccctgatgtccaggaaagcaaagtctttgcagtggaggcaggcacaccaacactcgcaacacagtgtggcaaagaaaagcacagggtgggagtgaggggatggggactacccagagaaggggatcccagaagaatttctgaaagaggtgacttctgtgcttcattgtaaaataaagcagggaggtagaagggagggttttggatacaaaggaaaggacaagggccaccttttcttctcactacagcatcagcgtcaatcgagcatcaagcagtagtcgagcagaccgtgcagattcagccactggacgaatccagtgaaactggtctaggatgcatggttactatcactgccccaggactcagggatgcccactctcaagtagatagccattcgctcacctgttgtggcctgttgggagatggaacagcctgtctgctctgctcaagccttcgcctagccccatgcagtacagaaaagcccttctctctgggctggccgctgggtggtatgctgctttggactgccggaaggacatggctggatgggggtaggatgatagaattagagcagctgtcaggcctgagacttgtgaatggaggggagctgggtacccagaggccaccagctgggctctctgagggccgccaggggtcctggacaaggtggttgccaaagatcactttcactgctaccccctctgcctcacacactgggcacccatcagccaggagcagtggcccagaggagtttgttcccagcatattacaggagtcccattctcacttgggatcggtcattcgtctatttttttcattcctctctggacaccacaagcatctcatggtgcttccactatctttgcaacccctgtgtcaatgagacaaatcacacacgattcctgccctcatggagttcagtgtaaggaggaggcaaattgaagcagccaatcacgacgtagtggacactgtgctgatacaggcagagaagcactccctgctcggtctgagaggtcagggaacgctcccacaggaattggagtctgaactgtggcttataggatagacaggaagtagccaggcaaacagaaaggggttgaaagaaaggccacggccgaaagctgtcccacaccaagccctgggcttggccctggggtcgcagaggcaacaaggccttctggacacccaggccagtggaggagacaggcacatcttcaggccattacagctcaatgcatgatgggagcacggtgggctggggagcatacagctgggagtaggaaagcagtggtcagggaaagtcccagaggaggcgacagctgagaggggccttaaaggactaattagggcagatgtggagaaaaggataagagctttccagtaagcgggaaccacatgtacaaaggcccagggtcagaaaagcctggctgggagggagtttcagaggtgagagaggagcagtctgcgaagacttcagcatgcctggagtgcaagatgtggctgggagagaagagagccaggagaacctggcagggagacttgatgtgaccctgacaggcctctgtgagtccttgctgggagaggtgtggccaggctgacatccctccccaaagggcagaggctctcactggctgagagatctctgatcctgcctcttttccatgggaaccttatctgtattctagaactgcagccagagggtgaaacccagcctgcagatgtgttttgtttggcctgtacaatgtttgaaaagcttcagagtcagttgccaataattgccaaagattgtaagatttcacagaaaatccgtatttctggctgttcttaacaaaaacaacaagaaaaggaaaggccctggaaacactgggcacctgtttattcctgcactgcgtggatccctggaatatgttgcagctgctccctttagatgttacatttcctagtttaccacagtcttcagcccatcctgttacctgaagtcaaggatcaaatggccatttgtcgctgtttgcactgtgggttcctttagagctgtggatcccaaagcagaggcagcagcagcagcagcagcatcacagggaacctcttagaaatacagattatctggccacacccctggcctactgaatcagaaactctgggagtggggccagctatctgtggttcaataagccctccaggtggttctgatgcaactaaagcttaagaatcactgctctggagtaaagaaacatactctgttcctgtgtctctataaaaaaatggaaaactgtaaaattaggtgtacagggccatgggcatgtagagggccagtttggcccatcacctgagtcctatggacattgcagtccatgcccagaaccacctgaaacagctctgtgttctctccccaggtggaggggtggagggactcagatctgggcggctctgcatcactaggctcacatttccagtctgatctaatcagattttatgtgaccacaaacagcaggcactattttggtagagatatacaaagtctgggctcagctgaacagacacagggcttttctccattgcttcctgcatgcctttgtccataaaaatgtgcgatcaggcccagcaaggaaccagcagcatttgttgaatataacacatatgtgctttggcagggtgggagctcttgagaaaggaaggtgctctgacttcagatagtgttttctcactcccgaggaagcgagcgcctcaaaatgatttggttctttgtctcgaagtccccccagcatgagcaggttttgtgggagaagactgagcctcggccaggaatcacagccgtgagcctggctctgcgggggtggcagaagggccatttgtcatccccgtgtccaggtcatgtttttcctgtaggagatggctttgttcactcggggaacaggcgcctccccctgtggctggagcctcagcttcatatccatcgttgaacttaggatgacccctccacagggcctgccttctgctcccagccctccgcccctctgtcgctttctttgtttttattataaaaggaaaatattcaaatagcacaagaaagtatgggctgaaaagggccccttcccccacttggcctgattcccacttggtggatctgtccggaaatcttcctcagacttataattgatctatctattgattaggcagttggccaaggtctctatctaaaaccaaaagaaagaaaggaaaagaaaaaaaggaatccacttctctacatatttttttaactcagtgatatttcttacacatttttccatatcagcacttacagattttctaagttcttttttaaccgtctatgtttcctttccttccctcccttgacttccttacttacatccttctatttctccacccatccatccatccatctaattatatatggtaatacatgaaatccaacaaagtactgttgacactttggtttaaactcttgccagctttctgatcctattcttgacccattaaagagattttttgatttgttttaaaaaacacacacacacacacgcacacacaatgccactggctaaattaactccctgggctgcagcgctgagaatgccgttggatgtgggagcctctgagagctgcccctgcccagatcaggcacccggcattcagctgggccctttccaggctagaaacacaggatctctttcatgtcttagctaaagttctccgacctttgaaatcggtgtcagcagcgtgcttttgaggattacaaaaagaagaattaaagcaacccaaataaaattcacaaagtagctttcaaaaatcacactgctttgttgggttttgggttttgttaggcaggaacaaaggaaaataacatgtactgaatctttactaagtgccatgcctgccccaattgctttttgtactttttctcctttggtccccacaacaaatgctgttcagtaagtatcattatactcatttcacagatgagaatctgaggctcaaagaagtgaagtgcctttttagcccaaggtcacccttgggctagctggtggcagaggaagaattctaattagtctgtttataaagctctctaccccaaggtctcccacagagctttgctgaaggccagcacctcagttccttattgtgagccttctcacagtctgaaggtaaacccaggcagttttgacaaggcctaggatgagtgaaaggagcaccggtattagagtcagaacatctatttgaattcttctcgattatctgacagcggccttaaatgattagacacactgcctttgttttcatatctgcaaaacgggcatcataattgctgctcagcgtgtctcacaaggcaaagctgaggaccatagagatagtacagggcacatgagcttgggaagccacaatactatgtgagaacagggccagggcctgtgatacccgagactgaggggcatggcataatcacttatgatggccaggtatttactgaatgaattacagctgtttgtttttctgaccaacattgttcctccacctcccacccaagagaagcactgttttctttatggtgggaattactcctcctcaaccttttgggtcctggtggggctgcaaatcatagtaccctgtctcttctgggaagagcaccttctgatagggtgatcacagtgtcccgtggcctgtcacatacttgtgtatgtggcccaagctgggccagtcaccatttcctgggagttaatttaggaaccctgagagacaggtgagttctattccgttaaaggttgatgagctgttatgatgtaagcttggtgttctctgaggccagtccccttaccccaccttccttagctgcatggaaaaatccaattgaaggaaagtaaaagatgaggccaatagagacagagagaatgcaacattagagggttactagagttcctgacgcaccattcctagattttccatgtacttcaaccaatacattttttttctttcaccttaagttatgtgaattggtttcctgccacttgcatctgaaaacatcctaagacattcaaactccagatatcaagcgttaagacccacataagtagttagagcagtggttctcaaatttgagcatgccttacccctagaatttctcattctgaaagtctggggtgaggcttgagaacttgtttttctaacaggttcctggatgatgctgatgctgttggttcaaggaccatgcttttgataactactaacaaagaaaaacaaggaagcaggctggcctgtgcctagtttcctgtgatttttctcatcatgattcaatgtaataagcctgtgctggggtaaaatgtgcctagttctaggggatgaatgagaataggtaggtgtagctccatcccaggatcagggtagtgggggatgaagactgcctggggacctcaatcttgcagcagcccacagtggtttgcaattgagggtccaagtaagtgataccaatagtgtgtgcagctggacaggtgtgaggtacaacagagcaattaggagctttgactttgagatggacctggatttgaatcctggttctgccgtacagctgtttccttggcaagggtactttatccctctgagcttcaatgtgctcatttgtaaaaggagccaagggtaatacccacctaatggagttatgtgagaattaaatatggtgatgaattatttctgtttcctgttgctgtgtaacaaaccactctgaaacttagtaccctaactcaacaatatttattttgttcacaaatctgcaatttggacagggctcagtggggatgccttgtccctgctgcctgccctgccagtggggaggtagaggatccactttccagatggctaacccacacttactctctgctgggtgcctgggcttcctcactacgtggcaggtagtttccaagaatgcaaacaccatagggtgccagctacctttaatacagggattagtgcgttcttcctttcttccttcctcttcccaccccttccctctttcttccctctgtctttcctgaactgagggtccaaggatagcataggaatactctgggaaagaatggtataaacaagatgggtgtgaaggtggggatggcatggaacccagtctccaaaacctacctttgccagctttacagtggaactggtcctgcactaagaaaataaaaaataataataataatcttctcacaatgtgcaataaatcagaaaatcatcttactctttgactcagggatcccacttatgggattatattccaggaaaatcactctatttgtacaaaggtatctgttagtcactctgtgataataattctcaacaacccacagaagcataaccactatctcagggcctactatgcggcaggccctgccctgtcattttatgtttatttaatctcctaacaatcctggataggaggtgctactctcccattttacagacagggagccaaaggtcctgcccaggttcacattactgattaaccatagatttgtgatctcacttcggatgtctctgattccctactttgtatggtttttatagaacaggctgtctcctgctggtatacctaaatatcaaataactatgggtggttagaaagactggctttttaattccatagaccactatgtagccgtgtaaatgatcactatgaagataaatgaaaagtttttataggcattcagtcaccaagttccatagattctgcttcttaacgtctcttcctgtttttcttcattcccactgctctgaatatctcgtgccagtaataataataacaattaacatctctcgtgcttactgtgtgccaggctcagcgctttccatggattatttcatttaattactgcagtatcttcacattcatctccattttaccatgctcaacacttcagcccatccctccctttctaaaaagggaatctgatcatgctactccccagctcaaaattcccaagggcttcccagtgctgatgggtaaaagccagatggcactcaggctcttcagatcatggccctgcctgtctctccagccctattccttccctcactccttatgcttggccccatcccatcatttgtcagtgccttcacttgccatcctctttgcatccctctactcacttctctgaggtatttctttgcctcttcctctaggaggagaattacccactggtcaagacccagcccaggcttatctgctctgttgatcccatcctgattccccatcccaccactgtgcccttcctttgccttgcagcctctctcttcaggtgctgcttttagggcacctgtgatgctagttaatgtgtctgagattctacacagcagcagccacaccatcatgggctcagtgggctccaatgtgttcattaaatgaatgttaagtgaaaatagcagaacctcagaaacataaatggtagtcattgaccatatcactgcaagatgcaattgccatttaataatagctcatgtttattaggtattccatgtgctaaaaattcttctaagcactttccatgcattaattcttttaatcctcacaataattctatgatgaagatgccaaaattcttcctatattatacatgaagaaaatgactcagtctgactgagttgtaactggttctgctctagagctagaccagccggaccagccagactgtcatctttgggatctcatttctgccccttacaaagtgggtggccttatgcaagctacttcacttctctgtgcctttacttgtctgcgaaatggggataattatgaaataggggatacctgctttgtggtgaggattagatgaacggtgtgtgggaaaacccacagtgcaaactgccccatcagtatgagctgttattattaatcctctcacactgacctgtgacctccagaagacaaattctgggggtggtcacatgtatgaagggatacctggcaaaccagagaagagctagcaggattatgagagtggaggctggcctgaaaaggcacctgcctctccatacccgcagggaacaggatggactaggccaagagcagagaggaattattgcttactgcacattttgtgtgtcctgcactgaaataggtccttgaaaccccttgtttcatttcatcctgatggctctgctctgtggctgggctcactagccccattttgcagatgaggaagtgaaggctcagagaggtggagtaaattgctttggtcacccagcaagaacaaggtgagaacctgcagttcaggtctgcctctacccaaggctatcattgggtccctcctgaatgcccagcttggcaggcaggcagctgtcccatgactgagccagaccaggcccgcagcctgccaggtgatattcaatggccataatattcatgccagcaaaatgttcatgtgggaacagtaggcagaccatgggctcagagctaggcagaggggatttaaaccatgtcttatactattcctagttgcgtgcctttgcatatagagcctaagcactctgagccttagagactcagggtcaaatcactccaatggttaacccctttctataaggcttacctgtgaggaagaaacagccacattgctcagagaaagcgtggtgttcactgcaagagtgccactagaatgctttctgctattcattcattcattcaacaaatggtaatgcacattttctctgccatggattctaacatgggggctggtatcctgcagtgaataaaaggatcccagaccccaaggagttcttcatcaagagatcctgacatgctcactcttccctggttacctggttactgatctagcacctcttatcttctgggagctatttatttctatttgccttgagatatatatatatatctatttatatatatatatattttatgtatatatataaaatagaggccagagattcccatggaagggatgaggccttcagtgcccctcctaagcactctctgacaggatgtcccctctcttattcttattctcccaccctacccccaacttccacacccctgcctttgctggtggaactaataacacaccaattgcttgtactggccccaggtagcagatccagcacggcctgccaggtaagcaagcatctggattttccatggcaccaggtttggccagctggagcacgaagacatactgtgaggaagaagagaggctgtgagcaatctccccagtaaattctgggtcagaggtacagggtcagccttcatggggaaggtcaacccacagagttaagctgggcaaaacctatgtagaaacttccctcatgcagaccctgctgtccctgattttcctgcaactgcctgggcttgttccctttgcctgggactcccttgttcctcttcttcctctttccacttttttttttcttttttttttgaaacggagtttcactcttgttttccaggctggagtgcaatcgcgtgatctcagctcactgtaacctctgcctcccgggttcaagcaattctcctgcctcagcctcccaagtagctgggattacagtcacacgccaccacacctggataattttgtatttttggtagagacagggtttcactatgttggtcaggctggtctcaaactcctgagctcaggtgatccatctgcctcagcctcccaaaatgctgggattacaagtgtgagccactacacctggttcttctttccactgtttgctaactcccatggtgttttctggcatcacttccagcattatttctagccttacctcttccaggaagccttccctgatgggcctctgtctctaccttaaaggctgtcgaggtgccttctgacttccataacctccagcatttgtctaccagtacttaccattctgctggaattctctgtcttcttaccttcttctcagataatctgtgagccctcaagagcaggccactgaccttacttccctctctccagcacctacagctggtgcataggaggtgtgaaacccatgattgctgaatgccgttcccttgcacagaaccacgtggtgaattcctattgctcagtcaagggtcagtttaaagcagggaactgcagagcacagtcatcaagagcatgagctctagagccaaatctcatctccccacttcacggctgggtgaacttcaggcctcagtctccacatttgtaaaatgatgagaagcatacctgctctaggaggttgtcaggagtcaactggtatgacatatactttgcctagtaccctgcccagcacataatgttgggcattatcattatcataacaacacatgttgttatgatattgattatggtgactgataatgacagcaatgctatcactcccaccagggagccttccctgaccccccaggctgggttgcgggccgtcatccctcccagcatatagcacagaggtgtcattgccttctctccaggctgagctaccccatgacagagcttctgtgcagcccagccttagggccaccctaagtgctaggtccctgggatgaatgagtgcagttccacagggccctgtgaccttctccagtcctgttcccacctccttatccagaaccttggccttgagcactccaatggtttaaactgactctaggaactttctgaattgtttaaggaaaaataactataacatgtcaagtttattagtcttaacattttctcattttgtcttaataattgtgttatcatttgctgttagctttttcatggtattagaattgcattctttcatgctcacaaaagctttgttgtggctatactatttatagtgattgctttgaacatctattatgtctctaattactcgttcacattttaaggccttattaatttagttttaatctgcttttagagtgaaactggcttttcctcttgaatgtgctgacttttgattccagccccccaggaatggatcagagaagaggagccgctacccacccactcatcagcctggcctcaggggcagctcatggactttttagccagagagaaccgggttcaagttatggctcaagccctaaccccttggtgatgggctggttacttatagaagcctaatttttatcagctctaaagcttgaagatttagtgaaacattgtggaaagctcccagcacagtacctggcacctggcaggttctctgtcatctcccctacttttccctcctgatcacttatttaacacaagcaccagatgctgaaaaccctctaattgtcccaggaacacacataccctcaaagggagaagcacactttcaaatcaaactccaggatttgcatcttttagcaatttccattatgcggagaaagtatctactcactgtctggttttgaaattttaccccaaatcgaaagagcatgggttttggtgtcagacctgggtcggtcctggctctggcctttgcaggcagtatcaccacgggcaaggcttcacctctcataacctggctgtggaaccacagaaacaacagaattcagtcccagccctccagaggtggatccgtaaacagagggactactagggctgggtggagggctgtgagtgatccaacatcccctgctcttgagagtggtgttttagcatgggagtgttaatgaatgtcacaagtttcttgataccaaatagagttcctaccatttgcaggtcataccggtcactgccaagagatggcttatttagtgggaattgtctggcactcctagtataagtcacctaagtggggcaagtgggccttgaaacatccctgggagacactcactcaggctgcctgtgggagctgggctttttgtgtcactctcccatgcagcagtgacggctggggtttctaagtggtcagaggagctggaaaatggcttctgaagtaacagtcccttgtcatagtggtacaaagatgtcttcattcatctgttggcacatgtctctgggtaaactgccggcaaggccaaagtgatgggggttattattagtttttaatagaaaagttagactggcttcactttccaaccagcttccctagttccagcccatttgcagacttttgggtggtctgtgggatgaaaatttcttgtgaggaggtgagctgaagatggccatccctcctggttgctcttggattgtctgggcttcatttctaaggcggtcccagagcccatgtgggggttgggggaagcagcattgtctagcccctttggtttgtacccatgttcaccccacccccacagccacctgccttttctgtgggacttgaaaagcatcaggaatatcttcctacctgaaattcttccattagaccctgattaattggattaatctaggaaaccagattaaatgaccatttaacgaccctttcagatctggctgaatccttgtccccgaatgttcactgctcctgatctagcaaagacagctggctgctgacttcagagggaggtcatggaataagttattgggtcctagggaaagttgttttcataagttctactttgtgtcacaagaaaatgaattatcattgtttgttaggcattcaccttccaacattacttatttccttttccctgtcatttgtgtttaagtgatagtccccctccttggctccacacctcctttttctgttcttatgacaaatcagattctctttgaaataactagtctattcccacaagataaaaaacttaaaatgaaaaatccagtcccaccaaaagttaacatggggagagtgggagaattaaatcacactgctgagccatcccagctatcagtgggggtcttcaaacagatcttctgcttaaacaaagaccagttaacatataaaggaagcaggcatcgtggtgctcagcaggcagcccctgcaggtctcctcatggatcccagtatcctagaaagagaaggagcttccaaaaccttggccatgatgaatagcatgtcagtcactgcttcacaaatctccaactcttaaaaaaaaggctttcattattgttcaacattgacaaggaaacccatctttatctaagctctgggcatcatgattaccattacctagtgcctcctatatgccagccctatgcattttctgtatattttctcaaatcctcagaacaacctggtgaagtaggtgctttgtttatctaatgccatgtaaccagcccaaaacttaataggttaaaacaacaaccttatattctcatgattctgttggttaattgtgcagttcagctgcctgtggctgtgttcagctgaaagctcagttggggcgcctcagctcttctccaagtggcttctttcccatcctccagggcttctccttgtgccctttctctttggcagaatatcctggactgccttaacatatagcagctgggtttcaagaggggaagattccaagaggacaagcccccagcatacaagtgtttataaaggcactacttccatcatgcttgttcatgtctcactagccagagctagtcacgtggccaaaccaagccgatgtaggaagagacttcacaggggtttgaatatcatgagactcgggagtcaccagtggaagagtctaccacagtaggtatcgtttagccttcttttgcagttgagggcacagagactcagagaggttaatccagttgcccaatgtcatccaacatagtcaggaacagaggacccagctctctctgataccatgttctttgctgcccatactaagtcaacctgatataggttgaggtggtatagtaggaggcgggcagggaccaggagccaagtataaatggccagtaagcttccaggattctttaacccagagtacaacctgaccaattccctggcccacctgcccgcctggatggttctacccaacagcacaggcagcaaagacaggcactgaaaacatgctccaggccacagtctgggtttttcagtctgatattctggccccatctccccaccaccccccaacaaccttgttcctcctctccttaactccaggatagtcttctacaacactggcttgttgtcatttctccctcatcacctcctacccctttcatcctttttcactctgcctagaatgcccctcccatttttagaaactcctttgaggccatgacagcctgggcacttctctgtggggacctctacaggcagaaatctttaagacctctttctgactcccagcacccatacccccacaatggttggaatgaacttaagggtgttcctccaggagtctgctcggagtcttagcacaatgtccatgtgtttttctgcagcccccaatgattttagccaccatctcgtgggcacctggcaggtgccctgccctagactgggaaacaagtgggcaccaagtcatgcaaagcccgtgctccagcccagattctttctctcatttactaggtgaccagagaaagtcatggaacctctctgagctcagccacccctctacatccaatacagacaagaataatctctgctttgtccaactcctagcactttaggaggccaaggcaggtggatcacctgaggtcaaagaaaataatctctgctttgtccagtatcagagtcaacagaagcttggggttaagaaaggctttctgggagactgatgcagtatgcatgtgatagggatccttccctttaagaagcctggtttgtagggctctcagaaaggctcctctacaccccaacagacttctgctctctctatccctcaatctgtcaagctgcctgaaattctgccatctgtcattcttttgggctaaggtattattattgtttatatccagatggcccctgttaaaagatgccagcgatctggaaatggtaacacagtagccccaggagcaaaagcatgctttaccattaataaacatctctctcatggtcattctctgaccctggtgttggaaggtaaataggtgtgagctttctggagataaagttggcaatactcatcaaaagctttacaaatatgcacactctttgatgcaacaattcctcctctggaaatttcttctaagggaacaatgtgttcaaaactatgtatacaaagaagtcttatttatagtagcacagaattataaataaataacttaaatgtccaaaataggtaattggctaaataacagtatgtatgtacaatcaaatactatcagggactgttttgtgggcctgtgacaaaggcagtccatcagggccccaggctcagaaagcccctcacttggtttaatgctctgctgtcaccagcttaaaaatcttaatgattttgagcaaagaatccctcattttcattttgtggtggaccacacacacactatgtagctacttcctagaatattacgtagcaattaaaataatgcttatggagaatatttgttgaaatgggaagttgcttcaattaaatgaagaaatgaggatatgaaaccataaatgatgcaatcctaattttgtataaaacagaaacatgtagatagatagatagatataaaaaaaaaagagtggatggaaatttaccatacattgtaacatatacaatgttagagcaattatctcttttttttttttttttaagacggaattttgctcttgttgtccaggctggaatgcgatgacattatctcagctcactgcaacctccacctcccgggttcaagcaattctcctgccttagcctcccaagtagctggaattacaggcatgcaccaccacgcccagctaattttgtattttcagtaaagaagtagagacggggttttaccatgttgatcaggctggtctcgaactcctgaccccaggtgatccacctgcctcagcctcctaaagtgctaggattacaggtatgagccaccacgcctggcctagagtaatcatctctaaagaaacaaaactacatgtatcatttttattaccattttcttcttcggtgtttttttttttaattttccaatacaaagactatgactatacttcctgactaatatttccagaagaggcaaaaatgtatgtcatagctgaaaacaagcaattgtctcttgtgcctctgagtgaatccggaacccttcatatgcacagtagccttctggataaacacatgaagagaagatcagttgatgaggaaaccaagtgttcttatgagcttcttgaagctgaggactgatttctgggtccccacttccctctacaggcctgggatggaaggagcacggataagtgaatgggtgtcctgtcttatttatggcatgaggtcatgagtagtctttacccatgacatgtctcaccacacattaaccacactatgttttgcgttctctctagcctgggactagactgtgccctgagtgaatttctggatcagagagaggatctgccccccaagtccttttatgccccatttctctctggagcagagagcagacttactcctatgcaaagctgggggagcacatgtggctccacctgcctccctcgtgcatgtgtcgcattgcaggcttcaccccaacagcagggggcagtagtgatcagcaggcccaggtgggaggcctggggtggggaggtcctcctgcagggagtggccccactaacgccacacccatctcccataagtctcctctcccaaatcctttattcggctgttgctgactgtcctgactcagctgagcatggcaaggaacacaaggatcctagaaccttagctctctacattcaaggcctgagttaatgtccccatgtgacagatgagagcacaggggccctgaaaagggaaggatttgctgagagccacacagtgagcaaggggcaaacagagtgctgagcactactgtggggaggccaggctcataacacagaactgccccatatgggacggctattcaaaagaaggtgggcagccccaaatatgagtgatgcccactgcactttctgtgtgcccacatctgcgacatgtgtcccagtctagggcacactcatggctatgctgggatgacaggaccaccttgcctctgaagtccaacacttttttcagccccgtgttgctaggtgggccttttctgctccactaagactgaaatctccccaggacacaggctgggcctcctcctcctgcctgtcttcccttcagcatgcccagcacatggcagggctcacagtgctcagggaagatgtgggggctcaaatgtggggtgtagagggtgtcacagtgctcatctgtgctctgccaagcccaggctgggctgtgggattttcctcgccttcctcctcagttccctggtgccctcctgatgagctcctaagtgtacttcccgctgtcccacctcaggccttcaccgggtggtgggctactgggagctcttctccacagcgcctcctttcctctccttcagctccattcttctctccttagagcccagccctagtgaatcccactccctggactctcacctgggctcccacagcctctggcctataaccctggtgaccatgaacgcttcaagaagcaatttagtccattggggtggggaccttcagagccccacagatctgtgttcagacctggttcttctactgaacaacatgggtgaacttggcaagtcccttaagctgatctgtgaaaaggagatgctaatccctgctcacgtggataggcatgaggcttcagagacagcacagagagtgcctggcagagcaggtaggcagctaacagctgccatttgtaccttcactgggttatttatatctaaggtcattctccctgtgagatgaagagcgctttgagggcaggggtggggtctttttggtatcccaggacttagcataggttgaaacaatgaatggatgaatgaagtgtctggggatggtcagggtacactctgagaagtctgcccctcaccataagattctggaaaacatccttcacccctcacacccagctgtgctcagccctcaggccctcctctccaccttagccccattctcagtgcttgcaatgacagccccactccaatgactttttccctcctaattacccttttaaataaaatttatgaaggttttcataaattttaaaactgatttacacactttaataaaagcatgtgatggacagggagtattaggctgcagattttctacaatgaaattgacgtgagcacatcccagattatcaagtttgggagctgccccctcccccagcctccaggagctccccgcttgctcaggattgacaaatgtgtctctttcttggcagacaacagtgagctgggacggagacaagctccagtgtgtgcagaagggtgagaaggaggggcgtggctggacccagtggatcgagggtgatgagctgcacctggtaggttcctgggctgggtcaggccgggtccccagaggccctggtcattgttgaggtccagatggaccttggaaaaaggcaccatggatgggccttggttctgttctaaagcttctcttccaagggcctggaaaagatgcctgggtgactttaaaaaccaagcaatgtattttcaaggtctaggctgacccaatcatctaatcagagggaagaggtgaggagttatatccattaagcatcagcaatgagctaagcccttttgcattctataactctattctctcagaataggaatatggctcttattttagagatgaggacctgggggctctgaaagattagattacatgtccaaattgcacaactagaaagtgacagaacaaacatttgctcccaaatgatgtatatattcaccatgccaaattgtataggccaaagccaagaaggattctctaagcttctctaagatatgatctcaatctgggtcagcgggaggtgattcgggaggggaagcgtcaaggggtcctgttggtcagctctgagccacatccattcctctcagccagctctgtctgtagggtgctgcagagcactccactatacagtttaactgtctttccaaacaattggttacttaaaccaactcttggggaaaaataacagccaatgagtatttttagagttcttgccgtaagtgtgactctgctctggccaatgaccaacatctgcttttgtttcaggagatgagagtggaaggtgtggtctgcaagcaagtattcaagaaggtgcagtgaggcccaggcagacaaccttgtcccaaggaatcagcaggatgtgtgggccaggatccccctctttgcacagcatgaggcaaaaatgtccagccacccccaggcatctgttagcagagtctgtctcttggctttgtcacttttccttttcttaaaacaaagccatgccaataaagtgatctgtgttcaaaacgtc

SEQ ID NO: 382 - DNA, 17537 bp, Homo sapiens
gtagggacctacagcgggcgcggcgccggcggtctgcggccggcggtgtagacgccccttcgccgggacctggcacccgaatccggcctgccgggtaagtagctgagcgggagggcgagggcccccggatccgcgtgtacgtgaccgaagcgccagctgcggccgggtcgtgggggcgcgcggggcgggggcctgacggggccaggccggggcgggtcgagcggccgcggccccgcgtgcccgcgctgagggctggcgtcgtggcaagtggcaccgggtaggccgaacgcgggctccggctggtgggcgtggggcaccggctggggtgggggcccgggccgcggcttggcgcgcgttgagcaggtacgcgggcctggcctagggtcggggtccggcccggcgcccccagctcgcctttgtgcgccgcgaccccgcggactcggccgacgcgccggggcgaccgaggcgggggtggcagcgtcccgcggggccgttcgtgtggcgccgctggcccggcctgcgctccccgcccccagcgttatgaaggatgcctcctccgagggctcctaccgtccgcgccgagcaggaagtgtcgtcaggaggccatttttaaagcctcctgcgggcctcggagctgagcgttgacggttttggttttcttcggttggaagaaccccggccttccctcgcggcgagcgggacgcgcctgggagacgacgatgcgcccgatgcacctggcctcgtcctccgagcgcccaggctcaggcgcgctcgcctcggatgctgcctgccatcgggggagcgtgccgacaataaactcgaaaaccagcctggcattgtctttccttgagagggtcaggggtgggctcgtccatcgaggtcctgcgcatcttttacggggggcgaggacataggaggttgagaagagatggtgaaggtttgaattgttccaaatgctgatgtcattgtgggacctccccataccggcctgcccgtcttatcttggtgtctttggggtttggggctctgtaaagccaagaaattgcagggttcaaaagaatgaaagtttcttaaccagaaaggaaaagccaaaagagcgaacgggagaaaacacttaagtctttataagttgggtagttaatgtatcccgttacaatacctctgactttaaaaattgtaataatgaacgatttatcaacgtaacattaaaaaaaaaaactacagagcattatgtcctatttaaaagtacaaatctacgtagctaaactctaatgttgtgttagactctttaaaccatcttaagtttagacttgaaatcaccaagaattaagacaaacctgggtctctagaagcttgcagtactcttctacagtagagcagagactgaggatgggaatacatctcttttctctctcttgagtcacatatgcaaagttcagcccagcatatgatgtcagtacacagccaagggttcagaaaatattgttttagaaaccaatgttatatactgttgtctctttgagtagaatacaaatagttcttttttaaaattgtgtgatattgatatctttaactaggatgcaatttttaaaagttactttcatcttggatcaaatttagccttcaaaaataacacttttttgcgtagacagtttgctatgctgataacattcattgcaaatgcaatttgaaaagagcagacaaaggatggcattcctttatttattgggactcctttctgatgtattatacccgatctgaagatcttaaaaatgcaaaatggcaattaaaaaaatccatttagatctctagagatttatttgcctttaagtaagggcatcggggccagtttttgtgcaaaaggaagaacaaagaacattttatttttgtctctgtgaagcctgctctttcattcattcattcactcattctttcaaccagtacgaaccttattgagtgccttccttggccaaacccttcgctattgatcatgataaacaagatccttaccagggagggtttccccaatcatgattgttctcaaactgcctgctgtctactgcattttctttgttatgcaaactcagctaactgcaatttccaggattcatccttggagtgaaagcagctacagatcagccagtctaaacattgtcatcatagggtgagggtggggaggcatcaaaatcaactagggagaattttaaaccatatgcctgagccccaccctaggaaatggtaacctgatctgctaggttgcatgtgagtcctgggaatcctttttaagttccgtgggtgactttgccatacacccctgcttgagaaccacttctggggctcattccccttatcttcaacactctgagaaaccaaggctgtgccggtccaggacttaaacccaagtgtttggcttctgttgcaggcctctttgtgcagcgccttgctgacgcccagggttctgatgtagaagcctacaccagggcctgaggttgtgaaactcatggcagtccacgcctgagaagagaaggcctgaaagagaaggaagagcccatgggacttgccacggttttgacttacatctgcaactccaaggctacaggcaggaagtaagaacagtgctcaagtggcagcagatactgactatggcttcatttcacagcttcacacagcagggtagcagaaaacaaagaatgtaagattggacccagttgcagctgttcaccaactctgtgatcttcaaaaagccatatagcttctccagacctgttaatcagggaagaagcagataactgaaggctggctttgagaagtttcgaggtaacataggaacctgctcatgcaggcactctttccatctgacttgggccaaggtgctccgtgattgacaagcagccagcctctgggagagcactctgatcagatcattgatagaacattcactactctacttatcatacccatttacttatctccatcttctgttagactccttaaaaacagcagcccacagcaggtgtggggataaaacagtcctgggcagtgctcattgtactcacactatgccaggcactgtgccaggaacattcaaatttctaagaatctacaaagtagatacctcattatacatcttacagagagcatcattggtgtttccaaggtcacagggctaggcaagggtggaaccctgagtctgcttgtctgtttgccccatgacagcccaggggtggtggcctcaccccacctccaggcacccacaagaatataaaatcttgtacaaggatgtcgatattactattgccattcccaagtgcacctgcacctgtagtatcaggtggtttgcagccttggctgcatagctgcatatgagaatcacctgggaagcttttaaagatcccagtatccccacctcttccccagttacagtggagtcttgcgggtggtgggggacatcattatttttgaagcttccaagtaattctggtgtgcagtggggtgaccagctgtcccagggacctcctttaaaaaataatatcccgggcacatgacaggccaattgccctaatgcaaccaaggttaagaactactggtttaatgggagatattttttctgtgcttgattatactgttttattaaactctgaatccatttctttctgcaaatttttaaggcaaaaaagaaatgtgaaaatatacgtctcatttttagcaccttcagagacccggagtcatttgatgtgcttcatgacataaaattttgtaatatgccgtgtgatactaccttatttttaccatatatgtatttttaatgcttaacaagagcatatttgctctttcacatttttttttcacatacaaagttttagacatcaagcactctaaattcttttttacaaatatttttttcttaaaatgttaagaaaaagcctataatatcacttcctttgtttcctgatgtagactcagttgatgtgcacagcagtgtcaagtcaatctccaaaatactccctgtagacagggtggggagaagaccctcacttcctgccgactaatgaactcatgttgatacagacctttgcctcatcagattcatttgttaagctaaccagtgtctgcttctctggacattactggactcttctacctgtgaagccatcttaaaaaaatatattgactgatttcttaacgaaacatctactctttgccaagcataaagttacctcccacttgcatacacccttttctcatttgtcctcacatcagctgtataaatgagaaatattcacattttataagtgagaacattcaggctcagataggttaacaagtttgaaatcatgtgctagtaaaccaaacacctaggttttgaaccttgttcttcttgtcccaaggtcattattctctactgtgttacactcagctgctttcacctggaaaagcagaggaatcaggctgtctcctgcagctgtcttggtccattctgctgcccaagcagtacacttggtttcagatggaaatctaggatcccaagcatgggtacatttgtcggcagcatttggaagtatttttcgtcatcaggatggcagtcaatttgcaattcagtcatctcagtgcaaggtagtttggcaaaaagattatgacacttaatggatttttttcctcttttaaatctgtttacccagcattttgtagtataatgcaatgtaataacattgcattattttgagcatagtttagaagccaagaagatgctttcaaacagctgacataattcagttatggcccagatgtcctgccttccccatcacacattcatattaatggtcttagaaagctgtttctgaggcaacagtttcttcctcaatatcatcctactggggaaattttggcagttgatgtctaatgttgatttttttttcctgattgattttaattgttcactgggcactttggggtagaattgttttaaaaatttggttactgggaaagctagacaagcctttgctatggtgaaagagacagaaggaatatagatataatttgtaagtggttatgccattgggcttaatgctttgcatacattatctagtttgcatctcctgatcgccctttaagtttgcttacggtaaagcattattccttgcttggcaatgcacagagaaaaattatttgctgaaggaccctgcaaatgagggacaggatcagagttggaactgtaaaccctgccactccatttcatgtgatcttcatgggtacagcagctataccctgccccagcaatgagtatggtagagccacattcaaaggcggactttggggtcagcattcctgaaaagagctgcttaagtttgcttctacatccaaaaacgatgcagtcacagtcaactaacactgagcttgctgggcatctcctgaacagaaatgtatgtggtggtccatgtagcatgtatgcgatataattggccacccacctttccttttcacattaacatttatcacagaaacacattcatttgctacagggatatttcacaatttggctgaactttgagagaagtgggtgaggaaaaggtagtttcgtaactagtttatatataaacctaaattgtagtgagtactcttgtaagtggagcatcttttctatggtaattataaatggctgttagcccctttgcactaaagctaggtgggtggttttgccacagaggtaaattatctttcgggcggtataaccaaacaaataaaatataaagtgagattcagggcatgttctgaatacagcagttaattaggcagctaagaaaactgtattttagcccctctgactatgtgattggtatttttttaaattaaaaaatggaaaataatatttttaacaggttatgatatgtcagtcatttaatcctcacagtaactctgtggggtaggtaggtactgtttctatctcattttacaggtaaggaatcaaaacagtgggtatacccaggttgtatatctagaaagtgatagagctgggattttaaactttataatctgattccagaatctctacctttaaacactatgttaccacttacttctcttcaaattttattgagcattagatgtttccagtatttagaagtcaaatgcttcgtttttaataggaacttacacagtcttttatgtttttttatagccctcaatgtcactgatgtggattctcccaaactcgatactttgtttgtttttatgtccccataataagtctttaagaaaacagggcaagtgagctcaaaatcaaaagaaaacccaccaacagtgaatgcattcagggctatttccaggtctttcttttgaagaaagataagactcagtccagagagcacatctgtgacacaccgtgcctcttgcctttggtgcgtggcagtcatctttggctcatgctgtaccttattctacattagaaaactcactgtatgttgctaaataattttttgaaaacaggcagattaataaatggacatcttatttattgcaccataaaattaatggtattcttttctgtgttttcgagacctttcctaagctatctgaaagtcctaagacgccaaatgcagaggcttttgcaacagatgttgagagtttgcacggtaggcaaacactgaccctgctgttaatagtaatttattgagtaccctttcagtgccagcatacccatgcacagctttgtctccggtgtctttttgtactccttggtcatccatccagagagtcataacttgccaagaggactcagcttcacaggtgtgtatacttggatgtgaaccatggaggacgttgtgtggaagggacgggctgagaggcttttacacagatatgcctgctgtccctcaggagtgtccacgtgtaaataccaacatcagaaccatcttcattcttccatgtggctgtgtccatttaccttgtcttggagtattacatctgagatgcatttccctctgttactagacacaggttacaaaggccaaagagaactcccatctacttgttatgaagaaacctcacatctttttcacttgcacagagggatgtggcaatgtagtaacattgcattatcttgagcatagttcagaagccaagaagatactttcaaacaggtgacataattcatttatggcccagatgtcctgccttccccatcacactgcatttgctaataatcatggctgcatgcttcatattggcacttgctcctatggattcttaattcaaaataactgctgagaaagttttgcagaggcctctccaagactctgccttcctcatgcgttctggctggcttgtgtattctctggggactttccttggctgggatgctctccattccttgctgatggacgtgatcttactgcccagtctgtctcagattttcaagtatttagttttagaataaatgataccttcccgcccccaacttttgaaaggacttagagagaaaaatggcaaaagtgccttctgggatttttgaagactcctgggggctgagcaagaggctgaaacactgaaaatgagccagtggaatcctggtttggatgattgttcaaatagaggaatcttgtcacatgacttagttgagaatttcttagggctaatatagagggtgttatgttcaaatagttggtaagcaaattgtggcaggcaggtttctttctcacacactagtattacaagactggtagatcagagcataaacagatatcaacttatatgcaaatctttggaagagaattgagaactgaggatgagagaggtgcagattggtaactggttgaccaagaggaattaagtttatttttgttgctccagagtcaaggcagaacaaggaaatttataggaaagctgatttctgtttcatttaagggtaaattgttggtaatgagaactatgtgaatataaaattggctgcctatagagggaagtggttttttgtttatggcgatattaaactatcagctgcatggtcaattggagaagatgttttaaggatttaaatattctcagaagcttcagccagtaatttggaatgctggcttttcatcaggattacctagggtgcctttacaagccacaaaaatctcctttcctttcttctctcctgagacttagattcactcgctttgagatgaagcctgggaaattgtccatttttgctctgattctgaggcttttccaagttgagaacgctggaccagatcccccttatcaccagtcttaagccttttcattccttaggctttggttttcttgggttctggctgctgctgcagcttttccgttttatctggataacaatgttgacatgactatattgatgatggtagcattctttagatgataaagtgtgtgatttcgaggatcagcagtgtcggactgggcatagaagtcatgggcctttttttaatagataatagagatgcaggtaagttcttgcttgaggtcacttgatgagcagcagaaatcctgggagttacttctgtcttccttcactaaagcctctgcaaatttggaaatttaagtgtgtgccagcttctcataatgactcctctgaaagttgtgttgtctcttccagaaatgcagtgtaatgtaaaaggccttatctttgcccatgtattgtttgccagcttgaggcattcatgtgtcctgtgcaaaatcatggtccccttacacaggtatgtgtttgaacattgaggggacagatgtttctccagccccccactgcaaccctgcaggcctccatctgcttgatgtctaagtgttgtatgcatacttaagatagagcaagtctgactgagggcttgatttcatgctggaaattgcttttgaagaaggtgactatctttcgcaaaagtagagtaggaaaagacgacactgccaaagaaaatacagcttgtcatcagatatgatgtgttattttggtgctttccaaagggcaggttttacaccagatctgagtgcgttactgttgcatctcttgagcccctgtggaggggcttttttaaactccccgacgtcggtctttcagactacctttatatggctcttggcctgttagcattgtgccagaaggaagctacctgtgttgccacccatcattgtcattgaacaaacactgactgagtccctctgggtgcctcttgacacttggagaaggactcaaaaatttcaaaagtcttctcttatactctagtgttcttatactctagcattctaatcatcatggcggctctgggaggaattggataattgttcctaattctagttgctagatgaaaaactgaggttcagaagatctaagtgactttcttaagtcatgaaagaaaggcttttagcagattccaaactagaatggattttgttatgctcctagtttgccatattctgggaaaataagtgtctttaaagattgtataaaagagtcactgtggccaggtgcggtggctcacgcctgtaatcccagcactttgggaggctgaggcaggcagatcacctgaggtcaggggttaaagaccagcctggccaacatggagaaaccctgtctctactaaaaatacaaaattagctgggcatggtggtgcaaacctgtaatcccagctactcgggaggctgaggcaggagaattgcttgaaccctggaggcagaggttgcagtgagccaagattgcaccattgcactccagcctgggcaacaagagtgaaacactgtctcaaaaaaaaaaaaaaaaaaaggtcactctgtgtatattggagtgcttacttgctctagaaaaccttcgtcacctcttgtgtcccaggccaggccatccgtgatctcctttctgctccagcctctcctctgccatgtccgtacaatactgggttattgtctttcctagaacatgtcccgttccccattctccttgctgttcctcatgagcagcaggcccacttcccacagatcattgccttttctgtgcttgaaacaccccttttccagcagccacaatgctcactgtggttgcccccaggtctctgctcagacatgaacttagcatgaggcctctcctgactctcctcacctccacacccagccccgcaacctcatcaccgtggtcttccctgtcctgttggccttgcttttttcccaagtatcttaccaccattggcaaatatgtaatctgtttccccctgtgcagtgtgtgcatcaccaggagagggactgatttgctttcattcactaccttacagcacttttgaataatgcccagcacatagtagattcccaataagatgctgcagcaggcttgctaacattgtcagtattatgggcttcttagcactcatgaaggcaaattaagcatgtaagtgagagagttggtattcaagctgataataagctataatgtagaaacaaatgtgaacaccccaggccaaagccctagctctaccacttgataactaacttgttcaaaaattgaactgacagtgtcctgtataacatttttgtgaaggtaatatgaaattatacctatgaaagatgtgctcactgacacttgaaaatgactttccctgaccaaaggctgtcctgaatggctgctatgatgtccttgttcctggtatatctgtgttcattcatgatttggctaaagtggtcatttatagggggctgagtttgaaaatgttttcaatttaggcttacttgccaactctgttgtgttattgttataacatgcgtctaaaatcatacgttgagatttaccataaaatgtccaaggccattaaaatataggataagtttgttaatagcttagccaaactcttatattaatcatgctttataattttgttttcctttagtgttacctggaatgtcagagagctgaaagcagtcatattttgggatcatgcacctactgcggcagtatataaagaaagataattaagtatgcacccaagaagtagctgcgcccctacccatcacaaactgtatagaaggatatctcctaaggattttatcatgtgaaaactttctgaattttagttggctctttttagaaatgcagataagatgaaggatattggacagcagctatacactacacacttgaacggcggacataattccttgaccatgtcacccaaacagcctgatgctaatggagcacctcggccaaatagacaagaagcacaaacccttttgtatcaaggctcagaggcagaggctgccatgatgaccattgctacatgtgcaaagtgcaaaagtgttcacaagatctctcttcaagatttgcagaagggtacagggaaggacggtatgtatgtctgcttccagtgcagcctcggtgcagctcctcccaattttcattttgtgagcaataattccagtgcgactcatgttggaaataaaactgaaaacttctcaagttctgtcaatagcaaatttaaggtaaggaactttaagccaggcaaatactattgtgataaatgtcgattctctacaaaggacccgctgcagtacaaaaagcacacccttcaacacgaggagattaaattcatttgttctcactgcagctacatttcgtatacgaaaggagagtttcagaggcatttggtgaaacacacaggcatatttccttatcagtgtgagtattgtgactatggtgctattagaaatgattatattgtcaaacacacgaagagagtacatgaaagggcaggtgcgaaacggccagtcaaagctgttgccaagctggagccaaaaagaaccggaacttcaaaacaaaacccagagcttctaaaagcttccaatccacggactacatttcaaaataagtggtcagaccaactgtcaggtttctctctccatgcaaataaagacaaaatgcacaatatcatgttgttacctgaaccaaaggaataccaaaaagatgtagtttgtattccaaataaaatgaccctgtctgagccaaatgaagtcaacctatttgagaacaaaaatgttgaagtagaagtgttatcccctgcaaaagaacctgttcagccaggtatgccattgacagttgttgcaccagcagaactagttgtccctgcaaactgtttagcccagttgatagatgtgaaggttgtcaatggtacacagcagcttgttctgaaactgtttccgctggaagaaaataattgccttgaagctgggagggataatggaggtaattctgaacgtatggtgaaagagaagggttcaaatgaacaagaaaaagtactttctgcagaaaaaacaaagtcactgacagttgacgggaatgttggaaaactcgtaggcattgatagttttcaaccttcagttcagaaacagcttaaaaatgtgaaatgggtaaggtcttatgattttattatgccaaattctagtgtgcacaacaatggaaaatccttcattaattcggaaacaattgaggattttcagaaaaaaaataatttgtatccacatagaactgcttttccttccgttgccttaaaaggtcattctctagcatctgtatttaaaaacagtgttttacgtagtcttggagctgcatcaaacccttttccatataaagctgctgtttgttttgctgaaagtggaagaaatttacacagtagctcacagcagttactcccatttgctgcatcacctgcaacctgttccttctctggagaaaagggcttattgcctgtaagtgaaaatgacttggaatctacaagtaaagtcaatattcctgtaaaagtggtttcctctaataggaagcaggaagataaccagacagaggaacacaaggcagtttcaactgtaggccagatttcctctcaacataagagtgagtatttacatataaacataactggagaagatagatctcaacagcctggggataagcctttggaattaaagaattctgaaaggactaacaacactaatgatggcccagtcatctcatcagtattttctctgagctctggatctgaaaatgtccccgagggcattaagtggaatagctcaacgtctaaaataaagtcaattgaactgttgcgcagaaagatagctcagttaattgagtcctgtgggaagccgtcatctttggcttcaaatagtgcacatcgtcgctctgtagggcaggcatcaaagggaacttcaaaagctacctctgaaggtattcaagaaatcaacgtgtcactcactggtcttggccattccacaggtactcttcagaaacctccgaatgatggtggtattactggtaatagacagcttactcatcaacaaatatatccacactttgcagatggcagtaataggaaaaccaaaagcagagtggccaggaaggctcatgttgccacgccagtgttaatccccaaaggggctgtgttgagggttcttaattcctctgagaatgcccacatcatagaggctacatgtgaagcacctgtcagcataccttgcagtgaaagacagttaataaaaccagttccattttgccctgtgagacaggcggactcagacttacagcctttaagaagtgaaagggggccaatagatatgtccccaaatatcgagacacctctgcggcctaaactgagaaaagagagtgctgtctgtagcaccatccatagaaaaactggcctcttgtatggacagcaaggaagcagtgaattaaataagcaagggagactgctttccagaagtctttctataagtagaaataaaaccaaacaagtacacttatccaggaagaaaaacaaaattcaagctgaacctagccgctgtctcaaggatccttcaatttttcaggttgcaaggcaactaagactgatagcagctaagccagatcagttgattaagtgtccccgtcggaaccagccagtcattgtgttaaaccaccctgatgtggactcgccagaagtgaccaatgtgatgaaggtaataaataaatacaaaggcaatgtcctcaaagttgttttatcagagaggactaggtgtcagctaggcatcagacggcatcatgtacgcctgacctaccagaatgcggaagaagccagtcaaattaaaaggcaaatgatgttgaaaatgaaactcaaaaaagttcataaaaacaactaccaggtagtggattccttgcctgatgattcttcacagtgtgtatttaagtgctggttttgtgggcgactgtatgaagaccaggaagagtggatgagtcatggccaacggcatttgatagaagcaactagagattgggatgttctttcctccaagggcaaataagtaaacagttactctttaaagcaagttatcttttagtttattctggtttggagtccctccaccaagattcagtagaagaaatacagactgtagaaatgagaggactgctaattcttcagaactgtaggaatattgggagctaggagtctgaacctgaagtatgtgattggaccccagaatgtatttgaaggctctgaaattgtacatgcaaattggtacatatgcatttttctggagagagcctgtgaaactgaacagattttcagtgggatctgagacttttctttgtttagcaccccgttttctgagtacatactgatctttcataatccattcagaggggcagattgagaatgttttacacatgctcttcatataaatgctacagaaaaacctttgttttggtgtgcacatccattttgtttttgctttaatttgtgttctgagtatttggtgcacaatggaaattatattttctactttactgtcttcaatttggttatagagaaatggccattcttttactccctccctggttttgtaatactcccgagtgttccgtatagcacaaagagttttgcttttactggccattttaaagaatgttttcaactgcttgcctgaatttactcctttcacagcaagtgttagaagaaagataacattttcaaatacttagcttttgctttctttaaaatacattggtttatgacatatgggaagggaacgtacctttttgcaaagacaaaaagagattacaaaaggaaaatatctaaaactattttctctttgcccttaccactcccagaaacataagtgaccaatttaaaatgctagggaacaggcttacaacataggtaaaactcgcaaacacagttcaaggtaggctcataaagttgtgaaaagggtttcatatgccctttagttttcatttgggattcatccaaagaccatgggtggatgctgtcttctctcttcttgatccctttgattcatggacactagactccctttgccatttcttctgaaccggccctcctgtggactagcacaacttccttgcccactgtttcttcctttctgtgcctttgagaccccttaaggttttccctcatgcgattactagaaaatggcaggaatcaacaaaatggagacctcccactgtttttgctaaagttacaggaacacgatccctagttttcattgatagtaacgctgtttctaatttgtcttaaccacattcatgcttaccctgctgctcagctttctcagggaagcaactccaggaacactccttccactcccctctctaccaacagatgtcaggactgtcatttatctacacatttgtgttctttagaaaaaggcccaccccctgcacaagcacagcctcttgggcagataggtggctgggtcagtgcttaagacaggattctagtcttcacttgcctgtgcagctgggcgctgaccttccaggtagagcacagatggcacaaccccgaggcagccccaacttgcatttccctccctccaggggctattcctgtcttaggcgatttgtggggtgcagtgaatgaaactaaagagttgttgcacctgaaaaagacaccagtgattgtttattgggtagtcgattggagactttgatttttttttttttttttcacatgggaaagtcttagattccagtagatggaattgcaatcctttgcagtttgttctcattacagataatcaacatttcttttgtataattcaatacatgatcatcaagttaattggtaaatttttattgaaatttaaaacttgcatttttatatatgtgtatgtgtacacataaaaatattttttaccatatgaaaattgcagtagctaattttctgatttcctattttataatgatacatgggctggaaaaatgtagaacgtttttatattctagaaatttattttggaagtacatttttataagggtctaatctcacttttggaaaatgaaagcacaggaatgatggggtctggtttatgtgaacaagtgagtagaaacccctttggatcattttattactgcatttttatttggtgctttttaggaagtagatctttggtaccacttcactacgtagagcattcgaagttttatccatgttatatattgtactcctgtggcatgaaaaatagctcccaagatatagagaggagaggagtgaagaaaaggctgtggtttttttttgttttgttttgtttgccacttttttatctcctattcctcaccacatagtgctttttcctgaaaagctggactgagaattggccttgaatcaggtcagagtgttaactgtcaacatgaagtattttcacttcgcagcatcaactttcaagcataagtaaaaacacaacttgcatactttgatggagcttaattgtgtgagtagaatatgtagcaaagctttttaggattttcagaactagaatactttttaaggaattaaaagtgtttctggaagtcaaaaatgggaaagcaaaaagtagctgtcctccctaaagagctttagaagatagcttaacctgtaggtacatgttatgaaataaacacatttctaacaatacaagggagtaggggcagacctgtgttgagtatttgtgtgggttcttaattttgaaggacctccaatcactacattttgttaatactgccaataaaatcattttcaacttattttttaaagtaggttttcttactttggtggaccagaagtgagagattgttatatttaggatataggcaaatacagtaaaagttaaaaaaaaaaaacctgacccaaagtatactctgatagactatattatattcaattttgtatccccagtcgagaacatcttgtaagccttcattaagggccacctgctgtctgttgaactagactgaacaaaatatattttctcacaagctccatccctttttctttaggacatgttatatataatccatctcagaagttgaagatgtgatgttgctcggcctttggaataatttttaaatctgtaaatgtctatatgagcagaaacaaaacattgtgtaacatgttttaagcattattgtaattcctgtgttaacagtttgtgtgtctgctgctctggttttgaaacatgtttgtatatagatacaggagttggcataaattttgttaaataaagcaacaaaaattttctttgccctttgatttcaa

SEQ ID NO: 383 - DNA, 3314 bp, Homo sapiens
ggaacatgaagtcactgagcctgctccacctctttcctctcccaagagctaaaagagagcaaggaggaaacaacagcagctccaaccagggcagccttcctgagaagatgcaaccaatcctgcttctgctggccttcctcctgctgcccagggcagatgcaggtgagtgaccgtctccaccctcgggggcccaaccccatcccacaggtctcctgccctttctccacattcctgatccatctatctaccaggaatgttctgaactccagctcccattctaccaagaccccccaagtgtgatgctggataagctatcagcaggaatggcagagcagcaggccattctcaagaagagccagtgggtactatcccttccccagagcccacctttgtcacctggagagtaggactttcctagaagtaaatggcagaggatgggaaactagaaaagagaaatattaaattattctagagtaggcctggcttctgtttctgggataagacaggtgcttctctcactgtctacttaggagagaaacccagagctcagctgacagcagaattggtacaatcactgtcctcagaacactgttaatgtgtttgctcagtcccattctccaactctgcttttcttccctggcctttggtggctcccctctttccaaggatgaggcactacggcaggccccagcttccctgctttctagaattccaccagcactgctctaccagccctcatccagaggctaactggagccagtccatcatgcagccatgaacatttactgggcacccactacatgtcaggctctaggaaacaggatatgacagtatctagatccctccacttacaccctggccattagaaagcagcactatcctagacaccacaggactcataagggtcttggaaactcacctgaaacaaagcaaagtcaggagaggaatgatcaggagcctctgggatttcactgtccctaagacaggtatgctcgccttcaactacatatggaagaaagatttacagaccaaagtctgctgttcttccctttttcagagcaggaaattgaagccccttcctccaggccactcccaactccaggctatcccaggctcccaaatgcccaggagttctggagccactaagcaggtgcccacccagcagattccatgggtgcccacaagcagacagacttttccttcaggggagatcatcgggggacatgaggccaagccccactcccgcccctacatggcttatcttatgatctgggatcagaagtctctgaagaggtgcggtggcttcctgatacgagacgacttcgtgctgacagctgctcactgttggggaaggtgaggagcagaaaacagcccacaccctcctggaaacactccacagagacccctgccttcttcccaaggagctccctgggctcctgtgaacacacatgccaggaggtctccttagagggtgagaaaagggcagttaagtttgtggagagaggggaaggttggttccagaggtgctgctgaagtaagaaacagcagagtgaccaagcctgccatatttagaactgggggcatactttggcatagaatacaaactgaagcaattccacctgtgtttctagggggaaccgaaccctgagaaacctggtgcaattaccagaattccaattcctggggaccgactgtccccttaatttcccctcagctgcagccctgccccagctgtcacctgctcttcactgtctctgggctgtataccctgtgactccacccccatcctcactctgctctctgtgcagctccataaatgtcaccttgggggcccacaatatcaaagaacaggagccgacccagcagtttatccctgtgaaaagacccatcccccatccagcctataatcctaagaacttctccaacgacatcatgctactgcaggtgaggcacactcctgccactcttgctcttcttggtccagttggttccactccccctggaatgccggcccttccctcctttccatcctggcctcttggttagttcctatgcctcagaggagagggaagattgtgcagccccatcactgtgtcggggcccagaagttcgttggctgacctggactttcttgcctcttccccaccagctggagagaaaggccaagcggaccagagctgtgcagcccctcaggctacctagcaacaaggcccaggtgaagccagggcagacatgcagtgtggccggctgggggcagacggcccccctgggaaaacactcacacacactacaagaggtgaagatgacagtgcaggaagatcgaaagtgcgaatctgacttacgccattattacgacagtaccattgagttgtgcgtgggggacccagagattaaaaagacttcctttaaggtaagactatgcacctgcctggattggctcttgggagaaagatgtttggggaatatctgagacctggagactcaagtagtgggggactccttcacccactagactgtgatatttctctctggaaagagaagaggggactagactgagctggggagaaattagggcctctgcaaacttaccaggaggcttatggtggatggtgcttctttggaaggatgaatttgcaacactccacccactccaggtcacagatattaggaaactgtgcccactgggggtgcagtaattataaccaggtgtgtcttcagaggctggtacccaacgtggttaatgggctggtcctccatggtggacatcagccctccttgcccacttctgggtccttaaacagccaacggtcccacatacctccgatctcaggatctgggggacatgacggaggctggcccctgggatgaggtgaagcagtaacaatgtccagggccagagcttggcagctgggggccaccagcggcctgccctgccctctggtctcccacatgtaggctgtgcaagttggccttttctaaaagggggcttgagatggaagagagggcaggacccggaggagcatcagctcagtccttccactctctattcacagggggactctggaggccctcttgtgtgtaacaaggtggcccagggcattgtctcctatggacgaaacaatggcatgcctccacgagcctgcaccaaagtctcaagctttgtacactggataaagaaaaccatgaaacgctactaactacaggaagcaaactaagcccccgctgtaatgaaacaccttctctggagccaagtccagatttacactgggagaggtgccagcaactgaataaatacctcttagctgagtggaaaa

SEQ ID NO: 384 - DNA, 36530 bp, Homo sapiens
gcgcgctccgctcggcagcctgtgggacgcgaccgcggcgctagtctcgttcctttgtgctgcggcggcggcttctcgagtcctccccgacgcgtcctctaggccagcgagccccgcgctctccggtgacggaccatgtcggcggcgggagcgggcgcgggcgtagaggcgggcttctccagcgaggagctgctctcgctccgtttcccgctgcaccgcgcctgccgcgacggggacctggccacgctctgctcgctgctgcagcagacaccccacgcccacctggcctctgaggactccttctatggctggacgcccgtgcactgggccgcgcatttcggcaaggtgggtgcgaacgctttaaggcgccattttccccggctgtccagtgggagtcggggaaagcgggtctgaggtgcgggggacgtggggcgtgccgggatcgcggggcggaagcgggatcgacggcgcctgtgccccgaggggcctagggcgcctgtgcggcagcgctcgcggcccggagtcgcggcggggcagccggggggcgcggggcggaagcgaggtcggtggcgcctgcgtccggaggggcctagggcgcatgtgcggcggcgcgcgtagcaagtttctaacaaggcgggctccaagggtcccggcgcctgttggccggatcctgtgcgagcgcgcgcgcgcgcggatggtgcggggccctccaggccgggccggaggcgcgagcgatttcgcagagccgggtattaggccgcgaagtcgcccaggcggcttccggggagccgagctggggtcagaggcgcgcggggaatgcccgggcgcggtcgaccttctggttccgcacagcctcgccagtagccgagggccgcgctgcggacgagctcagccgaggagcaagcgccccggcgggactggaaggccccggcagctgtgtgggatggaggccggctctccagcttctgggtttgctttaaggcttgtagctggccccgcttcagcaaaattagtgacggctgtgtttatcttggatctaaattactgcagaagtggttaaattaagcagaattctcttcccgtggaggctttacgttcccctcttttttcttaaactgaaaattctgggggaacacagtgctgctttaaggttttaaaaggttggatagctaccgtttcctcatctgtgaagtcgttggggtacttgctctcagaaatcttaaataagatttcaccgtgcatttcagaagtgactggttttaattaatatttcttaattcactgaaattcagggatgtgtatagtgtttttctcgtaagtgatgagatggggttaaatggttttgcagaaatatgtgagaggtaatgtgaaataagttactttaagaaggcctggccctggtaatgtcgttaccagctgatgaagttgcggtttaccttgctgcccctggtgctacattcacaaagcagctgtgtcttttggaaagcagtttctgattcttttaaagtggaaaagtcacttttctttcaataaaagaaatgaaaaggagttttgacgatcggggtgggacaagcaagttaatcagtcctcaagggctgttaggttcctgtggcactgtctctgaagttgtgcaaccgtagtacctgctggagaaaacaggtgcccaggggaaatgagtttcttaacaaacaaaagtaataaagcctcctccctgcgcttctgcgtgcagccttaaatagatttcccgaggcagtcagtaatctgaggatttcctccctccagagtgtctcttgctgtggtttatttttacactaaactttaggattctgtcctttctaccctggttgagaacgacacaatactgggtgatagtcagtgaacaacgatctgtagaatgcttaaagcctcattacagatggtcacttagaaaatttaatccagtggtgcctccacttgtctctggggattaaaatagttactttaaaatggtaatttttaatgtgtattttatcacagttttttaaaaaacaccgactgaaatcacttttcaaaagtctacttccatgggactttgagtagtagctttaccttggtcatcaaatgttgtaacaagaagcagttacttcattgtttccagctgtctgaatcatagggctctttggtcttagatacggaaggggccttagaaagcccctgtccagtgtccaaacattcccttctgagaagaagccgttaggacagaaatcaggccaggactcagggctaccgcttgcgaagtccaggctttctccccagccctgctaacggctgccctcttacacaggtttcaggctcgtgttcttagaaatgtgctagtggtgcacaagatcccctaaccgttggtaagactcgtttgttgccagaggactaaacgagttgtttaaaatctctgttgtagcttttataccatattgaacagtatctttccagaattccaaatccaagtttctaaattgaacccaagggtaacaggtttaaagccagcgagccctgaatagctgatttttggtacgccaagtgattttcatccgttttatttttattggatttgcaacctgttcatcttatcgctaattaatactttcattttcacccagtgaattaataaaggcaataaatagacatcagcctttactcccaggtccaagttggttgaagagggtgttttgaatctgtgtactcttcatctcacaggagtgtttactgaaagcctgaaagtgctaagagaaatggaaaaagaaaccttgagttgagatggtagtgtcaggtgttttgtcttcaggtgaggtctctcctcttgaagagaattgcttgcagtcaggcatagcttgttccctaactgcattgtgattggagtgagggaaaatgagcagtccaggatcagagaacgtgggttgaacagttgcttggcacatggtaggcacttggtaaatttgttgaatgcgctaaattattttagccagaggctatcatggtattggtgcttggccacaaagtcttaacttgccatgttagtcacccactaggtgcattgctcagttatgctgtaggcttttttcccccatagggttttgaaaagagtaaaaaaatgtggagaatggggcctctattgattattcaatgagtattcagtgctggcttgtgtaaaagtgcacagttgtgcacactatagaaaatagtctttgactatgacgagtttactatggctacacaaagtttgtggggttttttgttgttgttttttgtttttttgagacagggtcttgctctgttgcccacgctggagtgcagcggcgtgatctctgctcactgcaacctccacctcctaggttcaagtgattctcctgtctcagccttctgagtagctgggattctaggtatgcactaccacacccaggtaatttttgtaattttgtatttttgaaaccccagtatggggtttcgccgtgttggccaggctggtcttgaacccctgacctcaggtgatccacccgccttggcctcccaaagtgctggaattacaggcatgaggcactgcgcctggcattacacaaagtggtggtggtggtgttggtgtttgagatggagacttgctctgttgcccaggttggagtgcagtggcgtgatctcagccctctgcaacctccgccttctgggttcaagcaattctcctgcctcagcctcccaagtagctgggattacaggtgcccgccaccacgcccggctaatttttttgtatttttagtagagatggggtttcaccatgttggccaggctggtttcgaattcctgacctcaagtgatccacccgccttggcctcccaaagtgctaggattacaggcatgagccactgcgcccggcctacacaaagttttttaacccaccaatccctttaacgtttttgtttagaatagtctgtgcaacaaacagttttgatagaagtcttggaacagcgcagtccaatattttctgattttggcttattcaattgtagggaaacaaatatttaaatctgtatagtgttagtcgtctttttgcatttttctatttctatctaccgtctttttcataaggacaagggaatatgttatcttaaatgtcctttaaaatttgcatggcattgggaaagagtgacttaatctgttaaaaaactggtaacaatgccatttgtcaccattatagaatttcgattattcatgtaatattgaatagtgtactgacatgtctgcgtgttttcattacccctcttgttttcgaagttggagtgcttagtgcagttggtgagagcgggagccacactcaacgtctccaccacacggtacgcgcagacgccagcccacattgcagcctttgggggacatcctcagtgcctggtctggctgattcaagcaggagccaacattaacaaaccggtaagagtgctggtgatggacttggtttgcttttgctttttctttttgcagttataattatacacggtattgctttaaatcgaggccttaattagagtttgatatctttacctgagggcagactggaatttatgtttcttcagttgtttgtggaggatagtaggccctttccataggaatgctttctgttcatagagtgctttcacctgttgtgtgataaactgatccagggtgatgtgcccaaggttatagctggtaattaaaggagcctggccttgagcccaggtttcctggctttctactcatagctgccttagcctcatttccacagataattatgaaaacattttcatcctgggaaaagcatggctattaagtcagctccaaagtgagcttcagatacaagttgatgccttgatgcagataagtgctaagtatcatttactaagtgggaagagtaagtgacttgaggacttggtatttaaacatactgacaggaacataatcgtgccagatttttcttcatggtgtgttttcagtatcatttcacctaaaccaaacacacacgcattcagattgttaggtacttagttgtgtgagacaagcagcatctaataaccattaggttgtctgactgggagcagtccctagactcagcgtcctttgctgcagatggattagtccttagactaattgataattttcatctcttaagacctgggcatgggctctgggagctggtttttatgccttttttactcctatctttaaatgctttatagtcatcaaggtcttggatgcaaagtcgtctttctacttttctttcccaagattcagtccttcatgataaccaggcataaggttgttgctagtccctcttctaaaaacccagctacccacctgagcagtaagtaattgagaaagaaggtgtttttagccatgatttaaaacaaggatcaatgggaaagtggggtaagttataaggcagtttgtccccttaaaagatgtgaagtagaaaagaaaatggaaggtggccaagagttgaggcctgtttgttactaaactgaaatgtgggatatgggacaagttttaaggttgtgctgccacttctctccttccatctccacacgtgtgcctttacataatgtatatttctctgctgctctgttgcttgtcttcataaattcgagagttatgaattacctactcaatacccttatgtgctgggcagcgccttgtgtttttccttcttccctacccctgtcccctggtagaaagggcagtgtgggcttgattccttgggcaagtcattaactttgtggctcaatctctttatcagtaaaatacagttaataattccatgaatggcagtaattaatagtatggaatttaagtatatcatttttgtaggttaattttcatcaaattgttacatagcatcttatttagagaggactagagaaattgtctaacactgctttccagacctttttaaatcaagaagcccccttttcaaagtgtcttatggcagttcagtattttcagtagataaagggagtgaggcagaaagtgtgctgctgggtctcccaccttcctctcagatgcctctagataacacctcctggaaacttctaccgcactctgcttcttcccaggcaggatcctaaaatctttttcttttcagccctccctgtatttgaagtatccgggtagacatttccaagtcctcacatgtgcctagtgcatatcatttggcattgtaaagcatcctggaatttctccttagtgtatcttaggtagttgtggtctgctggcatgtggagtttacatccgaatctgaggcatcatctcactctattatgtagtgggtgaatttcaacacctcttgttatgggcacccagtgactctagaggacacaatagcccttttgttagctccccaccccgcctacctgctgactcatctccaggtagacagtttctctcatttctcatataaactcaggatgccaaatccaatccaggtttttctcctttgttgtgtccatttaattttttgaacctgttgatgcagtgttttaagccaatttctagtctgttaatcttttggcatgttagctactaacagttctaagttcattttcctcaaagttaataccacagacttttttggcagtctctgaggtgagattaccaaagctcgtatgctgcctagaggcctgtgttctcgatttccccaagaggaaatgaagccagctttcctgtgatttgtttttagtgaatctatattgactagccttggtgcgtaattagcaaaccttctctttcatatgcctcttctagaattttggcatttgatgttgtctttaatttttcatatctagattggaaatgaaatttttctttatgaaaacccagggtgcccagcctgtcttgagcattctggcactgctcccagttccctgtagatcactcaatttgctgtggctgcgatgtgactgggctgagctggaggcccgggcaccttcacctggctctttagtcttacgtatcttttctcttggctaccttctctcaggatgtccgggcctttctctagtgtttgctctgcccctaaagattgtccctgcagagcttggtagttttgctttttcattgtcatctgttaatatcccaccgtgacagacccttacttttttgtcttgttccaaggatagctttaaagaccttttttcctttttagcctttttcttttttggcaaaactttatctaaatctcagctccagttttcctgggaatgtttttatgtaatttttatttgtctttattttgtactacttctctcccctcctcacctctcttttggggaggatagggctaggttttcgctttttaaaaaatccgagttgactggatagtttatagccgcatggttttctgtgtttctgtcttcaaaaatggatttttctgtttagaactttacattgctttatagtctctttagacctttgtttaaataaatgtgcacacttttccctctaccaagcactcgagcctttcatactcttatttttctgtaaattaatctaccactgttttttttaactttgggtggccctcacctcatgtttattcctgtgagtatgagttggtgaaggagcttagctatttagtgagtttaggaatgaactgttttctaagtgacccacagttgctgcactcctttttatcttggtctcttaattgtgtggtagtctgcgcagttcagcttccagtgaggttgcagtgtgagtattcaagaagtgttgctgatcgagaccatcctggctaaaacggtgaaaccccgtctctactaaaaatacaaaaaattagccgggcgtagtggcgggcgcctgtagtcccagctacttgggaggctgaggcaggagaatggcgtgaacccgggaggcggagcttgcagtgagccgagatcccgccactgcactccagcctgggcgacagagcgagactccgtctcaaaaaaaaaaaaaaaaaaaagaagtgttgctgtggagcccccaggatttcccagtcttcattttccaccggaaagcactttcttctcttgattgctgtgtctgattgcctttcccctctcttgcttagctgatagcctatgaagatggtctttcaggttgtttcattcatgcagtgtagacctgggttgactgctgatgttcacagtggctttcctgggtctgctcacttttctctgcctctgtgtgtgcttcacctccccaccgccgccaccccaccccctctgcactttctgaaccaggaatttcattcttatgaagcttggtttgctttacctttgtgttcttctccctttcctctaataaatactgaaaatagattgggaatatttagtaaatattccctctagtaaatactgaaaaatagatcaactgttgaacctcaagccatcttgtctaagttgtggtcccacttcaagttcaaagcagaagattcaagatcggcattgatgatgttgactcgggttagcattggggtaggcacagaggaaagtgggtagctgagaccatatgtcagctattatgtgctatttcttggccttgatgaccgttttaatgtgtgtgtgtggttggttggttggcttgtttgtttggttacttattctgggtttatataaaacacacgtgctaagatccagtgtaaagtgatttataaatcactgttgagagcaatcacgctgtcactactggagaggccccaagatatttggtcaacgaccaaatatcttggcccctcctggttcgttctcatcctccattcacgtatagatttctttgtgttctgcttcagatcttgctcaacatgttttacttcaaaaaaggatgagaaggtctctgatctgtgttaatgacattacttccaaaatgtcagaagttttgttctaagtatgtgtatattttgctttttgttgtttcaggattgtgagggtgaaactcccattcacaaggcagctcgctctgggagcctagaatgcatcagtgcccttgtggcgaatggggctcacgtcgagtaagtgtctttcgtttattctttccagctaaagatgtagttgaggatgttttgtttaaaggcagtacataagcaggcaaaagtcctaaaactttgttttcaaaattagtaatgtaattttgccttttagaacagttggtgttagtgaggaaaattgtgtggattaaattgatctctagaggagggggtttaatttcacagcagcctcaatattcttgtcgagagagtgtatttgaactgaaagaacagttaactaattagatttggaacttggcatcattactttgccaccattactttgccactaactagttgtgtcactgtggtctttaaacttttctttgcctaattttgatttcaaaacaagaagcttggattggattaaaatatcttttcagacctctctggctcagaaggtttctgaagaaaattcacttttctaggttttgatttccacgtcttagcagatgtgagaaagttatgttttaaagcccattgtaacttaatggttgatagttccttgtaaaatatgactatttacattaaagacctcaagcttgctgtaagcttctggtactggtggcattatttttaaatatctttcgttttagcccagcttacatcagttagcttatttatgctttgataggacaatcttaatgtttacgtgtagtcttttagaaatgagatcttatatgcaaatcattagccatggcattatacatttattttagttgttacatttatttgtattaactttttcttaaaaatttatattataaaaatttttcttctgcagttcacagcattaacaaaatggatgcggttttcacccttaaatgttgagtgtaagctatagagctataataaccaaaataaccaatatcagcttttttgttttaccttaagtgttatgaataattcatgaaaattaattataaaccacattattctaatcagaaatgtgaacatttagacttcggaggaaataaaacccacaaaactagtttaaccctttggtttccatttcattgctttgactctgtattatattgaaaatagatcctagacagcaaaaccatacaggctaatgcacgacgtgtgtaggtaccggaggctgtcaatcatctgtgaatagcttagcttctgttttgttaagtttattggcaagattcgccattagtttgggctgtgatccttatatagtgatctggtattataaacatggcctctgtttactgttacattgcagggactctcgcgacttcatgtatagttgtgactaaaggtaatgtagaaacaattgatagtatgttttatatactagtagaacattgagatgattctcagtggattgctttaaagcaaagttatttgtgcatttttcttagctgtagttagatttaaaactctaatttttataacaaactttcattataaaatacggagtcataacatgattaaattgcttgtcatttattcaaacagtggataattagaagttgatatttttaatgactttctaaataatactctaattggtcctgaacattttattacaaagatgttttattcattttatggatagcttaatcttttcagccaataaatatcacgatgtcctttttttttagtaggtgtcttttaaaaaatgagaatcttttatttacaattctgtccttggttacagggccctcaagtgtctcttttccaccaggtgtggctgagatgggctcaggtgccagtctgtttttccttctcagtataagagccaccactcaagaccctgcattatggtgacttccctggactgagctttcatattttttttagaagaagtatttagcctgagctacctagccaaaaacaattataagcctttggcctggagatagagcacaagtaatcattattcattgctattgtatatgtggttatttagttttaacatcgagataaaatgtcagttttgtcagtaagttaatttgtaagttgcttcttgatttctgcacattttaataatttaccccatttagtccaccaacgtgtaacagtttgaatctccaaaataatggtactaggtctattttattccctgtaacgctgctcatatggtaaagtgtagtcctagcaaatcataaccgtttcttttttttaagacgttcaaggagcatagaattaacttatttaaagttagtttttttcattcagaatggacgagattattaactcttcatattacatgctataatatttaggagataatataaatttttccttttcctgtgaatagattaaaagctgccttatatcagtattattaaattcatttgctcttaattcctgctttgctttttatatatctgctacataaagtgcccaaagtcttaaattgttgtgcttttttggacatcaggtacataataataagggcaagtacactaagtgtctgtggctagaatggtttgttatataacttacttgttaatgtaggttgcatctgtaagataacgcatttcagctgctgtgcatcgtattaaattttctagcaccacacgtgagtatgttaatggactttctttttcttttcttattttaaatcttgagttttggtgccaagttttctgtgtgtgaggctctgtttctggcttatatgttggtcattattatttgccattgtttacatctaaaaattaaaacgcacaggattaaatctaacttgtgaccaaactaaatgtttgtgtactttaaaggacctaaatctctgtgtatggagttttcagcaagcacgtgaagttgtcaccatccttaatcttgcttatatggtagttccatttttccactgcccccaatatttgagtgctgcttgcttggtactcaggtattgactggaagaagaggatatactattacaaaaagattgtcatctcatttttcttttgaacgatggaacaaataacagcataacattaagtcttaatgtgattttggaaaaagacttgaaaacttgctgtctgctgataattaagaagaccttttcactactagcattgtaaatagaattcgggccttggaatagctgtactttcagtaatttggtaccaattacttttggctgatttgtgtttattttcttgagagataagtggaggatgtttccatatcaaccagctagtaaaatagctttttgccactgagtagaaataaaaagatttagaatgaaaccagcatgacttgcatctcaggcagatttgtaggtccgttttaatactgcattatacggatgccagtgtttaatggcagagtctcagaacttttctacaggagaggatttcttgagaagccatttattctgtggtaaccagattttcagctgggctacatgtattttaacttaattatttttatcttaactgggatcatcagatagcttgagaagcatcgatagccttatataagcaaattcagtgactcactctagaaaagtctctcttgcctagtttaggaagtaggcacagttggctataacaaagcctagaatgtgatgttagtagactattctaatgccacaaagaatactgcttcactttaattaaaagaaattttaattaaaatggaattgtcttagtttggatcataattgaccatttatgacccacctttgtttaccatagagccctgtctagaaaccagattttcattaggtcaaatacaggtgatgagcatatttaatattagtgttaaattcatttgtgacttttgcccttagcaaaatgtaacctagatttacttttagctattcattttgaaattcgtggtttctttatatttgttcatttttttgcccatcagaataatatttcagttacaaaatctaccagaattatgactctgaattcatattttctgattttaggtcctctgaattctagtcatcctcacatcctacttttgcctcctcttttttttttttttttttttttctaaaaagagacagagtctccctttgtcgtccaggctaaagtacagtggcatgattatagttcactgcaacttcaaactcctgggctccagtgatcctcctgcctcagattcttgagtagccaggactataggcacataccaccatgcccaactaatttttaaaaatgtttagtagagatggggtcttgctgtgttacccaggctggtctcaaactcctgggctcaagcagtccttccaccttggcctcccagagcactgggtttacaggtgtgagccactgtgcagcctccttttatctaattgtccccacagcagacttgtctggtcttggctattttccggttgttaaggtgtttcaggatggaggaatcagttcctgagatagttattaagttctgcctgctagaaagggacagtaagtgggttgatatcattctagacttgttaagaaattgttcagaattttgattgtttttcatagcagcttgattaaaatacagattttaataatttccttactacttttataggtagtgctttcaaataaaaccagtgtttgctaaatccaaatgtctttctcccttgctaaattatagcaggagcatgctaaatatttcatcagactactggaatgatggttttacattttaatgtttgaaaacataattttggttcaattgcagtgtaaaactattctcagtaactttaaacttgaaaacttggcaccaaatttatttaggtagaaactctttaaaaatagtttcttcctattattaactgaagaatatatttaagaaagtcttcataattaaataagagtttggataccaaagggttaaaaatacacatgtatttcttttgctgaagatatcttagatgtttgctaatgttttatctttacaaatggacaatttagtaatgttttttatctttttttaatgattccatgtatttgcttatttccatctaggaatagttactaatgtatttgagatacagcataccaaattttaaagtaaccagaatcgtgagttgatggtttttagtccatactgttaaacttatgttgaaatattgacatatttaaattggcttcatgctaaaaaattaccaaaggtaatttaaaaggcagtgttttagagcagtagctcatggtcaaggtggtcacatgacaatggcttaagctcagtgtgcttctgcaccttatgttgtctatgtatttttaatccaaatgttgcctgcaaatatgtgatcccttattatttaagtttcctgtattatgaaccattgcccgttttaaatcacacagaagattctgaatctgtaaaaactacacatgtcaatgttttacagctacgtaattcgaattgacttgattttttcaagtaatcctagaaagggggagcattccatatagaaactgctgaaactgccacaggtgcttctccgaaaaccttacagttgtggcattgaatgttcagtatcgcttcctttctgcacacgaggcatactgttgaggtatttgttgcggtgattggttttaacgctaatctaggaattcagatagagatgctttagatttgcatgctttgcttacctaatttatgatatctacctttctatttgtaaactaacaatagctaagttgagatcagaattttaacagaaatattatttatataaaaattgttatcttttattgtcacatggcattaacaataagaaaacatcctgaaggtgatgtgacaactcggattctaaaaattatacttcaggtatttcctgatccgtggtttttcaaaattgaaacaaagtcgttctcatcagaatggcttctcctttgttctggaattgtggcactataagtggaaactggtgggaccctggctggcttcagagtggagcctaatttttaaagttctttaggggagaattcttagatataaattttagtgaaagttctttgggggagaattcttagatataaatttgagtgtttgaagagacagggtcttcctgtgttgcctaggctggtctcaaacttctggcctcaagtgatcctcctgcttctgcctcccaaagcgccaggattatagggttgagccactgtgcttggcttagaggtaataaattttaatattctattcagaataagaaaatatagcatataagcatttgtatctttagtaaagttactgccagtttgattttttttttttgcaagttacttagcagaacatgtaattcacagtaaagatgattctgtgttgtaccacattttaatattcctgttttgaaagaatagtagagagaaaatgggtggcctgctcagtgattgcttttcgtagtcttggtgaatgttacaggagattgaatttatagataaaagcacagtcatcgtagtttccacagtacattgcagcacatttagcttgctagcctaaaaatctgatcatgctgagtttcttttaaagaaagttaattttagaacttcaaactagaaccagtttgaacctcaagttgaccgttgtctgagttttaaaaatctcttcccattttcaaagatttttcaaatggatgtaggagaggaccaaggaggtaggctatagctgtagaacaacacagtcctattttcagaaacgaacagacacacgttttaggtcaggcacagcccatgtatccaggtgcatcaaactggggatgctaagttcaaaagtgcgtctgttttgaagatttcatctgaaaataatgtgtacactttcattactaccagtttgcattcaaaatagtttttgagactctttaaactcttctggatactttaattttccctttggaatagtgtgtaaacacagtccggatgaactttactactgatacctcacttgaggttgacaggagtggccagcagttagtgcctatggtcatgtaatacactaagtcaatacctgtggagtgaaatccggtctctataaaaaatacaaaaaaaatggctggacgcagtggctctcgcctgtaatcccagcactttgggaggctgaggtgggtgggtcatctgaggtcaggagttcaagaccagcctggccaacatggtgaaaccccgtctctactaaaaatacaaaaaattagctgggtgtggtggtgggcgcttgtaataccagctactcgggaggctgaagcaggagaatctcttgaacctgggaggcagaggttgcggtgagccgagatcacgccattgcactccagcctaggcaacaagagtgaaactccgtctcaaaaaaaaaaaaaaaaaaaaaagaaaagaaaaactagttgggtatggtgttgtgtacctgtggtcccagctactcaggaggctgaagtgggaggagcacctgagcccaggaggtagacgaggctacagtgagctgtgattgcaccactgcactccagcctgggtgatgggagtgagaccctgtttaaaacaaacagacaaaaaaacctgtggattgaagggtaaaggatggagtatttaaaaagtactgtgacagaacaaagtactgtaagtactagagttgagtgtggatggaaacacagaacctgtaaatcaagtgtttcatttacgtgctcaactcctactgaattttagcaattaaaacatgaaaactgaaatattggttaacaaatgaaaatagaatttaaagacctgaacttcttttatgatctttaatgattatttgttctaatctttgacttggaaacccaaattattttcagtctaacgtacttgaaatttaactattaaaaaagttggaggaactcaaactttgaagttagggctccctttctccagataaagcacattgcctggtttattgtaaggcacttagaacatgtaaccaaaaacactcaatttaggaataggaatgattgttttacagctaagtgcgctctcagagtcttttgttttacacccctctcaagtttacctttagatatttttcttgttgtttaatattttgtgacagatttggcaacttttaaaaagttgtttgaattgaatagtgcataaaattaatagatgtttttcagaaaatccattattaagagtagaggaatgaggagaaatattcgttctaaagagaatcaaaaccacaatgagagattgtcttacccccgttagaatgacagttaccaaaagacagtaacaaatgctgacgagaatgcagaggcaaaggaacgtttaaacactgttagtgggaatgtagacttgtacaaccgttatggagaagagtatggaggttcctgaacaaactaaaaatagaactaccatatgattcagcagtcccactactgggtatatatccaaaagaaaatccatatatggagacatctgcacctgccatgctcgttccagcactattcacagtacccaagattggaatcaacctgtgtctatcagcaaatgaacagataaaatgtggtatatataccccgtggaatactatttggccattaaaaaaacaaaattctgttattctcagcaacatgtatgatcttagaagacattatgttaagtaagccaggcacagaaagataaatactccatgtactgtacttatgtggaaggtaaaaaagatctcatagaagtagagagtggctcatgcctctaatctcggtgctttaggagtctgaggtgggaggatcacttgaggcctggagtttgagaccagcctgagcaacatctctcaaaattaaaaaaaaaaaaaaaaaagtagccaggcatggtagcacatgcctgtatacctagctacttgggaggctgaggctaaggaggatcccttagcccaggagttccagggtgtggtgaactatgattgtgccactgcactccagctggggcaacagggagatactctgtctctttaaaaaacagtggttactagatggaaagataaattctagtgttaccttgcactgtagggtgactaacagtaattttttattttttttgtatggctaattcagtacaaatggaaagtgtttgaggtgatgcatatgcaattatgctggttttttttaatccctatacattgtattggaatttacaatgtaccccataataaaggatagaggaatatttacagtatcatctatttggttaaatgttattcagcagttctggcctgctgcctttttttgtataacctatggcccaagaatggtttctacattttttaatagttgagcaaaaatcaatagaataatattttctaatacataaaattagatgaaatttcagtttcagtgttcataaataaagctttatgagagccatgctcaattgccttgaggctgctttcagcctacaacaaaagaattgagtagttaggactgagaatgtatggtctccaaagtctaaaataattactacatagtcctttttagaaaagtgccttctggattagatgatccttaatgatcatttcaggccaatttctataatgtgcactacacagttgagtgaccacttgcaagatttttaatgtgagcagggatagtagagatgatgaatgtaggtaaggagaggaaatgagaatgaggactttcaggggcaagagatggtggtgtcattttgtgttgtgttcctgagtcaggtaccaacagatttcctctgagtagaatataaatgctaacaaattaaactgtatgttgtatacattcagcccttggtaacaaggaaaatgatagaattgaaatgttcttgtacctcactagaagcagagaaagggtgctggatatttctgtttccgataatgctgcatagatagtgccacttaaatgtagagcaaaattacagtctcctctaagtaattcctccagttaccatgtgtcctagattccgatacctgtccaatacaatttctagaactttttcacctccccatcatgtctgccttctagtgccccaaaattatgtgagatgctagaagttgtttgacctgtgattgttcttgcttccttggtccttacgtacgagtacatagcatgattgggccagaatccgtcttttgagctcttctagtaaagtaagttttgagataatacctaagaccacatggaaatttggttggtctaagtagaggacaagcacgtatttaactacctttggcaggggaaaaagtgaagtgggagagcttaccagtgctacctatgtgtaggctgacactctgaaacttcagtctccaggaatctccatatgttggcactattttgttgattatttttctataaggttatatttctttggaagatcagtaaacttgctgttctaacccaaattcagtgtagtcttcagcttctgaataaggaataaaggaatcgaatgtgctttggatgttcttttaacaatttcagaatgttggcatgccctttgagcatctaaacttccctcagcgaattggtatttatttatttatttagagatagaatcttgctctgttgcccaggctggagtgcagtggtgtgatctcggctcactgcagcctctgcctcccaggttcaagcgattctcctgcctcagcctcccaagtagcagggactataggcatgtgccaccaccacactccgctaattttttgtatttttagtagagccagggtttcatcatgtaagccaagctggtctcaaagctcctgacctcaggtgatccacccgctttggcctcccaaagtgctgggattacaggcgtgagccaccgtgcccagcatggtatttatgattctaagtgccatttcaaaaatctgtttgctcttttttattctctggtccactaaagagtaatctttactgtgggctttatttcatatttttatttgtcctaatactaagtggtagcttctcatttctctgtttcttgattttggagagcaagtctatgcttatctatagaaataatcagtttgtaaacttatgttctccttgaagagtttttgaattttcatgtggcaacttatttttctgttcacattcttgacagaatagaccctcccaggtcatctgcacttctgatatcttttgaaagtgaaatataccattaaaaaaaagtccagctatatgatgaagctgtcacgtaatattagtatattttctatttcaataacaaggtgatctgattttgtacaaagtataattaatgtaatacaatctgcccaaactttggtgcttccttttcatttaattcatatatcaaaataaaaatattatgcaatactagaaaatactcatggccattcatagccatgcagtcttaataaggctaataaaaatagtgactttagtctgtaatagtcctgcacatagccgccttatatttttaagaattttgttggtttctgagattctcaattctcttttatctctgatcagataggatttgggtcttttttcaaaaggtgtaatgcatttatcttatgctttaaaaagtagagacgcttagctagtgtccatgcacacttctcatttccaaggtcagagctctatgatgtctgcaaataacgaatacaaggctattgtcagtccttataaataagaaaatattatttgtccctaattctgtagttttcactctcaaatgcggggttttttttttttttttttttttttgcattaacagtaaccccaagaaaggcatcagggttctggagtggttgtttgagtgacacagcacaaggccttgatttcatcatgcttttgctgtggatgtagtgtagcttgctgaacaggtatggaagctgtctttgctgttaagtacttctcccgtttgtttatcaacctgcagctaacaggatgtctgcttttttacaggtttatttcacagagcagtgtacattcttgtcttccaggggaacttcaacatggagttacttttgatccctcagttttaattcagtgtctaaaggtttacaagttcaacttactctattttattcagctctttcacttactctgccatcacttcctacttgaatctgagttttagctactgtagaggtctcagacctttcctttttagtactattagccaggtaaaactttggttcttgtgagtggtagggatgagtttttaggacagtattcaaagcctttttaaaggaaccaactactcaaatgctctacaatgccaaaaatacaatactcctgcaggttttcccaagcaaggccaaaacaatcaaaatctgacagaaaaacacagctgttcagctctggaatctgatgataggctactttttaatgtcaggacatccttctaaacttccacttacagtgtcacatgtaagcatgaaggctggctcgttggtgagccattgctttgtttttaggaagacagttatgaatgccatggacaatctcagtacatgttgtttgttatgattttattcacgctaaaggaatgggtattaaaattaagtgcatataatatagaattcagtttcaagtctgaagttagcgtaaatttagattcttcagactaacataaaacatgattttgagaagttaaataggaagatgccttttttagaagtttagcatatttagtttatctcccaaatcttgcttagaaatcaaatgtatataagagaagttagttacagagctagattgattaactacttctttaatgaagatttgctatgaatttgtttactctttcataccaccttcagatagctagtcagttcagcaggagcagagaccaggttagcacgcggatggggtgtaattcagtgtttttgtgttgtacagcctgagaaatgccagtggcctgacagcagcagacattgcacaaacccagggtttccaagagtgtgcccagtttctcttgaacctccagaattgtcatctgaaccatttctataacaatggcatcttaaatgggggtcatcagaatgtatttcctaatcatattagtgtgggaacaaatcgaaagagatgcttggaagactcagaagactttggagtaaagaaagctagaactgaaggtgagaccgctttgcgggtgggaagagcacacttatttttcctttctgtaatatgttttctttttatggctgagcgcaccttcgagatgagaccttcacttcaggtggtaatgcgcctggtggattgtgcggtgacggtggagatttctcctgtactgccactgcgaagatgggacttaacaaaagggaatgtgagggaaatactgatggcccaagtgtaaatgtctatgtggaactttttgagcacccatgtttacctgccatgaattagattttttaatttgttgtatctgtttgaaatatatctattaaagaaaatctgccactgtgcctgaatttttttttttttttaatttgcttcttgtaaatgttcctgggcttataaaaattgctgatggtctggcagtaaaacattttcacattcgggaaggtgaatgttttctgtactatttctgtactatgatttgacctcagtggtctctgtacctcacatgtgtgttgacttatcacagcaagatctggtgtataatttgatcttgaggatttaagtccctaaggtaagttattttcgttgtaagtattctcccaccattttttttttttttttttttgctctgtcacccaggctggagtgcaatgctgtgatctcggctcactgcaacctccggctcccaagttaaagcaattctcctgtctcagcctcccaagtagctgggattacaggtgcatgctatcacactgggctaatttgtatttttagtagagaaggggcttcaccatgttggccaggctggtcttgaactcctggcctccagtaagccacctgcctcggcctcccaaagtgctgggattacaggcatgagccactgtgcctagccgttttttgggttttttgttttttgtttttaaggtaggtttgagtttgcaaataagcagtcagccagtcactcttgaagttgaaaacatctccctttcctataggaaaatcatctatatctatatataagatgtcttaggccagttgtcatggctcatacctgtaatcccagcactttgggaggctgaggcaggaggattacttgagctcaggagttcgagaccagcctgggcaacatagtgagaccttgtctctatttaaaaaaaaaaaaaaaaaaaagtcttaataagaaggtaaatgtgatagcttggcaggcatatttagtgaacttagggggagaggtgggagtgtgaagtaatgaagcagattatgagctcagatttgctgagtataagcacaaagttttgcccgttggtttaaaaaaatcaaccgtgcaagttacagcataaggaaaactgagtgactatcagttaatcacttaaaaatctagagattttggttaaatttcatgaaccaacatcatcttttctaccttatttaatgagtgtgtccaagtgaaacattttttccctataaagttgataaaatgtcagtattatgtacttcacaactatatcttgtcaccataaaaattcctgtgataagactttttatagtaatgtatgaacttaacagttttatcaaattcaagatttttatgagttaagcatttctggaaagatgctaaaatcataagcatgacatgaagatctgcataaaattcaaaatggtcttttttaatggtgatgtattcagcattgtcatttatttgtaccatgttttaatatattttttctaatgtagtttcaacgcctttttaagagcatccactttttaaaaaaatcctttgtcatttcctttaattaaagcctggttagtattgtagagtggcctcatgccctcatgcacgaattgtacatgtctgtccctgtatgtcactgtatagtctaaatgtccttgaaaaatgatttatgcttcattttctcttattgctgataaatcttaaattctgtttagtatttttaaaaagagatcacttaacatgctaattggactcaaaatgcacctagaagagttcgtaaaactagtctcagagtttctaaggtcagttgaattggccaataccacattgcttaattaccctgaaaagcatttctgaggattccttgtttcctaatcctcgttaactacataaatttggtttaaagagtcctgctgactttgggggttttattttcttcctttagaaggaggatttgttttggttgaccagtgattagaagttcacattttgcacattaaactcaccatgcagccttcccaaactatacattcctggtcccaagcccgagggtgctaatttagacaaaaatatggttggagccggcacttctgcttaagtgttgcaggtaatacgtagacctaacaggttgagccactgttgcaggtacacagtacatgactgatgtttctgtgattatcacagttgaaatatttcagccaagatgcacattacttcaaagctgctcatccttggttttcctaatttgtatactgaccatgactttactaatttcctggaacttctgatggttctgtcttttatgtagttgacagtccttagatttgccacactcgtcacaagagtgtgtttatatttttttgtgtctgtgtgagcatagatgggcatctttagctcacctgcactcccaccactcgtttccctatgggaaaaggtgattttttgccccccttttaccattacatactgagagtgctgatgtcgggtattgggagtcattcttggtcattaaaacaggatttttttttctgccaattacctgaatgttctacatgaaattgttcttggtttcaatagatatataattatttccatattaactgaccagttttttagttttgaattaaagatatgttgctttagttttcgttgtaatttctggcatcttgttttgattttgtttaaatgtgtgttttaagttttgcttaatctgaattattttattaggtttttggttctcatgccagagtaaaagaaatgataaattcttttttcctcatttaacacatgtatataaaatactttgagtaacttcacatataaaaatatttagaagagtttaagctgggttttttgttttgtttggctttaaaaacaaaaaaagttacaggtgccagggataatatcttggctgcgtaacttgtatcttaccaataaaacttagtgcgttctgttttcctagaatttaagagttacaaatattgatgcttttagtgtggaatttatatttacaaaagtaattacttccagaaagttttctggctaagtcacctcttaaggagatccctgtaaaattcaccctttaaaaaagaaaaagaaaaagccaaaacactttggaatcctgagtctgaatgttaaccattcttccccacaaaaagtagtgtctgcttttagtaaactactttcaagtattttaaattggaggaattttcttttggaagctgttgatgtaaaagatcttaagtgaagaagaaagacttggccttttgtattgcttgaatattaactgtcttggaaggaagttatgctacaagaagtcatactttcataaaattatttgcatctgtgtcaaatgcagtttagtcagaacgtaagacataataggtgtggacatgaactctggagtgtgaaataaaatccacagttacttaagcagtctgttttgatggaaagtatcttgggataatactttcctcagtgtgggattttgttcattttagatggtgcaaggaagtatcagtctttaatttttttgttgttgtttttatcaatcatttgctctgatggtatgatgcatgggcttcaggactccagctgcaccactgtataaaactcagttcaggtttgctagcgttcttggttaatcttcaggaataacccaatacaattatttttatatgtactccttggaaactgtggtcgtttttcaatgatcttggttagaaaagaatgccagtcccttccatgagtgaaaacttgattttgctgattgataattgttttggatggagctctagagtcgtggggaagaagcaggggaacacagtgagtttaaaaactgacccaataacttcaatttcacaattgggacatttgccccagaagtaggctgtggtgacagcagatctcaagtgtcaaactgacttcacagctcggtcttaatcacataggcatattactgatcttagaatctcattcatactgtgaaggtattgaatataaaaacaccttacagaaaaaagtatctacaacatgatgatttaaaggtaaaattaccggtggaaagttttaacactttcccagagtggatttaacctggataaaggatctctgccttttgtccttagctgttcgtgttgagcagggttaaagacttggtaaaggagggcagatatgaccagctggtttgttaaatgatagatgtttattgcttgaaacttgagaggaaataaaatgcctcccaggagtaaatttgtaatttagttccttctagtttagttacatattatagcactttaactcctgacgtcctcactgttttcaaatttgcagtatatttgtttataaaaatgtggccaggatgatagaacacacctacctaattgtgttcaaataaggagtgattgttttttcttgatccctgaagatgtgacgtcttgaaatacagtctgaattacacttccagtccagacagtgtctgcgttttccactgttaaaagtctccatttgagcaaacctcatgggcctgagttgtcctcagcacagttgtggacactccagtgggaagcaaaacgaagactggcacacttgatcacaagccgcttttgtattatttgagccaaacccccagtcccccccggtctttccagagcactcagttcccttctctgtcctttgtcgctgctgcttcctgctgcctggagtcatcccaaccctctgcactgctggaatctgggccctggcgggtcccgcgaaaggtcacctcataatagaaaaacaatttggttttaacaggaccttaaaaagttgagtaaaatgtgctctacagcagaacaaagaatagttccaggtaatggctggtgggaaaccaggaaggcagagtgtctttccttgctgccttaatgagaggacattgaggcttccccagtggaagcagcagcaggatgcactcagttcagtggaaaggccacaggcgggaggggtcctgggccatttggccacctctcaagggttatgggtcaacacctgggacccttccacacagcacctagaggcacagtaaaaggtagatgactaatctaggtcaggatctcaagctttgcctaagttcattgggtgaaactacttggcagtttctgacttgtaaaatgtctcctgatttagtcttggggaatataaccagtatggcttgggtcttgggagtaatgtcctgctggctgattggagcacttcatatcccaaagtatgactttatagagtgctttttggttttttatgtaaagattaaagttgtgatcaggcatttttcctaagccttacatgtatctgcaggcatgcctggcaattacagtcctgttttcctgtgtgtcagtatgagtggtgcactggagtgtcttcactccacctggtcagcactcccataagcctctgtagtggcacgaccttggtgtccaattgcattacttctgtaatgcagcagaccttcccggacttgaaactaagacttttttcatggtttcaagctgcttgatcctgaatagctcatacagttacagagttactgggaactggctttaggggttttgtgcaacccccaaatttcagatgaaaatacaaatgcagaccgtttagttgccctgggcatcagccccaagtggagcatctctgtgtgtcccccagggtcaggaatgtgggtttctcagccagaggcgtgctctactggctctagttctcacttaggagggcaggcagtgaccacacctggcttgtggctgtatctctgagcagggaggctggaggttttgagctagtcctagataggtttccatcctgaacgttgtgtctcaggtgtactagaagcctgtcttcccaacagacacctgacacctgcttttacagtcagcaggtgaagaccctttgaaaaaagtggtcatactaacattttcagaagcattcaatcattgtgtaactttaagaatcaatattaagataggaaagtatagtgcttcctttcccaaactgagtaaactgatgaccttggaagacatgtttttctgaaatgtctgtacaggccacccttctcaaatgcaaggtgtaattaaatgattccttcagcaatggcaacaggtgtgggggaaaatgccacaggtggtagggtcttacaggtccaaatccaatgttcttaaaattttgagaggccagttttaatttcatggcttacaacataattaaaagagataattgcgggcttaatatctctaccagccaattaacttatgtatagctactaggaatgaagaaggtggcactcgtgaaacagcattatccaaggctctgtgacagctggttgtgggaactacaccgtatagagaggctgtatctatggagatggaatgaaattctaaggttctgttggaatgattcccacaatagaatcttgattggtaaaatatggaagcctttcattcttatcctgctttattagagaaaccatctgcattaacaaaagatgcatctactcaatggagcagtttctgagaggtccctggtcactgtgagccttatagttacaggattaattgttgctgggagactagtgtgtttcccgctgcctcttccctgggctgcccttaacgcggctcttccggcccctagtggcacctctgccttcagggtgcatgtccctgcacctcgcatggccaggcctgcctggatggttgtgactcctcaggttgtattacaggctatgccagctactgatcatttgtttttgtttaccttgtgtttttgtttctcctggctagtgggtgggcttcatctgctgatgtgagtactattctaggtactgggcctagtgaaggagaagacaaacaccccagctttcgtgaagctcttctctgttgcggttttctaacctgcttttcagaggtgtgaaattgcaggtaacccctagttgccactttatccggggaacattggcatctgaacgccaattgagtgtgtaggtattttaagctgtctgcattgtattcccatcaaagtccactcttttgtacaaaccgtgttcgtgtgtggctttgcaggattgcagcctgtgggaggagcaaacgttgacccgctcttggctgcaggttctctgtgtctgcgtgccatgaaggctcctggaggttgagacgactttggcacacttgggggatctgctcttccaccacccccctctcccattcttttttctttttctttctttctttttttctttttttttagatggagtctcgctctgtcaccaggctggagggcagtggcgcaatctctgttcaatgcaacctccgcctcctgggttctagtgattctcctgcctcagcctccccagtagctgggactacaggcactcgccaccacgcctggctaatgtttgtatttttagtagtatttattcagcatgttggccaggacggtctcgatctcttgacctcgtgatccacccgcctcggcctcccaaagtgctgggattacaggcatgagccaccatgcccagcccttttttttttctctctctttttttcaaaagatgccctgcttacacactgatctcttaaaagtgcatgcctgagtcatagtgaaagtggagcctggcctgtggaagattttttaaagctttgaatggataagactaaaatccaccattgaatgcctctggtcttaaagcacttgtatttgaagaatgcttttggcctcctacctaatcagacttctgactaccccccatccccccaactacacaaatcacactgttctgtttctctcccccatactaatttcagaaatcgggtttctcattctgtacattagcatctttgtagaataatccagatatcatatatacagtataatcaaaaatgactcgtgggcctctaaaactagagctaattcaagctgcaaagttccattctccctatttttaaatgtttatatgaaggaggtatttagcactgaaagttgctatttgtggtgtatattctttggcccagaaataattctaagtatctgagttaaccagaaatacacataaaaatgcatttatgagtatgttaattgtggtattcatgataggaaggaaaagggaagcagcccagacagctgcagggaatttggttaggcgaatcgtaatacagccatagggcagaggaaagattgttttgaaattaactgataggacatttatgccatggtaaatgaataaagcaaggtgtaacagtgatttgttagaatcctttttggtaaaaacattcttaaacacgagaagccgttcagacacatggagctgcttgttgtaagaagtgagtcttgctaggattcagaggcggaggtgcttgtgcagcgtgggtatgacatggggcattcgcatctccacagtacagagaatggtcatcttggaagtgaagtgcccgtgtagctttagcttcacatttctaacgctttctgtattttggtgtaattattttactgtattttggtgctcagatcaaatgccactctgggacagtgctgacagactagtcttgagtctcttagcctttacattattttttttgttaatggaaatagtggatttttttaaaaaatcaggattgttttaattgtatgtaaatttaagaattgtcttagtattaaaaaaaaatctgctgaatttgaaaatggagtttggaattgtttccaggttatataaccacttcatgtcttctaaatgtccagaaaattagaatttttgccatcaagtaaatctataataggcatctgaaattccatgaccttaaaatctgcacatgtcaagaaatctttttgattgtggaaaagtttttcagttgtgtgctaagctcattagtgacctgtcgatttttttttatgtgattgtttaaagtgttcagtgctcacacaaaataatgtaaactgtgtgtctgaacacttatcttgttacagacaaaggaatctgaaatagtctttgttttctgtgcagctcaaagcttggattctgccgtgccactcacgaatggcgacacagaagacgatgctgacaaaatgcacgttgatagggagtttgctgttgtaacaggtgggagtggacagtttcctgttagctgcaacaacaatccaatggttgaagacaccaaacagcaggagagtggttctgttggaccaaaagaaatagaaatatatactgtgtcagcaatgcagaccccctgtcgttgcaggaatcagtatgcatattatttctaacataagtttttctcagatgttttgcactttgttgtccagtgtctttttaaaaatgttatactataatttgcatatcttgggcaagtttgtagatacaagaagtgttttgggtatattctgtggacatgaaaaatgtaagtgcaatctttattctgatttgaagctattgcttaatgtgccttgcttatttttaatgaggtttgcatttttaattttctgacatatggcctttgggtgaatataccgaacatgctacagttaatattttcaaaccaatataccacaaagaggacgactagcagtaaacactgagaaactagtaaatgtggttctgactcagcccagtcactccagcatggaatcttttacccaggacttggttgctctggtttctgtggtcttcattctgagtctgttaaaatggtaaacactgtgtttcacaacacacattttatacattaatgtttttagtatattaaaacagtattcctgtttccaatttttaagaagcagaagcagctcagttcttatagcatttagaatatctaaaatgatttgtccatttagctattgcttttttattcaggtgactacaaaaacatttttagccattctcttaacatgtatgaatatttagaagtagattttttttaagtttattatgtctttatgcaaattcttcactggggatgaaaaaaagaagagtatgtatattgtttcccaaacccacatgaaaaaaatcatttgtgttcactaaacttaaaagaaaatgtgttcatctttctggaagctacagaattgctgtggtcaccttcttcccagtagagaaattcagatcagttagtatatttaaaataataggttttctgtagtcaggggctatttgaccttagctaaagatccataacaaaactcaaatcctgctttttttaaaagtgaccttgctaccttcttttgaataggcagaagtggccaccttttattcctcagacattagttatttgttaaactttatccaagctggaacatacttttgaaaaacccagcccatcccgtctaccagatgccgagtccatacaccctgtgtttcccatcatttgatttatgacactctgactgagtaagcaatgtgttaaatcactagagattactcgaggctttccttgtgggacatggcactccacgtccactggaagcttgagggagctgccttcacagtcctttgagaatcagaccaaaagtcaggctgctctcctttaaacacttgagtaacttcaaatttttgttctgccaaaattatttccaagaattctacatttttgaacaactgtgtacagctatctttgcattttaaatgcccctagtttgagactcgggagggtcaagtgtccccacccctggaaagggctcggataggagggtgcttgcttctaaatcctgatcttctctatggggttggctggaagagaagtaggatcttgtctgaaacctcatccccagcattgtgtttggatgttcgtgggatccgagggctggccgggcagacagaagggaagtgcgggtcttggctggcagctgggagcagaggaagggagagcgttggaggtcgtgatgtgcgtgctctgcctcagtaggtctgaggtgcccactgttgttatgcttagttttattagattctctgtaacaacatgagcttaccaaccagccttgattttgagattaaataattgaacagattaactgggcactgaagtaaaattctacctactttattctcttagtaaaaactatacacacaataaacaactgtcaaggttgccatcatatttgagttttgtcacctaggaaaacattgtttatactttgtttttgaaaaaattcatatgaatttcccctgggaataacttgttttatttcagtttttattttctattgaaacacttgttttctagtctaggattttagccaaatagaaaagctatcatttaatttgggggaaaaaaaatctattgtcctgtgaagaatttatagcaattattaaactatgttgcttaaatataaaaaaaaaggatgattaatggaatatttagataatgtttccattcactgaagaagccgtgatcctttattggcaggaagacttgcaggacatatcagaagcctctgtcagaggtttacaggaggtgagatggaggggaagccctctatgggaagagtcccatggtgtgtgacatgttagggtaatcggatgtatttaagctgcgtcctcattctaaaagttattagaactgagctcttctagatttaataacatgctttgctttggtagtgaagaacattgagataaaatctagtattaccgagttagagataattttagatcatcccttatactgttacgtgaattcctgtgaacatgaatattactgattctcaagttccagtatacagaagaataacttgtcattgcctgtcctggtgtacccagatgttccatgatggacgttttatcccataagacgtctccctcctgatagatgtctgtatatgcagattaaactaccaacattttttccagcaaaggtggtttttgaaagtaacctaatgaaaccctggctgccatggtcattttaattgctggactgagaagaagcgactctgcgttgtgctgttggcccaggcctgcatgcctgaggactgttggccgttacagttccttgctgtggtcgccggtctctctgtattctgccactgctctcatgtggcatttggcagaagtactacgtagatttctgtgctactgaaaaaaataaaaacagtggttccttttaatagccctgatttgagacttaggagagggtcaagagtccctacctgatttatgaggagagaagattttttaaaaacctcatgtgatgctgtcatacatagttcaaagagcttccttaattcacttcatttacctttttttccattttcgcttgagaactagagaagtttgtgttctgttggaaccctctgtagaacactttacactcagttctgatggaccttttcaggggcgattttttaaaaaccgctctcgaaagtagtcttaaaatgagagcactttattgatggcttttcaggactgtgttggtatttttcatgcagtgtatttgtcagcttacatttttcagttgagctacctgatgctactgacacacacatgattttcctatcttaccaggcaaatactactgttaacgttttaatagtaagtctacttatgcacattgattttactttgaaaaaagaactggtttaaaaggaaaaaaaagaaactaaaattctttaaaattgtaatggcagtgaagcattttatagtttctcctccctcattggttctgaattttggtgacaggtgtatttcttaatgcagatatgaaaaacagtagctccgtatcgaatacattgacaaatggatgtgtcatcaatggacatttggacttcccctccacgaccccgctcagtgggatggaaagcaggaatggccagtgcttgacaggaactaacggaattagcagtggattagccccaggacagccgtttccgagtagccagggttctctctgcattagtgggactgaggagccagagaagaccctgagagctaaccctgagttgtgcggttctctgcacctgaacgggagtccaagtagctgcatagccagtaggccttcctgggtggaagacattggggataacctgtactatggacactaccacgggtttggggacactgctgaaagcatcccagaactgaacagtgtggtcgagcattccaagtccgtgaaggtgcaggagcggtacgacagtgccgtgctgggcaccatgcacctgcaccacggctcctagagacgctgacctggctctcggaaacgcaggagtccttcctggtagccagctcagaatacccatgtagcagcaacttgaacgaatgtcacaacttgtacgttttttatatacttcaactttctgaaaaagtaaacttcgacaagttcccagcaactgcttgtttgtgcatgagtagggcttactaagtgcatagatgtttctacagtgaggtgtcctttttataaggtgcacttttggagtttttctgatgccaatctcaacattgtctttttaatactgtcaccagatattgccatttttctttttgttaaaagattatatgatcaagataaattggggtggtaaatcaggtgcctggtaatttatctctttgcacatgggcatcattttaaaaagcttgcttccactcttttctgtagaatttgacggaacacagctatttccctatgcaaggtacagccttacaaagatttctgcagtgatttgtgtgaagaagagaacgtttgtctttttcaatgaagctttgcagatcaccatgtggttgaaggttttagttgtggacacagtggtccctccttaatgatgaagatcactgccttgggcttcatggaaaacaggcccagcctggggctgcgtttggatttattgtttttattccacacttcctacttggtctctggaagttttaccacatgtaacagattcctttatatgtagtggaaatcactatttgtagaaactgtcaggtcaaaatatttaactgactgttgacatgtattttcttttttccttgtttttgttttttggggttttctgctttaagatatataccactatgtatatccagttaactgagagaattttgactctcttaataaaactgcattaagtttttgattttgtagaaattagcttttgtctaggcaactagtggttatactctgcaaatattgtaatgaatttttacttttttgatttttgtaataaaaattggtgcagataaaatgtcaaatgaacaaaccagtgttctaagagtgttactaacattttgttctaaaactgtccttcacaaattgaataaaaaactctcacactca

SEQ ID NO: 385 - DNA, 13237 bp, Homo sapiens
gtttttaggcctttgccacgcctcgggagcgccacgaactcaacagccgcccaagccgccttccggctcgcggtctgcggacgcgctcggagttgggggccttcgccaacagctgccgtaccgtgccgcgtcgcagccgcacgctagcggggtcaacggcgcggcaggcgcaggggtcctcgccaaggttcggaagaggaccttgaaaatggcttctgggcatgcgccacagcggccgttacgagacgcaaaaccgacgccttggaactgagagcctagagggacggagctcggcgcaccatgaggctcccggggcccaaggccgaccgtgagagcgcacgaggttggcgagccccgcggggaggccgaggcgcgggtgcgggcgccggcgtagccgcggcggtagcgtcacgcagcgaggccgtgcgtgcgcgggcgtcagggcggcgctgagttgaggacgctggcggctccgcgacgagctttgttttttcggttgggcatgctgcttaccgcaggatgatggaagcgacggcccgtacaaagacagaagcgttggtttcagtgagcagggtttctttttctttttctttttttttttttgagacggagtctcgctctgtcgcccaggctggagtgcagtggcgggatctcggctcactgcaagctccgcctcccgggttcatgccattctcctgcctcagcctcccaagtagctgggactacaggcgcccgccactacgcccggctaattttttgtatttttagtagagacggggtttcaccgttttagccgggatggtctcgatctcctgacctcgtgatccgcccgcctcggcctcccaaagtgctgggattacaggcgtgagccaccgcgcccggccagggtttcttaatacaagttggtgactaacatgttgcctagattccagattaaagtctagttgttggagacacatgtgcaatagagaactaaaatttaaattcaagttcgtgagtgaattgaatagatgttggagcatctctagtttatcaaggacactttttttccccctcgaaatttcattttgacgatgtgtggaaaaatttttgaaaaaatttgaagttgagggtcttagcaatgaaatgggcagaactcctaagattgctccgtttgtatctagttgaactattcatgatagtaaagggaaaggatggctgttttcgctcttagtagggtttgacgtagtgaaaagttacgctttctgagcctgtttgcgaatgtctgaaaaaatactggatacattctgtggattaaatggtagtccacatttaatccacagattggctattgtgaataatgctatgaacttcggtgtataaatatctgttcgagtcctgctttcgtgtttttttttttttttttgagtactcagaggtgaattcattatttacttttaagcgttctatttaaattatatactgtagtaaggagtaagaaagaggctttcgttcttcccttctgaactaggcagctatttctttcaggtatcgctttacaaaaacggttttgtatttattacagctgagtcagtgctgattctctcaaatagagcttgaaggataaatcttcatttttgtttcaacaaaacttcgaaacaaaatggaagaaaataatctacaggtaatgccacccttcttagctgcgtctttgactcttaagaattatcacctggatgtattgtgagataattgcaaacaaaattgatcacatttaggtcctagcatttcccggggtgttggttgaggtaaacaagggtatacatagatgaaagagtcacatttggtgtatgtaagtaaaataaatgtttttacttttatcactaggtgttaaagtagcaaaatctattttaaaaacactctaagtagtgttccccaatgtggttgtgtatatggatcacctggggattttgttaagttgcagattctgtttaaggaggtctagggtgaggcccaagcttttgtgtttctaaagtttctaggtgaagatgccactggtttggaaaccacattgggagtacctagggtgtagctccctgctgtccagtagctacacatggcaagtgggcacttgaaatgtggctagtggaattgaggaaccgaactttaattttttttttttttaagacagggtcttgctctgttgcccaggctggaatgcacttgcccagtcacggttaactgcaacgctgaccacctgggctcataacttcatttttaattttaagtttaaaattggatatttgattacattattggaaaaaagtatgtttggaataacttgggtatgtgcatgtatattttaaatgtaaagtttttaaatccaatacagacaagtatttctgatgaaggttttggaactgagacgcagaagtacaaaatatgtagcacactggattttgaagacttaatgtgaaaaacaagaatctaaaatctcttatattgattttatgtaaaaattatattttcgatatattggtttaaatattctaattccgattataattccaattcttgggctacaagaaagttgcctacttgtattttatctattggacagtgctacatcagatatcaaataccctttggactacttttataatactgctgtataggaatagtaacagctattacagattaatcttataaattctgttttttcttggggtcatgttaaagaaaaaattagtctgactttattgaggactgttgcaataagaacattgcaaagatgaagaatttgaccagatagggtgatcagatatcaggggtagaagattctgtctaaactgacttagaagtattcttattaaaactgggctaggcagcccaaagataggattggggccagggtttgaggtctattcaagaagatggctcagaggaacctgactgaagtttggtcagtgagagagtcttttgctggtgtgttggaatgttcctacagatgcccaactactcaggaggccgaggccagaggattgcttgagcccaggaattttaaaccagcctgggcgacatagtgagatcctctctctctcttaaaaagagtgttggctgggtgtggtggcttacacctgtaatcccagcactttgggaggccaaggcgggtggatcacgaggtcaggagttcaagaagagcctggccaacatggtgaaacccgtcactactaaatacaaaaattagccaggcatggtggcgcatgcctgtaatgtaatcccagctactcgggaggctgaggcaggagaattgcttgaattgagggaggcggaggttgcagtgagctgagatcgcgccactgcactccagcctgggtgacagagcaagactccgtcttggggggaaaaaaaaaatatatatatatatatgtgtgtgtgtgtgtgtgtatatatgtgtgtgtgtgtgtgtgtgtgtgtacatatatatgtgtgtgtgtgtgtatatatatgtgtgtgtgtgtaagtgtgtgtacatatatgtgtgtgtgtgtgtgtatatatatgtgtgtgtgtatatatatatagtcagtcattataaatattttccagcctcctgcctacttggaccacaggctttggcgactcactccacaaaaggtcccttatggttaggagtcatctaattgttttcattgaatacattcattggtaatgttcccttcagctgaaactaagctatagggagcatacagctagattctctcttgttaaaaggcatgagaggatgcttacatgaactgtggaggaaatgcagtgctacctaatgattttaggacaaagggtatgtgaaggccagtgtgtttttcaaagtgattgggggaaataaagtttttttttttttgccccttatttaatttctgaagtcatgcatgatttagaacctgtctttttttgtttgtgaacttcagtgcagtagtgtggttgacggtaattttgaagaagttcccagggagacggcaattcagtttaaacctccactatacagacagcggtaccagttcgttaaaaatttagtggatcaacatgagcctaagaaggtaggtatttctctttccaaacatttaattattaagactagtagactagtcatatgaggtgttttgtcaaatggattagtatggagagacttttcacaggggttattgcaatagggagaatgccgtaaccacaagatctgcaggtgtctcaagagttaagcaaaaggggtttttcttttactggagaagtgaacaaagctagaaactagggaggtgggatgagagggtggtttgaaaggacagtggaatggggagccttaaggagggggctgtttcctcaggctgtagtgcagggccctgggggaagaagtaaagtttgaataaagtatggttaaaaaaggaattttcttcccattgatcagtggggacaagtattcatgataatcatttgaggcaaagaatggaaacacaaggaatcttatctaagttttatggaggagggtggttttttgcagtgagccctttcctggaacacaaagcacaggtggattcctttagcagatgccagaaacacagggctcagacagaattcagcattgtcaggttcaaatgtgaagaaaatcttaagattttatagttggatgtgatcttgtaggtaccgtacttctagagcatttagttagaatatcaggcaaactggtattgtagccacaggtattgtggttcttttaaaattagatgataatgggccgggtgcaatggtttacacctgtaattccggcactttgggaggctgaggcaggtggctagcttgagaccagcctggcaccatagtgagaccctgtgtctacaaaaaataaaattagctgtgcatggtggtgcgtgcctatagtcccagttactcaggaggctgaggtgggaggatcccttgagcccaggaggttgaggctgcagtgagctgttatcacctgcattccagcctgggcaacagagaaagagcccgtctcaaaaagaaaattagatcataatgaacctactcggttaacttcagagtaaagtcataattgcatataatctacatccatccatccatacctggttactatactaatggattggatgtgaattagatgcgggtaaggtgaatttctagatgaaagctttctttttctgcttgatgttgaagactcagtgaagattcctgtgtgtgaaggtttcccttaactccaccactactgtttctacacttggacacaaaggcgtaggtattagtttatatctttgtagccatctaggcatgtgtattcaggtaaagcatctaaaattggctttttggcagctcagagttcagtatggaatttcagatggtttgaggtaattgtttaatcaaataaatgtgtgaggggtgaaagctaagttttagaaagctttgtttgctgaaatatgctgagaatatttgactccaaattctgattctgaatgggaaaactgtgtgtacgtaattgtttctcattagttcaatatagacaataacagttgttctggaataggaatggacctttctattttagtgtgatcaaatagaaatttgcctatgggcttataaagtttcaggttagtgtgtgtgtgtgtgtgtgtgtgtgtgtgtgtgtgtgtgtgtgtagcatcttctgccaaaaagatccttccatataatactttcattattttattactgatatatactccactctctcctcctcaaaaaaaagtttttgatcatacttctcttgctataaatgtctttgaaataacattctgtctcatctacaggttgcagacctgggatgtggtgatacttcactcttaaggctgctaaaagtcaatccatgcattgaattgcttgttggagtagatattaatgaggataaattacgatggagagggtaatacttagtttctgaaagaattatgcgttaatctaaaactaatggcattattgagtttagagaaagtgttgattttatatttgttttaaaagattggggccattagggatcttcaactcactgaataatcaggctttgccataacactaaaaatacctgcattttattgctaccaacttaaagaatagcctcaattaaatgattataataatcaaagcattgtaaattaaaattcagatagcaaaatctcatcactttaatgctggacactatgataatttatagcagaggatttaaaatgccccagaacactgaggccaaggctccaggccaccgcctgcattttgaaccatagcatttctcctatctcttgtatatatagtatatatacattagatttccacagattgcttcaagaatattctttttctaaagaacaaaaatctcaaaatcactgaatcaaagtaagctggaaaaccaaaagtattacaaatgaaaacaatataacaatattaaatattcagtctttttttcattggccagtaacttcccactgtgagaggaagtttccccatgacctggtctttaatatgtcaagacaaggaaaacaggctgtgtcagacttatatcaatagaggtagaagataattatcagaggatctgagttctgtagctggtgagaatttttaaatagataatgttcagaaagtttcttcaataattattttgcagggattcgttagctcctttcctgggggattttctgaaacctcgggatctgaatttgaccatcacattgtatcatggctccgttgtggagagagactctcgtttgcttggatttgacttgataacgtgtattgaattgtaagttttaaactgatacactgtataactgttcatttgaaaagcctgaataagtctcagtgatcttagtgtcctaaatataataggtcttgattattgtaaggaaaactgctcattggttgggaatatctttttactctgcttttccaacattttacttagaaatttcaagtatacagataaattgccacaaatacatagtaccaagaatacctatacccccctttatccagatgttaacatctcactttttaaatcatttgtacattgcaccctccctctcctgttcacccctcctccatctccctttagagttattttttttcctgaatcaattaagggtatacacatggccttttgcctctactaaaaaattcagtttaaaagttggaggcctcacactacttgacttgaaaatgtactacaaagcagtagtaataaaaacatcgtggttctggtataaaaacagagacatagaccaatggaacagaatagagagaacccagaaataaatccatgcatttacagccaactgatttcaacaaagacaccaagaacatacattggcaaaaggacaccctcctcaataaatggtactgggaaaactgcatatccatatgcagaatgaaattagactcctatctctcactgtatacaagcatcaactcaagatggattaacgagttaattgcagacctaaaactatgaaagtactggaagaaaacaggaaatgcttcaggacattggtctaggcaaagattttgagtaagactacaaaagcacaggctacaaacagaaatacacaaatgggaatatatgaaactgaaaggtttctgcacagcaaagaatagagtgaacagaacctatagaatgggagaaaatacttgcaaagtattcatcaagggattaatatctagaatatacaagaatctcaacagcaaaaaaaccccaaataaaaagtgggcaaaggacctgaacagatatttctcaaaagacatacagatggttaacaagtagatgaaaaaatgctcaacatcactagtcatcagggaaatgcaactcaaccacagtgagatatctcaccccatttagaatggctgttattaaaaagacagtaaatgctggcaaggatgcagagaaagggaactcatataaactggtgtgaatgtaaattagtacagccgttattgaaaacagtgtggaggtttttcaaaaaactgaaaatagaactgccatgtgatctagcaatcccactactgggtatttatccaaaggaaagaaatcagttatattgaagagagatgtgcaccccaatgtttattaacagcacagtagccaggatacggaatctacctaaatgtccatcagtagatgaatggataaagaaagtgtggtatttaggctgggcatggtggctcacgcctgtaatcccagcactttgggaggccgaggcaggtggatcacctgaggtcaggagttcaagagcagcctggccaacatggtgaaaccccgtctctagtaaaaatacaaaaaaattagctgggcgtgataatgggcccctgtaatcccagctacttgggaggctgaggcaggagaatcacttgaaccttggaggcagaggttgcagtgagccaagatcacgccattgcacaacgagcaaaactccgtctcaaaaaaaaaaaagggatgtatatgcacaatggaatactattcagccctaaaaaaggaatgaaattgtcatggatgaacctggagggcattaagtgaaataagtcaggcatagaaacactgttgcctgggctggagtgcaatggcgcgatctcggctcactgcaacctctgcctcctgggttcaagtgattcttttgcctcagcctcccgagcagctgggattacaggtgcctgccaccacacctggctaattttttgtatttttagtagagatggggtttcaccctattggccaggctggtcttgaacccctgacctcgtaatctgcccacctcggcctcccaaagtgctggtattacaggcgtgagccactgtgcctggctggtttacaattttcttgtgaattgcatagaagctcagccctctgtgaagcatttttgtcaatgtctagtttgcttaggacacactgacttagatgggatggcagcaagactttgtcagacccggttttggtaacatttaattgttatataattgcaaatttacagaagttgcaggaatggtccaaggaattctcatctgttctttacctagatttaccacttatttatatttgatcctatttactgtgtctttttccctaaatataactttctacgtgtattttttatctgaaccatctcagagtaggttggatacactgtgtcctgttaccctagataccttggtatgtatattctgagaacaaagacttcttaccataaccatgtaattctatcaggaaattgaacattgatacagtacgattacctaatctaagtccacattcagcattcatcatttgttccagtaatgtctttctatagctattttaaaatttagctataatttaaaatggcccaagatcacacaatgcatttgtcacgtttgcctgggctcctttaatctgaagcaggtctgtgcagcctttctgcctggtcctatttgcccttgatatttctgaagaatatgtgctattttctagaatgtcgctgtatctgagtgtctcctcattatcagattcagggcatgcatttttgacaagaatatcatagaagtgattttgtcctccttgatgcattatatcagggaggtataacctcagagacttttttttagaggtattgataatgaggccatagagcacagcaaaggaccttggttggataagggagccatcatagatggagttggggggtaggaaaggatgagaatatatgaataattgttctttttccccctcccctcccctcccttcccctctcttctcttctctctctttctctttctttctgtctgtctctctctctttcttttctttctttccttccttccttccttctttctttttcttctatctttcttgactgagttttgcttgtcacccaggctggagagcaatggtgcaatcttggcttgctgcaacctctgcctcctgggttcaagtgattctcccgcctcagcctcccgagtagctgggattacaggcatgcaccaccacacccagcaaaattttgtatttttagtagagacaaggtttcatcatgttggccgggctggtctttaactcttgaccttgggtgatccatccaccttggcctcccaaagtgttgggattacaggcgtgagccactgtgcctggcccgaataattgttcttaggtcatataagcattattacatattcaaagaagggagaaatcgatacacagatggaaattgtttttgataaatcaattagaaaaataggtgcaagtgaagctagattttattatgtctttctcattaaccattttagaatagaacatttggattcaggtgatctggccagatttcctgaagtggtatttgggtacctgtctccatccatgattgtcatcagcacaccaaactctgaattcaatcccctgtttccatcagtgaccttaagagattcagatcataaatttgagtggaccagaatggagtttcagacctggtaagttcagaagggtttttgtttatttgggatcctgttggagtttaaaatcttaggaaataaatattgatatacatacattacctaaattgttttgtactttcttccaataaaattgattccaatgtgtgacttagtatgtaataagatcacaaaggaaccattgcatttgggcaagtgtggaaagggggtgtggttactgggcaccttttatgtgaaggcatctgtagtactggcatggagatgaggaacaaaacagagggaaggtttgggacagtgagaatgagcctcatgcccctccccgggatatctcctgaggcttagtcatgttttctggtgtaattgcaaacccaaatgggtagttgggttgagcacttgttgcctccttgtccacccctacaccctgcccataattttcctttcgtcttccatattcttagggtaaattggaaactgacactatatccttgccttgacttctcttagaaataaatacactggtggttaggaatttgtaacttagaagtatttatgttcattgtatttttcatgttctcttttactgctgaccagaaatggttccttatttaacagtagctctacatttagaaaaatgattgctgtcctcgttttggtttcagggctttatatgtggcaaatcgctatgattactctgtggagtttactggtgtcggggaaccaccagctggagctgagaatgttggatactgtacccagataggaatcttccggaaaaatggaggaaaggcaacagaatcatgtctttcagagcagcatgatcagcatgtttataaagctgtgagtattctttgtgagatagctatcagggctagagatacattaggatggtgaacttttttggggagtaagaatccccaaagtagagatgagtgtaaatgaccttgctttgtggttcactctaggagaattcttcaggccccatgactactgtccgagttagcctacggtgtcctttgagactgcctggccttttggtgtttcaaggcatgttaaagggaatgatctgctggggttgtcttagaatacttcaaagtagctgggtacagtggctcacacctgtgatcctagcatgttgggaggccaaggtagaaagattgcttgaacccaggagttcgagtgcagcctggacaacatagtgagatctcccatctctacaaaaaaacacccagaatacttgaaagcaatagttgagcaacctctttttgtaatctgttaggattatcagtagtaaaaaggaaagccagcagcagtttctccccagcttggcttaggacattactctttgagcctacaaacttctcagacccttttggtttaaagagagaagaagaagaaacacttcctccccctctttaaaaattttatttaattagggacagggtcttgttctgtcaccgaggctggagtgcaccggcacaatcatggctcactgtaaccttgaattcctgggcacaaacgatcctcccacttgagcctcctaagtagctaggacgacaggcgtgcaccaccatgctcagcttttttttgttttgttttttgtttttttttccgtagagacagggtctcactatgttgcccaggctggtcttgaacttccatcctcaagcaatcctcctgccccatcttcctaaaatgctgagattacaggtgtgagtcactgcacttacccacgttttcccttttaactgaaccatttttcatttttttttgcccttgcccctgtaatatcaagtagaaatactgggttcatgtgacttggtagaaacctggctgggagacattgggcattagcattagaaagcaaatcggatagttaatttctatgtgtcagtgatttgattcccattataactgaggcatttacgattagtaggatctgacatatattcaatatgtacatttattcttacatggcaaaaaagttattgatggctttgaaaatttatgtatgtttatattattatacacttgtaagtgttttgttttttcccttcaggtttttaccacctcatacccaagcttacagcaggaaaggttctttaaacttgtgttggttaatgaggtgtcccaacaagtggaaagcttaagagtgagccacctgccaaggcggaaagaacaggctggggaacggggtgataagcccaaagacattggtggctcaaaggcccctgtcccatgctttggaccagtcttcacagaggttgagaaggccaagatagagaactctcccacacccttctgtgttggagataaatttttcgtacctctgcagagactccttgcgtatcccaagttgaaccgcttatgtgctaatgaagagatgatgagatcagtcattgctgactcaattcctctgagcagtgatggttctgcagtggtggctgacctgcgtaattattttgatgaacagtttgagttttgaaccatgtttatttcctgaaatttcagggtctcagcgatagttgtgctcacttagaatttagttttttttgtgtaatcctaattcaagtaatgtttttaaagtttcactgcaaaagtctatgttccaagccattggacagacctgcttgagatatggccagactgcagtgagccctgagaaagatatgagggtttaaaacgggtgctttcctttgattttggacttttttgttttctcaagaataaagaagttggatgtggtaatatgttaattttg

SEQ ID NO: 386 - DNA, 16642 bp, Homo sapiens
aagagaggaaggcttaaagagccagactgcgcagccaggactggggtgatgggcgctgtcctgccaggccaaagaatgaagatgtagccccgcccccaacctagggaggaggaccagcccggttcctgtcctgcccccgcaacctcgccccgattccactccgggaacctcggcgatgctgagccaagaccacttctgaatcagggatgacttgtctagtgaacctagggtcagagccatcagttggaaaggctgggaggagcctggagaaagagggcgaccttccttgggatctgtgcgctccctccttgcctccccctccagcctcccacttggtagcaccttcctgatccccttatctctaaggcgctcagggaaatgccccgctgcgggagccttctgggaaatgctgccctggccacccaggaaccatgagccctgcagccccggtaaggaagagttctctgggacaggaggaagggcccagggcagggtgggcacccttgccacataggggacgggacagaagtcttttaggccctgacatcctctggtctctgaatgacatcctgtggctgctggtaggtgagggtttgcggggctgagctattgaaggaaatgatcacagtccgaggtgatagatacagaaagtcttcctttctccaggtgggctcccgccagtccattcttcactgtgccctagaggggcctttccgaccccctaatcacacacctcactcctcatcttgaaactcccacccccagctccagtcactgcgtcctaacatccaagctctccgcctgtcatgcaaggcctctgtgctatttctttccaaaccctgcagctctatcgcctgacactcccgatgccctccccacccctgcgctttatgttctagacacacggaaatgctgggcactcttcaacatcctgacagtattcataggggaaatttcgggtcgcctaggaaactgcccctcatcctccaaggcccctttcagcctcctctgggaagccttcctgaaccccttgagaaaagtcaggctcatcttttccattgttaaatcacaccttgtgctccaattgtgtgtttccatgtaatctccctcactagactggaagctggggatggaaaggggaagcatcaaaaaaacatgcaaaactaggagcttggcttctccttgcaactttactttttctttttttctaggaactgagttcaatgattcttaagaaaaagtatttcatgataaatgagtgaacaaatgtcttaatagaaaagtaaaattgcaggcggggctgcttctgcccagctctacaggggtagactacaagtcccagtacgcctcgggtcagcatctcttcacgtcactccccctccctggggtgggcaggtccggagggcggggcccgggggcagctgggctctcaggcgctgcgggaggagagaaatgccccaggctctccggggcacacaaagcgcaggcgcagcgggttgggtggcagcagcatcgagtagcggccgcttaggcagcaacatccgcaacaagtgtagacaaggtgggtgcatcaaggggaggggctggaaaaggagtctgcacctgaccctcttgtctgatctgtgtcaagaccgtggagaggggagggagcggcaagaggaacagacaaggctgggccttccagcccaggtgtgccagcccttgttacgcagcaacaggtgtgagcaggtgggggaggggcggaggcacccgctggcaagtgagtcgccctcaggaacagagggcacctacctggattccagtgcaagctacatcatgtacatggatgagtcatttgctaaccctcagtttgtccatctgtaaaacaggagtaaggattcccttcctaacagggttagagtggggacaaggtgagggagtagaatgtgcggtgacgtccaaacttagctgtacattggaatcatctgaggatctttgaagagtatcagggcttgcctcctgccctcagacattctgatttaattgttacggagtgtggcctggtatcggaagttctcaaagctcctgccggcataacggtttgaagccaggactgctgggtgtgagtctgggctccattgcttactaatcaagtggccccgtgcaactgactggacctttccggcccccgtttccccatctctgaaataggaataataaggactgcagggaggcttaaatgagataatggatgaaagcactgatagggggtacccggacagagtgctcggtccatcacagctgctgttgaactgctctttgaagcactttgtaaacagctctagtggggtccaaataggagggagcttttccctcatccattgccgtgattctaatattctgcacttccacattacagaatcccaaggtttctaatactttaagagtctcatgctccaccgactgagctagtcaggcatattctaatgtttcaagagctcctccctccagcctctgcctgcctcacagacacacttctacagatctagaaactgagaccaggacagagggccagggaggagggatatggccaaagttaccaagctgaggctggaatccaggctcctggtccccacccccaccccacaccaatggctgccctgctgaccccacagtgacagtgctcccattctcttcctgagcagagaatggggaggaggccgaggccgcctggcccttgtttactaaccctccctcaaacgtttcctgggtggctccccagggacggcagggctgggggcttctctccagggagctgctgctgaggcctgtgtctcccgtggctcctctgacaggtcccgcctgactccgctctggaaagtccttttgaagaaatggccctggtgaggggcggctggctgtggagacagagtgagtgatcctgggcccctggtcctggggcagggtgaaggaagtggcttactgggcttgccacggggaacacttctctcaagaaaccaggaccttttcatccttcccttgtttgtccatgctcttccctctgcctgaaggtccttcccattcccgactacatggtttaaacttctatttgttcatcacgacccatctcagatgggcccctctctgaggagccttctctggcttttcctctggcccccacccctgctcctgcagtagcgtcaagctggattagaggctccctcctcggttttcacggcgccttacagtgatctccttagaacagaactgtctatctgtgggtatccccactccctgaccccagactggccccagtctgcgaactcctcaaggacaggggctgggtttgaccctctgtgtgtccacagtcccccaaccccgggctggacacagaacgaggcacagaacaaagtgaaaaatgcctttgtgctttggaatccacaaagccctaagaagctctcttatgtctttgcccttccctgttaagatttccagttgcaaaatgtcagaagctcggtctcgggcttctagacccacctctgaccagagtcatgacctgagcaagagctatcctggggacccctgggacaagcagccccatgccccatacccctgcccattctcagttcatttagttcagcaaacactgagccaggtctccctgggtgccaggacctgcgtggggagccatagcccccagagtggtacaggaggcagatgctacacaaataaccatcacacaagtcagagatgagagataagaggccgggcacagtggctcatgcctgtaatcccaacactttaggaggctgagttgggaggattgcttgagcccaggagtttgataccagcctagacaacatggtgagacccactgtctccaagaatacctacctggctaattaaaaattagccaggtgcagtggtgcgtgcctgatgttccagctatttgggaggctgagatgggaggatcacttgagcccaggaggttaaggctgcagtgagccatgcctgtgcccctgcactccagcctgagtgacagagcaagaccctgtctcaaagacagagagagagaagatgcaggcttaaggtagggagaggtctttgcccttgaagagacctggggcttggccttagaagcttccaagtaatgggcccagtcactcatttccctgttcagcacgtgtatcgagcttctgctatgcatcagacccaatgggaggcaggaggtgaacaagacagaaagaggtcctgccctcatttcagggggtagacaagaaaaaggtggttgtaacactagggactgaggctgaggggacttgggagtctgtctggggcttctattcccagcaggctctgggatcagcctgcctagtgcatctggaatatcgtacaggctccatcctccgccgctggaagcggaactggtttgccctgtggctggacgggaccctgggatactaccacgatgagacagcgcaggacgaggaggaccgtgtgctcatccacttcaatgtccgtgacataaagatcggcccagagtgccatggtgagcagaagccccttcctctgtggcaccgtgactgtgggcagagcctcccgctgtctccgagaacacttgctgttggaagtctttttgcagctttcagaggcatttcacagacattgcttctgagcctctgtcaactccaattcagtttggtgtgagttaagaaataggtccttggctgtgtgtggtggcgcatgcctgtaatttcagcactttgggtggctgaagcgggcggatcacttgaggtcaggagttctagatcagcccggccaacatagcgagaccctgtctcttaaaaaaaaaaaaattggtgagatgcggtcacatatggctactggggaggccgaggcaggagaattgcttgagcccaggaattcaaggctgcagtaagctatgatcccagtactttgagaggcatgtagattacttgagtctagagttcaagaccagcctgggcaacatggcaaaaccccgtctctaccaaaacaaaaacaaacaaaaattagccgggcatggtagtgtgtacctgtagtcccagctacttaagaggctcaggtgggaggattgcttgagcctgggaggcagaggttgcagtgagtgttcatggcactgcactacagcctgggggacagagctagaccctgtctcaaaaaaaaaaaaaaaaagaaaaagaaaaatcagtcctttagtgcctttctcctctgtgctgtctcagaggtgagccaggcacagttcctgccctccaggcgctcggtactggatgaagacgaaatgaaattaggaggcccagagaagcgaagtggcccagagtcacagcaaatctccacattcctccaccaaggcccaggccacagttctaacagggtaactgggaggtgtgctgagggaagcctcagcatggaaaggttggaaaggttggaaacgtagagtggaatccctcagagagtatatgggatcagaggaggttggcagtggccagtaaacagagcccagagaagtcaattcctattcctgtccctgctttactggggggacctggggcttgtgcctgtggaaacccatatatgtgtgtctgcttccagatgtgcagcccccagagggccggagccgagatggcctgctgactgtgaacctacgggaaggcggccgcctgcacctctgtgcggagaccaaggatgatgccctgtgagtcactcccaggagaggatggggtggaatctcggggaaagttaccatgtgcccccttctcattgggccttctggttctctgaccgtaggaagagggcactaaggccagtcagcaagggagtcttattggaggcgggtggagtggatttgaagggcttgtggtgactggcatggcacacagtgaactcctcatgtggtctacagtgaactcaggattgctgagggggaggtgtgcacacctgcctcaggtatctggttcctggtctttagcggcctctgaggtgagccctcacctgagggtgatgcaaagcagcagagcagcctagtggcacccttgctcccttcttagaagatgccctggtgggggactctgatctgaggggtagccctggacctgcctacaaaggcagtcagctgcgtcccaggcaggggcaccccaatgtcagatgcatatccacgtggccagcctgggtgtgtccttctcaggcaccatctgctggctcacattccgtcccttcctaccctctggctaaggggtacatggcctttgcgctggaggagagtgaaagagatgggtgtgtgggagtgggggaagctgagctccaggcagacagcacagagccgccttgtccaacccagccaggtgccatggcaaccaacaaaggccccattgtcccgtgtctgctgggccttcctgaggctctggggtcagagctttggggaagtgttttgtttgtagatttgggatgtggagggggactgggctacaacacccacccaagagtgtcagaatctgacatcccctgagagaccacccaagcccaaccgtccactgtatagatgaggaaactggaacttctagaggggacgagaagaatgaattagcctaacttagtgctccatccatgtgactggggcaggggaggggtcacttttgtcttcctgagggagacaagagatctctcctttcatgagagacttgggcttgaggctgggttggagaggaaagtctaaaatgtgggggcccaattcacccacccccaaactccctcctcatggtctggtgggatttgctttgcagagcatggaagacagcactgctggaggcaaactccaccccggtgagtctcccgttctctccccctttccccaccacctccatgtgccatggaatcatgagtgactcagactcggtctccacctgccagaagttctcagtcttatgtggataggtttctgcaaactctgatgcctgagtcccaagtgttcggggaaaggataagggagagccaactggtgctcagaggagagagagaagcctccatggagatttgctggagggagtggcacatgagctggggagaaggaactgtcttttatcgagcaactattatgtgccaggtgtggtgcaggtatcattccagctgctcctcacaacagtcctgtgaagttggggttattgttctctctctgcagatgataagactgaagctcattcatccgcacaacaaatatttactgagctgctactatgggccaggtggtgtgccaagtgccagggatcagaggtgaaccaaggagatatgggctctgcccacctggactcagcctaatgagaagccagacatggaacaactaattaattattccatttcaatagtaataacagctctgacagagatttgcagtgtctggccctttcatccaggtggtagttcaggcaaggcttaaaccgaggactgaaggataaacagaaattgactgggtgaaaggtgtggggatcgggtaaagggcacggcattccaggcagagggatcagcatgtgccaaggctctgagagaggttaagacatttggcaagttgaggaacagaaggacagctggggtggctggtgcttagggagtgagtgggtaaggagggaaggagggttggcacgaccaggtcttgtgggctgtatgaaggatgttggtttctgctaagagcaccagggagccatgacaagtttttgaacagagggatggcatgatcagatcaggttcaatttatatttttaaaaagataattgttgtaacgttggggcatgtaaaaaaaagggggtagtctgtcagtttatgaaattttgttgtagaaaaaaggaaaaaaaaaaagatagtctggctggtaggtagggaatggattatagagggtaactgcagacacccagaggccacttaggaggctgggacagtgtccgggcaacagactggagatctggattaaggccttgttggccgagacaggctgatgagtacaggacatatttaggagatggagtcaacagagcttgtgactgatggaagtggcggtttgaagagccgcccaaagcccagcttggcctccacccccatctgcctgactccagaatctgtgcttgctctttctctgtatggcacaatggagccccctctcacctatagagaaagtccgttgggaagtagcaggggagacctggatgcatttagaaacctcctcaggcatccacgtcctgagtgccaggcatcatgctaagcccctggcagcagtgacatcatttcatcttccaacaaccctggcagggcagctgggtgggggttggtattattagtcccattttacagataaggaagccgaggttcagagaggggaggtgacttgtccaaagcttatactcttaagtcagtggaaaagcctaccatggaacctaggtcagtgagattttgagaggagggcgttatctgcagaagtagctgcatgagcagagacagagaagtgatgtgtgcacatgtgtgtgtgcacaagtgcttatgcacatatgcatgcgtctaagggcccagagtctgcctggctggagagcaattcatgaggcgaatgaaacaggagagatgacctctgaggtcatcggggccagctcatgatgggcctcaaagtccagttggaagaaatggactttccctgaggcctgtagggagcaataaagggcattcagcagcgagggctgtggtcagattttggggagcagactcaggcttccaagtggcgggtgaattggagaaagctgggagtaaggaggctacagcagtagtctgcagggtggagggacccaggtcaggctaccctggctctgagctccaaagcctctttatgtggggcaagtcagttccaccaaagagaggcggagggaaggaggcaagggtgactgtctgcactctgtgactctatgaagcggcctcgtccttctctgcctgtccatctcctgtggctctgctgacccttctctctgccctggcctctattctacctcccactactccacatatacacgtccttctgtgcccgggcttactagagtcggggtgtatttgtgcctgtgtctacctatctttgtgtgttcacctctgtttatgggcttctctctgtagcctgtgtgggaatgacctgccctttgtcctccgacatgctggagttcatacctcactccaggtggaggctccaggagcccctaacaccagctttactgggaacacagggcctgggggcacagctagggacgaggctggggtgaagcggaccaggtgggctagaggacagaagggagtcgccctgtcctccctggagactgggaaccccagcaggatgaaataggggagggtgggctaattctggaaagagactacttgtccttcttttctgcgtaactttggcagtcatcagcattctctgagcctcccccgttaccatgagctgaggagaaagaggatgctccctgccacagcccagctggcggagggctctggtagggtctggaaagagctcttgagtctctttaggtgtagagggcctctgacaccccctccctccctcctccttcttgggtttctgtggcttgagcaggccccagctggagccaccgtccctcccaggagccgccgggtttgctccaaggtcaggtgtgtgacccgctcgtggagcccctgtaaggttgagaggcggatctgggtaagtgctggctcggccctccctgcctccatactggccaccaggatgagcctccaaaaccaggcccagtccatcccttccctgtgacaaacattccatggctccctatcacccacaggacacaaaccagctgctctgctgtaccctctgtccccagccacaccagaccttttccctctgccagccttcgcacatgctgttccctctgctgacaagacctcagtttcctcattcacctgacaaactgatgctcatcctgtaaggcccacctcaaaggctgcctgccacctactcagtggggacttcctagaccactaggcatcgtcattccctccctcagcctagcggcaccaaggcttagtgctttcttcattctgcctggtttcagagctggtttattcctgtctgtgtagtcttccatgaggcctagaacttcctccaaggcaagaatgaggcctgattgcgctgcctctatggaacttggcacaaggctaggtaaatggcacatgctcaattagtgctcgatgatggggagtctatgctgacctttcttacacagtggggctcagggaatgttcactgagtgagcaaaggaaggaaggagggagtgaaaaacttcctttatagcaatactactacatagtctaatttagtctaggtctgtctcccctcaccctcaatgtttcttgaaggcaggatctggcctgaatcttttctctgtccccagaactcagcacagggcctggcatggggtgggtggcaggagggggcttgagtgagagtacctgtgatcttatagtcaactctgagctcatcttacacagtggtgctcagtgtggctatgtatcaggattgtttaggaacttacaagcactaataacaagtattcatgttccacctctggatgttttaatctggcatggggcctaggcctaggaaacctgtagtttaaacctgtctcctggccaggcctggtggctgacacctataatcccagaactttgggaggctgaggcgggcaggttgcaaggtcaggagttcaagacctgcctagccaacatggtgaaaccccatctctactaaaagtacaaaaattagcaagacatggtgtaatctcagatactcaggaggctgaggcaggagaatggcttgaactcaggaggcggacgtggttgcagtgaaccaagatcaccccactgcactccagcctgggcaacagagtaagactccatctcaaaaaaaaaaattgtctcctgatgactctgatgtgcagaatcactaagcctagaagtgcctgggccaccaaattgtatagatgtggcactgttagatcctcagtggcttggagaggttacctaacttgatcagggtcactcaactcatcaatggcaggtctgggactcccagcccatcgttctgaggtattttccatgcccaaactaggatgcaagtttgtttaaagtggggatgtcaaaaactaggatttaacagactgtaaacctaataacacaacagctcagctaaggggagtcatttgcatgtgaccccctgattggtcaacactggttgtacccacaaagtagctgggcctctggagagggagaggcaggttcaaaccctcaggttctgcccatgggtctctgggctgtccctatttgttgccaggtgacttataggagtttacttctgggcctcccagacgtggagagtaaaaacaggtgccctcgagggatatggggtgctccaccctctccagggcctcccaaggccactggctcactgtgtagcagcagggcaaggtggaggctgtggacctcaacttccccaccaataaaattggacctgagagcttagatccctccaaccccttttgggcctggagcctggatcttggcactgcctaccagaaatccctattggatcactgatggggagggagcaccgtagagttcactgacttacgacattgcttgtctgagcctcttgcattgtcttgggactatatgttttccctgacttgaaactgaactcagagttgggcaaccttagttccagtctggccctgtatttgattcactggaatgaattcaataaacatttattaggtacctgccatgttccagtcagatctgattagacccagtctctgccctcaaaggcatctccaagtctgatgggagagacacagggaaacaacgtgaagacagcatgatcggtgctgtgatgcagggacatccaagggctgtgagtgtccagatgggaccccaacagaacctgaggttcagggagagtgatgcttgagttgagtctgaaagacaggttgaatgaggtgagaagcatatccctagcaaaggaaaatggcatggagatttgaaatcacaaggtgtgcttggagaccttccccttaccaccaaacttcttgaaagagatgtcatgacatggggattgcatccttcacctctcagcctttcttcaaccctccatagcttggcttttcctactcagcaactcctctgaaaagttttttcaaggtcactcacaacttccaagttgctaaaaccagtggcctattatcttggaattggccaaaagaatgggcagaagaacacatttagaagataaaatcacgagacctggtggctgatgtgtggaaagcagatgtgtgaagacaagggcaacaacctgctttctttccttctttctttttctttctttctttctttttttgagacaggatctccctctgttgcccaggctggagtgcagtggtgcaaacactgctcactgcagcctcgatctcctgggctcaagtgatccttctgcctcagtttcccaaatagctgggcccacgggcatgcatcaccacactcagctaattttttaattttttgtagagacaggttcttgccatgttgcccagactggtcttgaactcctgcattcaagcaatcctcccgcctcagcctcccaaagtgctgggattacaggcataagccgctgtgcctagcctttcttgatttgagtgcatggtgatggcatgtactgagagaagcatttatggggctgggtactttgggaggccaaggcgggcagatcacctgaggtcaggagttcaagaccagcctggcgaacatggtgaaaccctgtctctactaaaaatacagaaaaattagccaggcgtggtggcaggaacctgtaatctcagttacctgggaggctgaggcaggagaatcgcttgaacccgggaggcggaggttgcagtgagctgataccatgccattgcactccagcctggacaacaagaatgaaactctgtctcaaaaaaaaaaaaaagatttatgggaaaagcaacagttttagcagatggagaaatgttgcaatcatcttgagatgagtggagtttgagacacctggacttctaaggggagctggactgttcaggtgtgaatcccagttagagagagatacagggtggaatggggctaagaggaaagatccagaagagaaggggatcctgacccctctccaggtctgctcccccatgggtaaaatgaggggtttggagtttccatttaattcagcacatagttcttggttcctggtatgcacttggccctgctggtgacacaaacaaatcagagtccttgtctacaagcagctcacatttgggctgcaagaaaggccaggagaaaggatagcaacaagaggcacaagcaagatccacagaattcagggaaaaaaaaaattcttcctgagaccaggagagcttcctggagtggagtgggtgaccgttgagctaggctttgaagggttggcagaaatctaatgggagagaggggagggcagggaatgcattccagagagaacactgaccattctctgagcctcagtccccaaccctatggtcatgtggagctaatacctgctttaaggattagaggtggtgtaacacacgtgatcacttccttcaggacctggtacatagtaggtgctcaataatcgttacagcctagtgcagcctaacaattttgggtcaatgatggaccacatatacaaaggtggttccataagattataatggagctgaaaatttcctatcacctagtgatgttgtagccatgataatgtcgtagggcaatgcattacattttctacatttatatatgattagttagataacaaataccattgtgttacaattgcctacagtattcagggcagtagcctgctgaacaggtttgttggcttggagcaataggatataccatatactctaggtgtgtgccacctaggtttgtttgtaagtacactctatgatattcacataactaaaattgcctaaggacgcatttctcagactgtatccctgttgtttaaaagacgcataactgtattttagttacttctcatccctatccttcctttcccttccttcctccccaacccctgtttatttcctgggcctggggcttggccatgttcccctccttgtgactagtagagctgggtctttcaagtggcattattgtagagctgctagcaaatattagactacctataaggagaaattgggagccatagagaattttttgagctaggtgggaggccagagttggagaatgggtgtcactgggagctggatgtagggcagaagttttagaggaccgtggaccttgtggggagggcagggcctttctccaagagcttgctagtggctggaggcccatttctaaacttggggaggtggctccatggatcccagagaggcctgtgccaggcgtgggggtaggggaccaaatccgggccagggagttcctgggcacctgacatggttggattccccaggtgcgcgtctacagcccgtaccaagactactacgaggtggtgccccccaatgcacacgaggccacgtatgtccgcagctactacggaccgccctacgcaggtaagtctccagcgtgccccggggcttgcctcgatccagcaccgattcagcgccaggcccagcccacggtccgtaagtccggaccaggcttcatccttttagcgtgcacggattttcccaggcagaactctccgcaagcccctctccatcctgagactgggagagctctggaaccagcgttcgtctcgagctgacctcacccttctgggatggctcctcagccctgcggtcggcaatacccattcctgagccggtagcggcccctggtggctactgcgggaatgctgcctcctccccgctctggggcctggcggttgggaatgcccatcgttaggcgcctggtggttgtgcttagcgatctcagggtttcctcgctgctccgccctagcctgccgtagcggacccgtaggttccgggacatccgtagccgatccaaggcctgggagccgtagggtggagctcttcccgcgtctagatctgttctttgactggggagcaggagagtgggttcggcgccttacactgggttgggctggagtgatgcaggaagggtacgaagatcactctactccctcctaagtcgctgatcctcatgggctgtctccctctgcaggccctggcgtgacgcacgtgatagtgcgggaggatccctgctacagcgccggcgcccctctggccatgggcatgcttgcgggagccgccactggggcggcgctgggctcgctcatgtggtcgccctgctggttctgagccctgggactcggagcactgacccctgcgcttggattgctagactcctcttcctcctggaccccatcctctaccatccaagccctgtcccactttggccctatcctctccattagctccttccgggtttggaccattccccccactccctacccttaatccccacatgggaagaagctatcatcacaggtacaaacatcgcttgaagtcttcacatctaccactagacacccccaaaatctgttatagacatttatggatacatttcctctaaacacaacagggcacagcaaatacgacttcatttggcttcgagttccccaggcgctgtagacacaacatgaatcgggctctctgctctctccttagggagctcgagtcctggtggggagaacaggagtaaacaaggacttgacaaagctgaagagttatcagtcctttgacaaggacaggtggggcagggagcaagacaggtaggctggaagaacagttattggcaagtatgcagagccgtgaacgtcatggcatgtccaaggaattaaatgggagttcatttgggctggggtggaggctgggatcagaccgtggtgggccttcaagctaaggagcttcctaggtgaaaggggagatgtgagccttctctggagggaagtttcatgattgcatctataatgaatatattgcctgttttgtgaatactgacacatgtccatacctaaaacactcctgagtcaagtcccatccttcccacaaacagcttcctggctggtacccatgataacaattgagctgaacctggggacccctggttggggaacaggtgagttctatttgagacttccagccctagaaagctgcctccgtccagaaatgcctctcacaccaggagctcggccctctctttgtagctgtgactgtcaccctctcaggctttgtctcatccttcattctgaataagatggcagtgttctcctctggggcctgatccacctctacaccagcccaggaagccccatctgtgcctgccctcaggtggtccaccagtctccccctttggttcccttccagtctcttccccctttctatcccaatcaccaatagaaatgctaacatccctgcctggtagccagactagcccactaaagctcccctgtaaatgggggctccattagttctgctgccgagactaataaagatttggttggctctagcagtaa

SEQ ID NO: 387 - DNA, 5126 bp, Homo sapiens
tattcgaagggaagggagccccctataaaacagcctacagtggacagtctggtcggcagagccgcaggtcagtcgtgaagagggagctctattgccaccatgagtttctccggcaagtaccaactgcagagccaggaaaactttgaagccttcatgaaggcaatcggtgagtgctggactgaaaggcaaagctgtgggtcacatcagtgagggtctagctctaccagcagtggctatttagggtccaaatgttgagatggggggagagattcaggctatatacacaaactagggggcattttactgacttctggagttatttgcagcaagtcctcactgcacaaggccaccccataggcaagtggaaagagcactgaactagggtgtggtctggattgatggccatgtcattggcacttcgttgtgtgatcctattcctgcatttattcattcttcaaacaaacagtgattcaaggccaaccacacactgagcactgtgctggatagataccagggagacagatgataaaggcaataaggcattttcttatcagggaagagaagagaagaaataaaggtaataaggcattccctcaggtgtatggagcgctgactgtgccaggcgactgtgctgaccatgggatatgcaataccccatctattccttgccaaaaaactaagctgggtaccattattttcccactttacagttaatgcaactgaagcccagaaaggtttagtaatcacaagcaaggtcatgcaagtaggaagtgtttaagttaggattggaagcaggcactggttctcagagaccctgctttaacccctgtgcctcctagggtcatgtacaggaggatgtggctcacagagagcatggggggatggctcagtggaggtaaagagaaggctcaggctgagctttggaagacaggtgtctagggaactgggggcagggagcatgctccaggcagagggagccctataagcaaagggtgtggcatggcaagggagggtgccaagaatgagaagggtgctgaagacagcaggggcagggagagaaggaccttcagtgctgccagagaaggatcttctgcaggcaagccataccacctctgtgtctctcatctctccctcatgcaacaggaccctctgtgctcactgtccacccacaaaatttttgtgaacctcaatttgtataacagcatagacaagttctgaaactggtaaagctctatcccagggcaagggattgctggtatgtcttcctccagagccttgactgcagaggtggacacaggcttgcctggcacagtgccgctttgtgtatgttggcctggcatgattatcagcagctcccctttcacttgcaggagggacctagcttggaagatcaactctctggtcaccaggggtatggggaatgaaatgctcacactccaagagcaaagtcatcaaaggaggagggaatgaggaaggagagtgagcaagaaccagggtgcttacaagaggaacggttcttcaggccagaagagtgtcctttttataaattgactggcaagatagcagcaggccaggccaggtcactgtcccttcctttctgaggccacagccgatgctgctgacaagcccccagtgagtttctgtggccccttgggagacacagtgcccttctctgtccctccatgtcatgtcgtttctctcacctacctaccacggtcatgaaactcccacctctgcccatatctaaacctcagacggtttccaccaggtctgccggaagagctcatccagaaggggaaggatatcaagggggtgtcggaaatcgtgcagaatgggaagcacttcaagttcaccatcaccgctgggtccaaagtgatccaaaacgaattcacggtgggggaggaatgtgagctggagacaatgacaggggagaaagtcaaggtaggagggcatcccttctgctgtcagaactttccttggaacctggccctgggacctcattcctcaaggctcaaacctcacaattccacccacagataccatctctgaacccacctcccatgtgggagaagcagagagacaaaggcagctcttagggaagaatcttatagagaagctgctctcctcttcccagggactgtctggggggtgttccagcccctaaagtctgagctctcccatatggaggatatgggagaaccaggcatacagcaggattctaagtctcaggttctcccaggcccagtgctcctagcactaagagtcctctaagcagggcccaggagtggggcaagtgggagtttgtgaaaaacccttaactgagcccaaagtcaactggccttcactgaacctagagctggtggtgatagggagagacttcttgaaggaggtgctagcaataccagaataccagggccccagacaggtgctcagaccctgccttcaggggtggtcacaaagtctctggcttcagccaccccatctgtaaaataagaacagtcaacctccctagactgaaggcagtgcagggcagcatcacttctgctgggcacaactcatggtgtgcaatgacagctggggtgtgggctgtgtgagtggttggcagatggtggcagggggatcctggcaatgggggtgcccgtctcctcctccctctgaaacactccatgctctagcagccctcttctctcctccccgtggacagctctgttcattgggctgggcgtgtttgctttttatctcttctggtcactctttatttctgcctctccaattagaacattacaggtcaggatgattttaggaggataatattcttgatgtgctcatggtcaagggatttaactatgggccttttccaaattttctttttggaggcaaaatgtttaatgttgcccagggtctttggctccctgctgggttcctgtcatctcttccaggatgtataagggcttggaaggaggccacaatatgaaaagttaacgctctgggaagaataatacatacctggttgggcgggtggctcatgcctacaatcccagcactttgggaggctgaagtgaaaggactgtttgagcctaggagttcaagaccagcctgggcaacatagcaagacctcatctcaattaaaaaaaaaaaaaaaagaagaatacataccaaagcaaaatatgtattctctactggtcaatatttgaattttgccactacctccctccattagcttgggagaattgagattttacttgatttgattttagcatttgtatttggggccacttaggtgttccatgctcatttctagatcacatgccatgaattaaagttctgacaaaagaagtcgtgacattttatttagttcttaaatgcacctcacttctatttggagccagagaactagaggcttgggatcataggaaccagagcattttggttgttatgagctgagacctgtgcaaaggaagcaacttcattagcaaggctcttgccccccaccaccccttcctcacaggtcacctctctgttccctgcagacagtggttcagttggaaggtgacaataaactggtgacaactttcaaaaacatcaagtctgtgaccgaactcaacggcgacataatcaccaatgtaagttggtggtgctctgagcgtgtggctcccagtgcttgaggggagaggggaggtgaagcatggggagcggctcacataccctaatgccacccctccaccctccaacccccaaacttctttcctgtggtcagtatctgccagcacttactgaggatccatcatgtcccaggcagtttacacacattatcactaatcctttctgctcagcgcaaccaaccagccacagaggcctccacctgccctgcatgcccagggtgcttcataaatgcctttgcccatttagcgtttataaagagaatcccattcatggtcatattatggcagcttacaagcctggcacagtccagttatgcagtcagccttggtgcctggctgccagccacatcctgtaccctatttgggggtgaatggtgcagtgtttctcctgcaggtatgtccccctgactcttctttgcccccagaatatgctttagggagtcacagacaacagaacactgcctcagggcgctgtcatcactctattcaaatggaaaaattcttaaactagagagagtgtgagcatcaaccacccaatgtgcagtttccacctccgccccagcacattcccaggagagcaggggagcaggagatgagctatcctgcagtaagtcctggccaacgccctttgataggttccatctcacctaatcctcctgtctccttcgagggaggctggatgagggattcaatagacaggttgacctgtccaagtcatcagctaataaatgttaaatccagggctcaaacccatcaagcagcaactattgcattgctgctgaaactgaggggctccttttcaccctgatgacatggtatgtcattccagcagtcttattcaagagaactggcaggggtggaggaaacatccttaaaaactcaaaagctgatgcatccactgtttttatatgcttcacagctataggaggacaattatgcactacccactgccttccaggctgtgtgcctagttgtgtccatgtacatgtatccttggtgctcaacatgtatttggtgcatagtaggtactcaatgaaattttgagaaattagattgggctggtttggatggtcttgctataacagtcattgatgtagaaaagaattcagtcaaaggcaggaggactttccaggtgaggaggagaagtgacaaagacttggcataggattttggaaaacattgccaacctttcctccggtcctacaggaaaccagacgaatttttgaattgtttcatatgccaacatatttggtgctgttttttaagcttaattttgttttttatgcttaattttgttttttacaatacaacatcagatgaacacttcataatttcttttctggctttcagaccatgacattgggtgacattgtcttcaagagaatcagcaagagaatttaaacaagtctgcatttcatattattttagtgtgtaaaattaatgtaataaagtgaactttgtttt

SEQ ID NO: 388 - DNA, 209437 bp, Homo sapiens
atcattactctttacctgtgaagagtagaacatgaagaaatctactttattcagatattctccagattcctaaagattagagatcatttctcattctcctaggagtactcacttcaggaagcaaccagataaaaggtaaggtacaaatactctttctaattgtttgtattttacaaatctaatcttatgaatatatttgtcttgactagaagtttgcaatcaaatttaattagaattaagaatttctttggtttcatctcagtaaaaaaaattagtgtaaatagggggagaaaaataagatttttttgccgcattttttagttaacttctaagataaaaactttgaaataactccctacttacttcctttcttaagagttccaaagccattatattcacatttaaatcctattattcgataaatgtgtatgtgtaaatattatatgtatgtgtgcatatatctatgtatcagatacatatatatgacattgtacgccaagccatgtttctgtttgaagactgtatgtttatgtatggttacaggaatatttttacttcatgtacttttttagagctgaatcatttcctttctatgaaaaagcatggttaacacttaagaacaaggcagaaagcatttcctttaaatatttaaactacttgttctaaaaataatctattgaagaattatttctaccccacccaatcatttaaactaagaaacaagactaacaatttagagagattattaattatttaatttctatttggaaaagactatcataactttgattcaatattctacttgcataggaaatgattactatgcaaacttgattttgatttaattaatgtaggatttttagatttgagctactcgattctgatacgattctttgttttcattttcaaagccttagtatcctcaatgcttatcaagtttcataatgaaacttagtaatgataaatgtttcattttataaagttcatttcaaatgtctaaggttttatcatcatctcactgtttatctttagaaatatctcgagtgtcatgttgcttgaaaagaagttaaataagtatatatcagatttactttatgcaaatatttctttcagccaaaagtctttctatcctggtcaaacttacaatcatgacaattattttctttgtatctcaaaattaaaagtttactattatattaccaataaagatagaggcaactaaataaagatacttaattagtaccagctagttagttgaaagaatgtgtcataataaatgcccagattttctcaaaatccagaatgtcaaaccctgtattaggatatggaagttaagatctcagagatatgatttctttgtgcttatttttttctatcaaaactagtttatagttgtaattattttcttttctttcagaaatatgattaatgaggtagaaaaaagaacggtagtttagaaatatctcaggcagctccgaccaatagaaccttctgtgatgaggaaaacactctaaatctgtccaattgggttaccattagctacatgtggcaatgggacatctgaaatgtgatacagcacttgagaaactaaatttgcaattttatgtaatattaattaatttaaatttatacatggcatgtgttagtggctacattaaacagtttatgtctaagttattaaaattattaaatcttttcatttacaaatacttttgatttgaagaaaagtggctttacaaataaagatcagcagatgagtgctaattaggaatgactgttgtcctaatatgtacccttttctaccatcataaaaaatcaacaaagtcctatttttcacatggcacaggatgtcatctttatacaatccaagaaaaacaatggtttagattgttctaaaaagataagcaataactaattatacatatgaattaaataagtaaattattaattttatatatatatattttttgagacagagtttctctcttgttgctcaggctgcggtgcaatggctcaatctcggctctccacaacctctgcctcctgggttcaaactattctcctacctccgcctcccgagtagctgggattacaggcatgcaccaccatgcctggctaatgttgtattttgagtagagacggggtttatccatgttggtcaggctggtcttgaactccagacctcaggtgatctgccagcctcggcctcccaaagtgctgggattataggtgtgagccaccgtgcccggccaatgtatattctttacaagcaaaaaaataaggaaatactgaggtgaaaagaaaaaagatgctattgaaatttcatacttaaattcaaatccatcagggaatagtctatggggagaatgaagcttcaagagttgaaagagtatgaatcagaaatgatttagaaaaaggatattccaggcgtaatgtgtatctttttacagaaaggtagatgtatgtttagttgacaaattacattttcctaagaagacagtggatttatctgagtagtaacaaaaggaggaaataaaacagttgaggattttagaaattgattcttcatcctattctgatttctgagtcttcaggtgattctttcaaatatatattagaaaattaaaaggacttttaaacctggttgttttgaagtctctcagagctgtagagatgtattcagataaatgtttttccatgagtgctactctgatccaggctctaccctaaaaggaagaagaaagaatcaaatataaaaaaaattaaaaaaatattttgccactgtgccatcaaaaatattttaatatgtaaagaacagccattcaaaatatacatttgataacgactaagaaaaatgtttaagtagataaaaataggtaaattttgattatctagagtatatattttgtttctctgaatatgtagggtacagcatgtcaaactaactttctatcctctgaagggacagaacgttaatactgagttacttgggttagagacttcttttgaattacatgatgtaattatataagatataactctctacttcaataccgcaaatcaacaaactaattaaaatgagccctctcataaatcatgaaaaacagagttctctctcattaatgaaaataatcagtctaacatcacttatttaagaaaattttcaatcctatcctttcagtgggaggttttatacaactagtaataaaatccaaatttcattatatataatgaatccaaatcatgagctattgaatttgggtgtccccagagaattctaaaagctattaccaaatatttaaactagaaaaacaaacaacaacaacaaaaaacagaagccagcatattctagcacagaatcacagaaacagacaattcttactaaaagtaattaattttcttacggactttctatttagaactaaagaatataagagatcatatttgtagtaagaacttcataaatcaattattttcattttcactcaactctttcacaaatctctaaaaaacttcatgaagactaaatacatagaaaattgaaacactgcaatggcagtataaaggtgacactaatcaatatatatgattgtcaactaccagaaagggaaaaaacatactctagaaatgtctgcaagtctagtgaattcaccaaactatgggataggaaaggtcacaaaggagtcaatataggcagtagttaaaacctgtcaggctagaagcagcagtactactgggaagaaaatgaatgataagggtatggttagcatgcgagtcaatttacctaccaagctcaacatcccttttagcttgccctgtgctcagtccattgttccttctgagtaagcctaggggaacctgcagttagctgtagctgattggaacagaggaaggaagaggcaagctactggctggccagtagtctcaaaattctctcttgaaatttcatctaaaagacacagaaactagtagcggtgtcttgaatcaaaaggctacaatttcaccaatgaagtcaagaaagttgctctccagagacaattcagcacaggagactatgctgttactagataagaaatgtagggaaaatcttgcttcctgatttattaatttcaatccatacaaaactgggctgcatttagtttcctgtatttgaatgtgtatggaatcctgttatattataaggataagttgtgctaattttaatggtttcttttctttaacaaaggaacttttaatagaacagaagacaaacagacttataaagattgtttgggccaagaagtagaacaacttaaaaactagattaaggaatttagatgttttcagttgataagggtgatccataaaatgaaggtttatgaaaaaataagtaaaagtaatcaagatttaaaaatgtaattaatatgtgctaagccctgttttagagctttatatacattaagaagataagtaatcctcccaataattgtgtgagttaggttacaatactatccctactttatgcacaaatgaaaaacagacacaattagaagagaagaaattcattttaccaccaccaaactgaccagcctaattatgttaatacctatacactccaccttctttcctgtttcagggaatgagctgtcagcatttaagagagtttaaaaaaagaaaaaaaagcacagagtgggaaaattaaaattaaattataaatatctgacagacaactcttatccataaaatacaattaactcttaaaaacccataagaagaaaacaatttaaaaatgggcttgcaatgggatgatttttaactatagattacatttctttagcaaaaatatcacatatccagatatttccatccttttcgtgttagttttggtgagtaattttttaaaagaaatttcccatttcttctaaattttcaaatttatataatagatgtgaagttattcataatatcctcttttaggatttttaatgtctgtgagatatacacacttggcctcttcttcattcctcatatcggtaatttatattatcttttgatcttcttgaatagtcttgctagaagcttatcaactgcattaatctttttaaaaacacttttagtttggttgattttcttatatatttgtttcaattttattgaatttttactgttatttctttccttctactttgactttaatgtatttcttttttcatagcttcttgagatgaaagttttggtaaccaatttccagcctctattcttttttaaaatacacaaaagcctatttaagcctattcctctaagcacaagtttttatatgttatattttcattatcagtactttccaaatatttttcaatttcaattgtgatttattttttcatccatgggttatttagaagttctcctcagtttcactcatataaacattttctagtcatttttccatatttttgattctagcttaattccactgtggttagagaacatactttacacaatttcaatcctctgcaattcactgagataaactatggctcagaaaatggtcaatttaatataactccactgggtgtatgataagaatgtatattttgcagtatttattttattttattttatttatttattttattttattttatgacagggtcttgctctatcacccaggctggagtgcagtggtgcgatctaagctcactgcaacctctgcctcacaagctcaagtgaccctcccacctcagcctcctgagtagctggggctacaggtgcgtgccaccacacctggctaatttttgtattttttgtggagactgggtttcgccatgttgcccagaatggtcttgaaatcctgagctcaagtgatctgctcaccttggtctcccaaagtgctgggattaaaggccatcacacccggcctttgaattttaacatattccaataatctagtaattttatgtatttcagttgtctagtaatattcatatttatttccattttcttgaacctattataattgcttaaaagtccaaagtctctatcacccataggtttgtttcaattgtctttttcatttttcttgatttcagtcattcaatcttgtttcttgatgtgcctgatgattttttactgtatactagacattctgtatgaaaatttatagcaactctgaggctacctttctccagagtagatttttcttttggcagtcagtcagagtactagaaaatcacctcacaatttaggggactacttttaggcctttttttgtattaatcttctgaatttcccttactccaaagatattgtctttcaggggtctcaagtaaaaacctggagtgtttacagttccccttcaccttgcttgcccttgaactctaacctctatctctccagaactagactgtgaaatcatcaatcagcagttttacctcttccctgctgctttcagctttgtttatgggactttgctttgagctacagatgacttagagttggcaacaaccccataggaaaactgcatgcacaactccaggcacatttgtctgttgttcagtggcagttccaagctccaacttctgtttgtctgcccaaggaaataaaaatctccacctccacaactttctgcttagtctctatacctaggatgtgaatagacaaacaactttaggctaaagcaaagatggatgtgcggctcagctcgtgtaatatccatctctccaggactgtggccactcaagttctcatgccttggttgctcccttatatcttaaatttgttacttcacatattttattcaacttttatagttgttctcagcagtaggtccctctgatacaagatattctgttatcactggaacctgattgttttcttacctttgggatcgactctgttttagattccaattacacccttctcaataaattctctgcttctactcctcccttcaatttattatccctacagcaccaagctgatcttataaaatggaaatcagattacagtattctatcacttaaaaaaaaaactctcaagtagctcccccactgcactgagaataatatctgacttttaatcatggccatatcttgtattcttcagcttgcttagcctggtcagtatttgcacagcaaatttattggatggaaagatgcatggatatgtggatggctgatgtaactagcatattctgaaactggtctaattaaacaatgaaggaatgtacaggataagcaaccagaaacctaagaaagccaaatctagctaaaaacaagaactgctattaaaaacaaagaaaatggggggacaatccctcacaaaatatacaagaagacaggaagaactcaggaacaatacaaagctcatattttggggccaagaaaatgaaaaagcaagaaggagaagggatttcttgaacttgaaatcagttggaatatcatgaaaacccaatgtaaatatctgcaaggttagtaacagtggtaactaaagattcaattgggagtggtttttttcagggatcatataatatgtttataagagcatatgacccaagagcagatgcggaagatgggtgagttcagaaaagaatgagataagtcagtgcctgctgagataaagtcatttttctaagagtgctgattctagtgtgaaacctaagtaatttatgtaataaaagtctcatgttccataacacctgcatatgacagaaataatagctgcaaaagtactgaagacacaaagattacaaacatgatcctcaactcaaatattttattctattgttaggctatgtttaagtcttatggctaaactagtcacagacagcagagaaagggaatggttagcatttcattgtttttttttgttgttgttgttttgtttgttttcttagatggagtctcgctctgttgcccaggctgcagtgcaatggcatgatctcggctcactgcaacctctgcctcctgggttcaagcgattctcctgcctcagcctcccaagtagctgggattacaggcatgcgctaccactcctggctaatttttcatattttaagtagagacagggttttgccatgttagccaggctagtctggaactgctgacctcaggtgatccacctgcctcagcctcccaaagtgttgggattacaggcatgagccaccacgcctggcccattgatcttaacctagacaaaagtatgagattgtccatggtgacaagcttctacaatatgaatctaagtggtatcaggacagataattgtgatataattgtgatacaagtgtacttgtatactgtatactgttcaccaggcaaatttagtgcttctggtctgaaatatcttttcacatgtgtcaaggcaaaatgacactatgctagtagtcattcaagattgcagctgtaagcctcaataaacctaccatctgaggcatttgtttaatccttcaatccagagacgtgagatgtgacttactgagtagattaagtaaactgctcttttcattgcaatgaataaagagaggtaatctttctccacagactcttcccagcataactaggcaactcaaataattctctttccccactaaatggaatctgtttgaggcctgagcaaaacaaagatataaatgcaggatttggaacatgattgttctgtggtgttttgattctcaataccagtacttcacagaataaatattaactctctgctagataacatattgctgtgcagggattagttccaagagccttgttaagagagttggtcagctagggtttgggtttctttggtccacccaggtccaaatgctacatttctaaactttgttaacttcttaattactttttgtattttgggatatgctagttttataaatatatcctcccctctattgaaagggtttagaatacactgttatgttcctctctcctacttttgatttgaaaatgagaatgtttatgtagcatctagaatactttttatagatttgattcattcaaattacagctaatctttaaccttagcctaaaccttagccaaaagaaatgtagatataattcttaagccataaagaaaacataaaaggaaaactgaggctgggtgctgtggctcatgcctataatcccagcactttgcgaggctgaggcaggcggatcacttgaactcaggagttcgagaccagcctggccaatatggtgaaaccctgtatctactaaaaatacaaaaattagccaggtgtggtggcacatgcctgtagtcccagctactcaggaggttgaggcaggagaattgcttgagcctgggaggtggaggttgcagtgagctgagatcgtacctttgcactccagcctgggcgacagaactagactgtctcaaaaaaaaaaaaaaaaaaaaaaaaaaccaaaaaaaaaaaaaaaaaaaaaaaaaaagaaaaaactgataaagctcacctaagatgcaaaggggaattcacactgcatattttaaaaatctatagttcaaaaattaaaaagtaagtaaatgaattaaaaattcagtagtttgaggaaacagaggtcaaaggacaatagttgggacaaaaaagacatctgttaatatgtaataacaataggatttaaatatctgagggaaaaatttaattaaaaaaagaaaatctataattaatttacaaatgaagaaatttactggcttaaatacgtgagacagagaagaaaactgatccaacctgagagagttgaaagatattgaagcaggaagttccttgttgctacaaccccttggttgaagattggcaggagggagcagtggctttaacaagtgaactttatagttatagtctcaaaaaggtgacaaaaatcatagctattaactgtatccaaaagtgtactttcatattaaggagctaaaaatgttttacctgtgtttctaattatgtcactacatttaaacattatagattttggtttttaaaacatatactcagttcgtgcttacaaaatatttaatttgaacatatcttcatcagttttgctgaacaaaaattttccaaaagaaaaaaaaaatcctaaataaaaaggatgcaagaacaaaaaacttggaaattataatttggaaagataattgttatactttcggttattacatagacacataatttataattctataatcgtgaaataatgaattatgtcttcatcttaaaactgtaaatatcaattttcaatctttattttctacttaatgtttcattctgtaatttctaaatgtcaaaataataaagctactctgacaattcaataaaaataaatacaactactacattaaagctgatacctgagttgagttagttatttgatacctgagttgagtgagttagttgagttagttaggtatactcaaccttctgttgagtataccttttccaaaatgcttgggacaagagtatttcagattttgagtattttctgattttggaatatttgcattaaatggtccatttagcattttctttgaacatcatggtgatgctcaaaaagttttagttttgagatcatttgagatttcacattttcagttttgggatgttcgatccatttgacttaatagttcagacattttataatcctaaaaattactgaggaccccaaggaagttttatgtaggctatatctaccaaatttactgtatcacaagtcaaaactggaaacttaaatattaggtaattcaaaaataatgagttggtcatggtgactcaacgcctgtaatccagcacttcgggaggctgcagcagaaagactgctcgaagccaggatttctagactagcctgggcaacaaagagagatattatctctacaaaaaatttaaaacatttgccaggcatggtggcatgcccctgtagtcccagctactcaggaagctgaggttggaggatcacttgagcctaggggttctagcctgcagtgggctatgatagtaccactgtactccaacctgggcaacagagcaagaccctgtccctaaaaaataaaataaaataaaataaaataaaacaataaacccattacctgttaacataaataacacatttttatgaaaaataactatttttcctaaaaaaaaattagtgagaaaagtatctctgttttttttttttttttttttttttttttttgagacagagtctcgctcttttgcccaggctggagtgcagtggcgcgatctctgctcactgcaagctccgcctcctgggttcacgccattctcctgcctcagcctcccaagtagctgggattacaggtgcccaccaccacgcctggctaattttttatattttcagtagagacggggtttcaccatgttagccaggatggtctcgatctcctgacctcgtgatccgcctgcctcggcctcccaaagtgctgggattacaggcgtgagccaccgcgcccggccagtatctctgttttacatttttttctaatctctttagtgtctttacaagataattagatatctgcttctgcattccatctgtaacaatgtgttgttttggttgaagtatatgaagaaaatctagcttcacacagatatatggttggaaagggaatcttttaatagtcttttcagataagtgtagatattttcttttgttctagatcaaaactcactaaatggtaagtttctgtaatcatattaatgactttttcatactatagtacattaaatctactgacctaccttgcactttgaattgatctttttacccatacatgattttgtaattccacgaactgatcatttggaaaatacaagttatgcagttccatcaaatgttgacacatttcattaaataatttaaaaatacatttgttgatatcaacatcaatgttttaaaaaagcttttctatattgggaagctatgaagcttaagatggtgaacacaagtttctaaaattctagtttttacttaaaagctttaatttcaccattggcaacaaatactgtcagctgtttccttgaagtaataggctcacttctttcttctttttttgagaaaatatctgtcaaatgcctaagtccaaaaaattatgtttataagtttttcttttcagtaaaatcatattacattaaaaagtatctagttcagctcacaattcaaagaattgtacaagtgtttttcttgaagcaaccatcatatttcagtatgctgcagaaatgctttatgcatacttcccattttattactcaggatattaaaaagacagatcctcaaagttgagatttaataagaattaatgtttcccgcaccatcatggtcattcttaagttgaaactgcctttaaaagaaaatactgagtgcatggtggggaagaactcaagactgcttgcacagtttgatgtcactgcattaattcgtgctaaggttccaacagttttatccaccattgtgtctgcattggcagtgcaaatatcaacacagcgaaaaggcaaataacaggttgatattatataaaaatatttttgacattttgtacccattaaagaaagggtcttggacatcttcagggttctgctgaacattatttgagagccactagtttagataattcaagaaatgtagaaacatcacagaacaggacgtattttattatgcttcttaagaaaaggaaattcatagtaagtagcttcacaccttcctgctattccaaatacatgcaatgaaaaaaaaaatagaaacgagtctctgaccaatgtcttaccttagctctagaagaactgacattttccatattttcaatgctgcagatacaattctgtgaaactttccggcaagccactctgatatagtcccagaagctacgaggactttcataaccaaaccaggttacttgaccttcaggagacaaattgcgatataaaattttaaaaagtaaaataaaactagacttgaaaatgcaagaacaataaaattctgaaaaataaaggtaatatagtgaactataatggcaagggcaccaccaatctaggtgtcaaaaagcctcaaatctagtcctattctatctttaactagtggtgttagtttggaaaatttacttaatttacttaatgagtctggatcatagtcttaacaataaaatcaaactaaatgaaagggactagacactagaaatatcttgccatttaacatcctatttgtctaatacagtcgcttaaatagcacacgggaaccttcctgcgcttctagttaagcattaataaatgtcaccaattgaattctaaacctttctctatttaaaaaaacagaaaaaaaaaccccaccaccataattcttttctcctcttcataaggatacttcaaaaaaggtatacaatgtgttgtttactttataaataaataaaatcaattagcatcctatattcactaataatgcataaccacctacccaaccattctcatctataaagctcccctttaactgtcatttgtttgctctcttccagttaagaactcatgaaaaacttgtaatctttcagatttggctaactatgtatccgttcatgaccaaatgttctattgtgcataggttatattagtattaatatttctatggttgggcatggtagctcatgcttgtaatctcagcactttggaaggccaaggtgggtggatcacctgaggccaggagttcgaggccagcctggccaacatggtgaaacctcatctctactaaaaatacaaaaactagctgggcatggtggtgtatgcccataatcccagctacttgagagaggctgaggcaggaggatcacttgaacacaagaggtgaaggttgcagtgagctgaggttgagccactgcaccccagcctgagtgacagagcaggactctgtaaaaaaaaagaattctatacaggactctgaatattagtctcacaggaaacattttctacactcagtatttttaagtggaatatgagagacatcttaatactttctttagttgtctagtatgactagtcttccctaggaaagttgtttaatcttcttgtagaaagatttgctttcatattttgaaataagtgcttttttcatcatgatttaattatttactttaaatcctcccttcctcagtaattacttctctacagcaacatcaagaagtgttcttgtcagcaagcaccattttaggaccaatgtctgagataatatctgagtggttccaaaccatggcagaacattagtgtaacttgactgcttttaaaaaatactcatgtctagcctccccacaaactgaataatcaaaatctttaggggaagatgtaagcatttgaatttttaaaaatcgccccctagtatttctagtgatgtacttattattaatcaaccaacagaaatcctacaagtcatgataggtaacttctattcattattcagggtgttttaaaggcctcttccagaaacccatgtatgatcccaacagctagtccctctgttggcacaggaccctgtgcttacttctcctcaaaagtatttctttacttgattatttcacatattaggcggtaagatcactaaggcaggaattttgtcttattttagatcaatctctaacacttgacacagtgcttacttggctcacagtaggcactcaataaatatttgttgaaaaattaaatttataaatcagcacaacacagataatcttaaatgcaatgaacacaaaaacttaaatttaaaaaaatccaattatctttttatagcaatagttttgataacagtctgctagtgtttgcatgatagattacaaacatcaaatattttgcacaaatatatttttctttatataaataaaaacaaatgcatctataaatctttattctaataactatataattcaatgtctctttaaaaataaaattttgcagccggtgcggtggctcacgcctgtaatcccagcactttgggaggccgaggtgggaggatcatgtggtcaggagaccatcctggctaacacggtgaaaccccctctctactaaaagtgcaaagaaattagccgggcatggtggcaggcacctgtagtcccagctactcgggaggctgaggcaggagaatggcgtgaacccgggaggtggagcttgcagtgagccgagatcgtgccactgcactccagcctgggtgacagagtgagacttcgtctcaaaaaaagcaataaaaaattaaaaataaaataaaattttgctacttacaaatagaaatctacagacttctccctcttaatctctctccatcactttcttctgctccctctcttcttttaactaaaaatttcctgatataatgcctcaatatagtttgtctctagggcacttttcatgtcatcaatttgttagccgtttggaggggaagcagggtgactggtggttaagaacatgggctttgagtccggtggacctgaactagatcactttctagctatgggatcttgaaaaaatgacttaggttcactttatgagtctgggcctcttctgtaaattgaaaataacgatagtacctactggatagtactgttgtaaggattagatgtgatcatgtatgtgcagcaagtagcaaagagtctagtgcatactaaattcaaaataagtgttaattattactactgttattactgtaatcatacaagcagttacagggaccaagctctccttgcatcacaaaatgaagtaggaatgagatgcaaagttaaattcttcacattacttgctttggaatctagagaaatcttccaaacttactccctaatccaactttactcccatcatcaaccattctaaagttacttcctcaaatgtttctaacttcaactcattttccttgacttctattatctgggatcattctataatttcaaaatgagagctacagctgccagacttccctcaagaaatgaagtactacacactggaaagaatcttaaggaaagagtatcaccaagattctgtggtgagtttaagtctctctaaaaagacaatatgggaaacagaagtcagagaaataggcaagggaaaatacaacattgtattagccaatggcaaccacctatagtggtaatccaaataggtaaccacagagaaagataaagcataggttgtccatgaacaagaagattttccgttttaaggaaatgtacaagggtccaggactttggcataggacatggtttgcttttctgtaatgttattttaaatcttctctttagtttcaggtggctgaagaaaataacttgtaggatgtttcaaagtagagctgttgaaaaccaaagagtatttaaaaagccctgttttggaggagagaaaacagagacagaaaaactagaaaactagagttaggttaagcagagaagggtgggcactaaatccttggaactcctgctataggtagggcacactatccacaaggacttttacccaaaagataatgaaaagatttcccagattacaaactgagaaactaagcaattgacaggacggcatatcatcatgactttcagggccataaatcaaccaccaagatcttcataacacatttatctgctctacaaattagatgtgaggatgacttggcttgattctggcttccttccttttccatgtgcatcacttccaaagtgaagctcttaattcaagacactgaatttttcacattcagaaagatattcttcaagagaaggtagattctcttgctagaacctccaaacaagctttcatgtaaattgcctgtatatcctaggatttcatctaaataattaatttctgcatctacagaaaggtttaatttagttcaatataatagatgtgttcaatgagttatctgcgatattatttgaacatcacttttatgtaaatacagattaactgctagtaaaagtctataacctgtatttaacaggaaaatttaaaaacaaagttacaagctactcatgcctttaaaaataaatattgaagtaataaataaccactcctcaaatactttgacttcctttaaaaataaccacaaaagacaatcatatagcaagaaactgactactctatatcttgaagaaatgttattccaaagatgagatatgctgtcattaacagaattccctttttaaagttctcaatgaatataggtatacaatatgctttcaattataagtattcttggaagttaacattttcccaatgttaaacaagcttttaaaaacatattcccatcccatcaatccaactctcttcatctttaggcacagaaacaaatggtgaaaagtttgctagactaaaagacaatctgttactgaccagctatgtgattatctttccaactaaattgcctcatctttaggacctaaaaattgcctgtgatctctagggtccaatgttactctaaaattactcttctatactctttaagtgagatatctatttacactttgcaatatgtctgtgttttgtttgtatcttatttcatggccagaataagaccttctaagaacagaaattaatttttctaaagtggttctctactaagcagtagctgacacaagatcttttcataatacaagaaaaatataaatgaatctgttaagtgacttaattccccatctttagtaatagtgcttagctatgtaaaaagtgaatgataaactgatttcacaaatgaaagttctgttagttaaaatatatcacctacttgacaatattaaagactattacctttgagctattattcatctagacaatcaacaaaagacaagataatcctaccacattttaataaaccactctgatgtcactgcaaaagctttcagatacttaaagaaaattggttcctttaaaaaacttgtggagttctcactttaaactttgtagcagcaatcccaagtttcttactgctaatttataaaagccagtttaatattatccactattttatcaaacagagaaaatttccatttctgtaaaagttcagaaacttttcctttaaaaaggtactattattagttgaggtttatatttattagaccatccagctttgaaggtaaaattatgacactgatccattttctaactaaaatcccaaattaatgttctaaaaaatagaacaagtataaacacttaaaaataattagttacactttaaattgaatctgaggaagtcagaatctacattagatactcaattgtacttacattgctagttctacatgctacttacaggacacttcaagtatatcatttaggcactaagaatcagttactcatctataaaatgtaactattatcctttggtattgacaatgtaatgtctagttcactagtaaggaatttatcacaaacatatacaaatatctaaagtatgtgtctatgccataacaattagtcaactcttaattttccaaaacaaaaagattaagatgaacaggttcagcaaaaatctgaatattgaatcaatttaataggcttttttatcccagtaattttactctctctgaaatggagaacaaacgttttgttttttcccttccaccagcattattaacataaggcttaaagtactggtggaatgaaatcgtacatgacggctgaagtccacacagagagctacacataaatgcgtactcctgaagaaatcaagtataatgtgtgtcagtagtgattaagactataggtacagaacataaaacagataaaattgcttgaaaggattaattgtgggaattagaattaaggaaatgacatttgttttttactttttctctttcgttctactatttaaaaataatgactatattgcttttctaagcaaaaaatacagaaagctagatcattaagtacaaaggtccagcagtgttttgcatatagcagaaactcaattaaagaaaaggtttgaataagtaaataaaggcatgcattctacctgggagaaaggaaactaagaagtacattcccactaatggttcaagaatgaaaaagcagttattgtttatggtgccacatctatgttttactgagactggaatattcatacagcttccctgagctgctacttcacacgtaatatttattattatacagcacttaaaaagtaaataggttattatattgtgtggatttacaagattttaattttaaaattagcataagcatacttgtgctctctggattaaaaaaaaaaaacaaaaacacacaaaaaagaaggctttacaaaacccatgcaatgtactaaaaaagatcacttaactgatacagccctcccccgaaagtcaattccatgctcccgtgcagctcagtggcgggagacatcaccagcatagagtaccttgaagaggtatttggagatgagccagccatctgcaactttgggaaatctctttaaaaaaaaaataacaacaacaacacacagatatttaagaaacctgccatcatgtttacagttccaaactgaatagcccaactaagatggctacatataattttgaagcagtaaacactacttttacctactaaataaatgaactctgttaagataaatatgagctacacttggtaagtaaatgaagctagttccttgtagcttattgtattggagaggctaaggtgtctgtaagtcaaaaatatgtgagcagaaattgtttcctgtttacttttacctccatcattctttctcagatgtaataaactgatgagtagaatagacctcaaagaagagcaacagcttgactgaacttgctggcgatgcacctcagaacttataagattggttaggaaaaaaaatcactcactttggaactatatggctcagaaaatttccaagtttaaaaataaatacacatttttaaatgttaacttttctaaaagttataaacaaatatattttgaaatgtagccattcattttttgcctaagaattgttaaaacttttatgttttcttccctgtagagagcagcacttagatattatataaaatgttggtcagtttaaccaatgttgactaaatgcctactctatcaaaaacactgttttatttgttacagcttctaactcttatttaacaatcaccaactgaaaaagtactagaaatttctgctatatttttcagaaattgctagtataacaatatgggaaaactccaaagccaaatttctgaaataacattcccaaaaaataacatttccttctctcatagtcaaacactgaaatctccaatagtacatggtcccacacctttccaaacacttagatcctttataaaaccaataaaagacaaacacatagagctagtaatgtgacatgaaaaatgaaaggaaggagatacatacagctgtgccacatctacacatctgccattcactctatcctcttacttccataacattttaaacaaatattaaatttggaaaaacatatccaaaaggatctataacttggtacgacagttaaagctcatattagaacataatgttcttgctataactacaacaaacaaaaatgaaatttctcaacattgaatgtaaatcagaatagaatgcttttcattgcaaataacattaattcctaatatttaaaccacatttactatctctgtcctaaaacaaagttctctatattatttgtgatttatagatctaaaaacttatcaaagtaaaaacaatttccatgaaaatctgacttaaagaaattttactacaaaaatgtaccaaataagcatatcatgaccagatttatggcacttcttaaccaaccccttatataaggtgggaaacaattactgaaaatatcacaaaactcaatttatagggtttttgtgtttgattgtttaagagacaggttctcactttgtcaccctggctggagctcagtgatgcattcatagctcgctgcaacctcaaattcttggactcaagcgatcctcctgccttcgccttgtgagtagctaagactacaggtgcgtgccaccaggctcaactaatgtttttatgtgttttttttgtagagaccagatcttgctatgttgctcaggctggtctcaaactcctgggctcaatggattatcctgccgtggtctcccaaagcattgggattacagttgtgagccaccatgcctggcctagataatgttggttatttttttaaaaagctgttagtatgctagcctctgtgccctgattttcattttggctgtgaaagaccatgggaaaattttcttaaatttttcacttatttgtaggatgtaattgctttaattataatttaatacgattaaaccattctagacaagttaaaagcaaccagaaatatctggaccaaacaacaatccactatattccaagttatctaatgtagtcaaatttcaacaactctcattttacagatgagaaaaggtaggcccagagacaaggctgccaagacccagcaatcggttttctctgtcacttcaagctgacctactccttaggagataggcaggacctgactgatggaggataattagtcagttgtatttcctggttggttagagttctcactgacaaccccagaaagaagggggaaaaacatgaggtagtgaaacatgtaatgggaaggaatataaatattttttatataaaacgtaaatccttaggaagtagaagtgctgctctttaaataaacaagcgtatgacaaagctcacattatttcaaagtggcccagggcttgtttgtagaaggggttcttatttgagatggaaacaaaaccttttgttataaaatatataatgttaaaagaaagtgaaacagtatttaacactatgtagcttagaaaaatacttgagacaataccaaagaaaccaggttcagaaagcattttgctcaagaacaaaatgcattcaaatacaacagtataattataccatatagttatttcaggagtaagtttctgaaatttcaggcaaaggcagaatcaactcagagatggatatgcaatagaagaatgcttctatactgaatactgaagacagacagcatttcctgacccaagaagtatgtacttttcaatatcaaataattgattcataattttattaatattgaaattagccctcacacagaaaagactattggccactgttttaaacaaataaattttccttgataagactgaatatgtttctaattcatgaatatgatatttattcttctatatttttcatgtcagccatgttccaactttgttttctattcatttccatttctttgatcattgaatcactatcgtgattgatataatcgatgaattttaacacttatgcaaaaagtaaacctttagcttttgctatatttattctattttctctctctctctctgcatatatatttttttctaataaagttgcaggtagatacctttatataaatgtaccaagatggaatatggaaaagactcctagataaaatggtctgtaaatggattaccatttgtaaaacaaataaaactaattataagtgatcagataataattcagatttttcacaagtcttgtctataaattggcagtatcatatagaacatattctattactaatactgttaaggcgagttgcttataatctttcactttgtatttacataggaggaaaatttttcagcgaagcaacagataaaaatgctacagtactgtaattcagctaacaatgagactatcttttatacagcatttttcatcttttaacaggttctgaagttaaaatgtagtactatatataacttttcttaagctttaaaaatactgctttaaaatgccatttacaggtaggtggtaggtattaacatcttagaaacaaagtatttgttcattgattaaataatttttaaaatactgagtacctaaattgtgctaatcttttgaagtttatcaagtgcaaatcttttgaagtttaaaagtcataactttaaagaaaagaaaatgtaaaaacagtttaataaaataaaaatatagatcacatgaacaatggcaatcaactaaacagtgacaactattaatgaaaatactcttcatcaaattaaagtatttgaatttatggataataagagtaataaaaatattttaaattatatcaaatatatctgtactacagggtcatctcaggttcttataccaagaaatctaagccccaggcttagtggcttacacctgtattcccggccctttaggaggtggaagcagaaggatcatttgagctcagcggttcgagatcagactgggcaacacagtgagactctgtctctataaaaaatttaaaaatttttaaaaaaaaatctatgacagctatttaaacattcaaagatttaaagtaaaaatatagtgcaaacacacataaacatttggcattcaaaattctaacatacttcagtcaactcttaattaggctacatattagaacaaataatacatcagaatgggaatttatcattagacgtctagcaaagcagcttgcagcgatattgttcaccttaaggaaaagaggtaacaataccataaaatgattttgaaaaggacaactcattgaaattagaacatcagaaagatgtaggaactgggattattattatgataccctcctaaaatgaacaaagtccactaaattgtgtaatctttcccctcttctataaaatgagaaatatttactttctttagatgattagcacaataaagtaatattagcaatattagctaattaataattagctaattagtaatttagcaatattagctaaagtaatattagcacaataaagtaaatattagcgcaataaagcaaaattgttgaattatgtagcaaaaataataaagaaagcaattttccaagattaaaaataaagtatgacttgctcattacaagtactgcaaattgctctatgctaatttgcaaaaatcacaaggtcaaactggaaatgtctcattaattttctgacagaaactcaaagggctataaacagataaatgaacataaacatgaattaccatcagagatcatcaatttctgttagacatgaaattggattaattgtagactaaaacatttctttaactctcttattataaagaagacattcaaaaaaatctcagataattttatcaataatagaatttatttaactcttttcatagtatcatcttctttgtgataatcccccttccccagaagccaaatctaaattttgaatcattttatttgaagagattttgaaagtgatgttcatgtaaaataaacctgaaaaattccccagtgtactaaagtttagaaccattaataaatctctcattctgtaaataagtaaatatttaaattggtgaatgaaaatgattccttgaaaattctagtttggttataaaatataaagatcattttgtctatatttcattataaataaatacaaatacataagattttgttcacccagaaatacctataacaaacacagtaattaagaatgctacaataatatgactcaaacagaagcaagtaaccaagtatatgagaattgtgttataaaattttagacattcaaaacaatataaaacattacagaactaagaaaaatatttcatatgttttaaaacagaaatcataaagtctcaaatgaaaaataagtacaaaataacaaactaccaacagtaatcatgtatgaagactaatcaacggagaaaaaaggtcactactgatcaaaatgggtttatataaaaattagttccacataataaatagtttttttcctattttagggtaattgaaaactccacagaagaaataggcaaaagtcatgaacagaaaatgaaaaaaaacaaacatgaaaatatattcaatttcatttctaaatacgtataaattaacataagattatgtgtatatatatgtatatattacattatataaaatgtgtagctctctgtttttagaaactatgtagtgattattttctcccaaatcttaaatgtattataaaacattaatataagattcattttattccatatgcaatttaaaacattgaatcaaatttactaaggtatacataaccccggatgcttcgagaattacatgaatacgatgattttctgagatacaatatctgcttcacctttcctgaatttccaagtacataacttaaaagggtgtttctcagagtggcctctcccattgtctaaaagccaaactctggtgaccttaagagccaatttcttatctctggtatcatgttttggcctgagtatatgggattttattggatgaattgtgttcatatgttactacagaaacaatttaagtctcattttccaacaaaagttggaaaatcttcaaaaatgaacaaagaaaactcaaaagccaaatgaacaggtttatgattatccattgtttctaacagtgtttacactgtacttcaaaagatggcctcatggggaggtaactgtttatcatctaagtcaggaagagctttgaggttcaagccagagttcctgagcaatgcttaggtatcataacagttcaattggattagagaaattctaaaatgtcaagtcacaggagttctaactcgttttaagagtccaaatccaagtcctatcagaaaaaaataaagaaattattactcttccatcaatttttcaacaaataatgactgagtttctgccatatcgtaggcactgctctagagatttggatacaccaatgaacaaaacagatgaagatcttagtcctggtaaagcttacgttttagtggaggtgaagaaagataataaacaataatcataataagtacataaaataatatgctagaagttaagacttaatgtaactcaggggaaagaggtcaggagtgcttgaggttgaaaggaggggaggtgatttattatttaaaatatagtggaagggttaaacctcatggagtagttttcaaatggatgagggtgttaaccattcagatactagaagaagtgtgctccttacacagtaaacagccagtgcaatggtgccctgtggtagaatgtgcctgatatagtcaagaaaaatcaaaagactgataagggtagagaacagtaagttgtgggggaaaaactagctgtacacaaatataactgaaaaaatattaagaatcaatataaaatctaaactgaatgtgagtcagcaagccaaatgttaataagtataattagcagattaaattatacgcaatttaacagtgtcttacatttaatcattttttctttaataagtgctacatttctaattgacagtctatacttgtctggtatactcagctttttcttttctttcttttttttttttttcttttggagatagagtctccctctgttgtccaggctggagtggagtggcacaatcatggctcactgcagccttggtctccttgggctcaggtgaccctcccaccttagcctcccaagtagctgggactacagatgcacacctacatgctcagttaattcttttttttttttttttctagaggcggggtttcaccatgttgcccaggtgggtctcaaactcctgggcctcaagtgatctgcctgccttggctcccaaagtgctgggattacaggcatgagccactgcacctggctaactttttcattttaatcagttattttccatataaactttacaaaaatcactaatacatcccatcctcatgtcaccaagctgaagtttacaacgttgtctctgatgactttactgctaaatttctatttttcttaatctatgtggcctaccagtcagtccataaataatcaaagtcacagatgacattttaaagaactgtaattttcatttgaggtacttctatgcctctttcttgtgtaaagccttccctcacccatccaagaaaaacagatatactcctttgtgttacaccatgctcgttaatatacttctattatgacttgatgacattagtacacacaattatttgttaatgtgtccttattctacctttcaagactgagtttcatgtgaaagcataccttattaatctcatatcctgggcccccagcacagggcctaaatttgttgttgaataagagaatgaatgaggtaaagagaatagaaaaattgtaagaaaaaaaattgtgggtggagggaagccaaaaaaagcagaaagtatacatcaagtgtaaatttaaggcatctgtttcagaaaaagaacagggaactcaggttatgattcatttccaaagcagagaaaaagtagaagtaatacttggccaagaaaaatatggaggggtgatggtaaaggagtattccttgggacttctttttactgggctctgtgacaaattgtccagctttctaaaataagtgaggatcaaggagttagaatcttacatattataatcgaaagtgggatcctccccattttaaaatgttttaatgggaagcaatagaatttgggggagttatacatttattccttgtagtaaatttgctgttgctatgagttttgaaaaatagagggagtcatgtaaccatgattatgagacacataacagtttcatcatgcaaagaaactccttcatcatgatgcttgtcaacccccaccctgcaacctttaatccctagtaccacttatctgttctctgatactacagtttggtctttcctagaatgtcatataaatggaatcatacgtaatctttagggttttgcttctttcatttagccataatgtatctgacatttatacatgttgttgtgtgtggaaattttttttcctttttattactgagtttgtccagtgtatgaacatacaacagtttatccaggcatcacatgaaagatacttgggttgtttccagtttttgacaaaagagcttgataaaggtgtgtagtgctacctaatatggtttgaatttgcattttcctaattactaatgatgttgaacatcttttcatttgtttacttgccatatgtgtatcttctttgatgaaatatctgttcagctctttgcatattttaaaattggattggttttcatattattaaggtttttatagcaattctttgtatattatgcatacaatccctttgtcaaacatgtgatttgcaaatattttttcctggtctatgccttgtcttatcattaacagtgtctttcagggagtaaaagcttttaattttgatgaagtccactttatcaattttttttgtttaatggattgtacttttgttgttatatctaaaatctgtttgcctaattaaacaaagatattctacatttttaagagttttatacttttacattttgtgtttacacctataacccaccttgagctaaatgtgaggtaaggaacaaggttcactttttttttgcacacaggtattcaattaatcctagcctattattcttaaaggttatcacttttccatgaaattgtctttgcattagcaaaatgaatcaagcatatttatgtgtatctttttccaaactctctattctattctattctttttttttttttttttttttttttttgagacggagtctcactctgtcaccaggctggagtgcagtggcacgatctcgactcactgcaatctctgcctcctgggttcaagcaatcctcctgcctcagcctcctgcgtagctggggctacaggcacgtgctaccatgcccaactaattttttgtatttttagtagagatgggatttcaccatgttggccaggatggtctcgatctcttgacctcatgatccgcctgcctcggcctcccaaagtgctgggtctgctctatttatctatacgtataagcttttaccaataacacactgattactgcatcttaacagtaagtcttaaaatcagataatttgagtttccaacttagttcttccttcatgaaattgttttgcctattccagttactttgcctagacatataaattttagagtaagttttatatctacaaaaaaagccttctaaaactttgagattgcattgaatctataaaacaatatgaaaagaactgacatcttaacaacgagttttccaatctgtaatgaagaattacccatccagaatatcaacagtatcaatgttgagaaaccctgttgtaaacttctgtagatgccctttaaggaagttttcttctaatacctagctgtaaagattttttttaacatgaattaaagttgaattttgtcaaatgcttttctatgcacctattagtaggatcctatcatttttattctttagtctgctaataaaatgaaatacatccattttcaagtactgaagcattcttgcattccagtttgatctgtcaatatttattgaagattctgatgtctgtgtccatgaggtgtactggtatgtacagtcatttcttgttttaatgtatttcactttattgtgctttgcagatattgtattttttacacgttgaaggtttgtgtcaaccttgcatccagcaagtctttcggtgcaatttttccaatagcatgtgcttactttgtgtctccctgtcatgttttggtaattctcacagtatttcaaactttttcattattattgtatctgttatggtgaactgtgatgagtgatctttgatgttactattgtaataattttggggcgccatgaaccacacctgtataaaatggcaagcttaattgataaatgtgtgtgttctgaatgctccagctaccggccatttcccatctctctctttctcctcaggtctccctattcccttgagacacaacaatactgaaattaggccaattaataatcctataatggcctctaagtgaagagtggcatatatctcactttaaatcaaaagctgtacacgattaatcttattgaggaaggcatgtcaaaaactgagatagccaaaacctaggcctcttgtgccagttaggcaagtggtgaatacaaagaaaaagttcaaaggaaattaaaagtactattccagtgaacacatgaaggaagtgaaagagccttattgctgatatgaagaaagtttgagtggtctgaatagaagaccaaaccagccacaacattctcttaagccaaagcctaatccacagtaaggtcctctctttaatgctatgaaggatgagagaggcaaagacgccgcagaagaaaagtttgaagctagcagaggttggttcatgaagtttcagaaaaaagccatctctgtacataaaaaaataataataataaaacaaaaaggtgaagcagcaagtgctgatggagaagttgtgctaacttatccagaagactgaactaagataactgatgaaggtggctacactaaacaacagattttcaatgtagacctaacagctttatattggaagaagatgccatctaaacctttcatagtaaaagaagagaagttaatgcctggctttaacgcttcaaaggacaggctgactctcttattaggggctaacgcagctggtggctttaagttgaagccaatgcttatttaccattccaaaaaatcctagggtatttaagaattatgctaaatctactctgcctgagctctataaatggagcaacaaagcctggatgacagctcctctgtttacagtttggcttactaaatattcaaagcccattgttttgatccactactcagaaaaaagattcctttcaaagtattactgctcattgacaatgcacctagtcacccaagaactatgacagagatgtaccaggagattaatgttgttttcatggcttctaacacaacatccaatctgtagcccagggatcaggaagtaatttagacccaagtcttactattgaaaaagtatatttcttaaggctctagcctccatagacaatgagtcttctgatggatctgggcaaagtaaattgaaaatcttctggaaaagattcgtcaagaacattcgagatttatgagaagaggttaaaatatcaacattaacagaatatcaacattaacaggaatttggaaaaagttgattccaactctcatggatgacttagaggggttcaagactttggtggaaggagtcattgcagataacatggaaatcgcaagagaactagaagtagaacttgaagatgtgactgaattattgcaatcttatgatcaaacttgaacagatgaggagttccttcttatggatgagcaaagaaagtggtttcttgaaatggaatgtactcctggtgaagacactgtgaacattattgaaatgacaacaacagaagatttaagatattaaatgaacttagttgataaagcagtggcagggtttgagagtattgactccaattttgaaagaagttctactgtgggtagaacgctaccaaataacattgcatgctagagagaaacctttcatgaaaggaagagtccatggatgcagcaaaattcactgctgtctctttgttgttgttgttgagatggggtcttgctatattgcccagactggtctggaactcaagtgatcctcctgccttggctcccaagtgctgggattatagctgtaagccactgtgcccagcccattgttgtcttaagacattgtcatatccaccccatccttcagcagccagcacatcaatcagtcagcagccatcaatattgaggcaagaccctccaccagcaaaaaggtaatgacttgctgaaggctcagatgattgttagcatttttagcagtaaagtagtttaattagggtatgtacattttttagacataatgctattacacacttaatagattacagtgtagtgtaaatacaacttttaatacgcactggggaaaccaaaaattttttgtgacttgctttatagcaatatttactttattgaattagtcttgaactgaacaagcaatatacctcagtatgagtagagtttccttttcttgtaatattttgtctaattttgtatcaggctaatagtttccttataaaatgagttgagaaatgttatctcctattttctgagatggattgaataggattactattattaccttaatggctggttgcaatcaacagcaaaaatatctaggcctggagttttcattgttggaaggttttaaatactgattcaacttctttaatagatataggactatttgtgttatctacttctttatgagttttgttaggatttgtctttcaagaaattggcccatttcctccacaattaactttttatcctttgaatgtaaggtctgtagtcatatgccctctttcattcctgatattggaaatttgtatcctttctcattttcttgatcagcctaaccagaagtttatgaattttattaatgatttcaagcaatcatcctttcatatcaccaattattgtttttgtttttaatttcattgatttctgcttttatctattatttcctccattttgcttgttttgggtttaattttcccttctttatttagtttctttttcttttttcttttcttttcttttttttgagatggagtttcactccttgcccaagctggagtgcaatggcgcgatcttggctcactgcaccctccgcctcccaggttcaagtgattctcctgccttcagcctcctaagtagctgggattacaggcacacaccaccatgcctggctaattttttgtatttttggtagaaacggggtttcaccatgttagtcaggctggccttaaactcctgacctaaggtgatccactcgccttggcctccctaagtgctgggattacaggcgtgagccaccgggcccggccccttttttagtttcttaaggtgaaagcttaggttactgatttcagacaattctttctaagtaagtttttaatgttttaaatttccttctaagtgctgctttaattgcatgctacacattttgatacaacgcgttttagtttttcattcagttcaaaagactaattttcctcgagaatccctctttgatccaagagttattagcaaagacttggaaccaacccaaatgtctatcaatgatagactggattaagaaaatgtggcacatacacaccatggaatactacgcagccacaaaaagggatgaggtcatgtcctttgcagggacatggatgaagctggaaaccatcactctcagcaaactattacaagatcagaaaaccaaacactgcatgttctcactcataagtggaagttgaacaacgagaacacatggacacagggtggggaacgtcatatactggggcctgtctaggggtgggtggctagggtagggataacattaggagaaatacctaatgtaggtgacaggttgatgggtgcagcaaaccaccatggcacatgtaaagtataatttgtttaaaaaagtgtatttttacattttcaaacatttggtgatttttcagatatcttctgttcttgacatctagtttcattccattacagagaacatactttatatgatttcaattcttttaaatttgctaaggtttcttttatggctcagaataagatcttttttaatgttccacttgccctcgaaaagaatatatattctgccactgaggagtattttataaatgttaattataaatgttggggtggccaggcacagtggttcacacttgtaatctcagcactttgaaaggctgaagtgagaggaccacttgagcccagtagttcgagaccagccagggcaacatagtgagacctagcctctataaaaaatcaaaaaattagctgggtgtagtggtgtgtgcctgtagtcccagctactcaggaacctgaggtgggagaatcatttgagcttggggatgtggaggctgtggtgagccatgattgtgccattgcactccaacctgggtgacagggtgagatcctgtcttaaaaaaaagttgggggccgggcacggtggctcacacttgtaatcccagcactttgggaggccaaggtgggtggatcacgaggtcaggagatggagaccatcctggctaacactgtgaaactccgtctctactaaaaatacaaaaaaattacccgggcgtggtggcgggcacctgtagtcccagcttcttgggaggctgaggcaggagaatggtgtgaacccaggaggaggagcttgcagtgagccaagatcgcgccactgcactccagcctgggggaaagagcgggactctgtctcaaaaaaaaaaaaaaaaaaaaaaagttggggtgttttataaatgtcagttggctgataatattgccaagatcatttgtacccttactaattttctgtttacttgatctactattatgagaggagtgttgacattgctaagtataatgtagatttttctattttctcctctcagttctgttaccttttgctttttagactctgttatcagctgcatacatactttggttttgttctgtcttcttggcaaattaatctgctttttaatatgtaaatgtccaactttatccctgtcagttttctttgttctgaaatctactttgatatataattaaatctactccaactttttttcaattactttctgcatggaataactttttctatccttttaacctatctttatcactataattaaaatgggtttctgtatatattgagtcctttttttacccagtcaaaaaatctcttttaattggagtgcttaggccatttatatttaacatatctattaataaggtttgatttaggtctaccattttattgtttgttttctgtttatcccttttttcaccaccttctttttggataactttaatgttttaatgttccattttaatttatttattggcttttttggctaaaaactcttagtatctttatagtcactactttatgaaatagaacacctaatatttaatagtctacagttaacattttagcatttcaactaaatatatataaccacatagttccctttactctgtagcctttgctttaaaagtcacttgtactatacatgcaaacctggaaaccttccccagcaatgccataaattttgctttcaagagtagagtcagggccaggcatggtggctcacacctgtaatcccagaactttgagaggctgaaatgggaggattgcttgagtagtcatattgaaagaccttaatagaggagaaaaactctgctgtatttatttagatattcacagtttctgttgctctttcttcattcatgaagttccaagttttcttctgataccatctccctttagcctgaagaacttttgttagcatttcttttagaccagatttgctagtaataattcttagttttcctttatctgggaatttctttattttgtcctcatctctgaagtacattttcactgaatacagaattctgggttagcagtgcttttcttttagaactctaaagatgctatttcactgtcatctgtcctccatggttcctgttgaaaaccctgcattcacttgaactgttgttccctatatgtaataaattatatttctctggcaggtttcaagattttttgctgtaatcttctatgtttagaagtttgattatcatgtgtttagaagcagttaactttaagtttatcccttttgaggttttgttgggttttttgttttgttctgttttggatttttgtgtgtgtatgtatggtgagaacacttgagatctactatcatagcaattttcaagtacacaatataggtctccagcacttaatcatcttataactgaaggcttgtaccctttgaccaatatctccccttttctcctatcccccagcctctggtaatcaacattttactctctgttactataagtttgactatttttaggctccatatctaatacatgagatcacgtggtatttgtctttctgtgtcttgcatatttcatgtagtttattgacctccaggttcatctgttactgcaaatcgcaggatttcctttttttttttttttaaatctgaaatggtattccattgtggtgtgtgtgtgtgtgtgtgtgtgtgtgtgtgtgtgttatatacactgtagtttattaatccatccttctgttgacagctacttaggttgtcttaatatcttggctactgttaaaaatcctgcaataaacatagaagtgcaaatatctcttccaaatactgattttatcttctttcaataaataacccagaagtagaactgctggatcatatggcagttctacttgtaattttttgaggaacctccatactgttttccataatggctgtcctaatctacattcccaccaatagagtaggaaggttcccttttctccacatccttgccaacacttgttatcttttgattgttttttatactggccatctagacagatgtaaggcattattaaattttgtggtttagatttgcatttctctgatgagtagtgatatcgagtgtcttttcatatatcagttggccatctgtatgttttctgatcctctgcccatttttattatttagtggaagggaatatgagtgattttaagataaggcaaggagttgtgatccaggtaatggaacatggtaaaggcatttatcttttttttttttttttttttttttttgagacagggtcttgctctgttgcccaggctggagtgcaatggcatgatcttggctcactgcaacctctgcctcctaggttcaagcaattctcgggcctcagcctcctgagtagctgggactacaggcatacaccactatacctggctaattattgtgttttcagtagagatggggtttcaccatgttggccaggctggttgtcttgaactcctgacctcaagcaatccacctgccttggcctcccaaagtgatggaattataggtgtgagccactgcgcctggcctctttgcccattttttaatgttgttgttgttgttgttgttttctactgagtttcttaaatattctggatattaacaccttattggatacatggtttacacatgttatctctcattctgtaagttgccttttcattttgtggattgtttcctttgctttgcagaaacttcatttgtttgtttgtttgtttgtttagacagggtcttgttctatcacccagcctggaatatagtgatgaggtgatagctcactgaagcctcaaactcctgggttcaaccaaccctcctgcctcagccttatgagtagctgggactacaagtgcatgccaccacgtctggctaattttttaactttttgtagagatgggaatctcactatgttgcccaggtagatctcaaagtcctggcactcctgacctcaagcaatcctccagtgtcagtatcacaaagcactgggattacaggtatgagccactacacttggcttgaaacttctcagtttaatgtcgttccacttatttatcttttctttgttgcctgtactttgggtgttaagtccaaaaatatctttgccaagaacaatgtcaattagcttttcccctatattttcttttagtaattttacagtttcaggtcttatgttaaattatttaatttgttttgagttgatttttgtgtatgatataagagaaaggtccgatttctctctctctttctttgttttctttctttccttctttctttttcctttttttttttttttttttgcatgtgaatattcagttttctgaacactatttactgaagagattatcctttccctattgtgtactcttggtgtcttgtcaaaaattagttgaccataatatgcatacattaatttctgggttctctactttgttccattggtctatgtatctgtttttgttttagtaccaagctgtttcaattactatagcattgtaacatagtttgaagtcaggaagcataatgccttcagctttgtttcttttgctcagggttgctttggctactcaagactggaggtttgatataaattttaggaaacttttccattttctatgaaaaatgtcattaaaattttgaaaaagattatattgataagagacttggacatcaggaagactggcagactctgaacagatctttggagggaaggcatttagagtggacagagggaggaagcagacactgggtggaagagggaggaagccgggaacccagcatggggaggctaagcacagggacttgttcctagcccccagcatcttctggggaaaaggcaagttgaacaagtgaggagcggcccgctctcaccacagactgccaggatcctagcagcaggagatcatttccccaacagacacttaagctggcagggagagatgcctgaaaaggctgtaggtacagggctccagcctgtgcaaaaccaagagggcttggcacaggaagagctgcactggagcacatccaaggatgcccctcccccaaggcttaccatgctcctgtgggagcctttagccttagggtgaccgtcagacctggacagagaaggtgctcttgcctgtaggacaaagccagtctgatctaagcaccctcctgtcagctagcctctccttgggctccagcctaccatgcccacttgcaatgcggcctcagatgcccaaccagggtgcttcctgggggccctatcatgcctcctttgctggcagacaattcttgaccatctcagagttccaacagaccagcccctgccaatacatgctagcccacccacagcttacccccaaggcagacttgcctcacctactttactggcatatactatttgcccatgccctgactccccactgctttgctggcacatgtcaccctcctctcccatcccatgctggtacatgtatgtgtgtgcaccctgacaccctagaactgccagcatgagtgtaccctgccattattcccccactgatgtgtgggcacagagatacactgccaccgacatgaaggcacacaatgataccagcaaccacacccctgccagcaccctgctcctgccatgatagcagcaagagagcatgcatggatgccagtacccccacccctgccacaactgcataagtacctgcatgtacatcactgcctcgcttccactggtaccctgccccagccaatgagggtgtacctcgctatacttctgcagatgctggcacacatgaaggagcatgaatcccactgccaccacctcgatgaagtggtttggccggtaccacccataggagtattgtgaccagtggactgaaaacaccttggcccttccagtgcagcagcttcctaaccttgaggggccagagaacaaagccaggggccaggtaccagttccccagagttatagcacacagccgaggagtgctgagctaagccttggcccactaaaatcttccagaaatgaagccaattgactgaacctaccttatatcacaatcaaacacccaagggcatcaaagaatataaaagcaaaaaaacccatccaaggacagcaacatcaaaggttgaaggaacatcagcccacacatgagaaagaaccagcacaagacctctggcaactcaaacagccagagtgtcttattacctccaaacaactacctagtttcccagcaatggttcttaaccatgctgaaatggctgaaatgagtgacatagaattcagaacatggatacgaatgaagatcatcaagattcaacagaatgtcaaagctcaatccaaggaatctaaggaatatgacaaacggatacagaagccgaaatatcgaagggccattttaagaaagaagcaaactgatctgatagacatgcacacttcgagaatttcataatataatcacaagtattaatagcagattcgaccaaactgaggaaagaatctcaatgcttgaagactggttcttgaaattagctcagtcagaaaaagaaaaaagaataaaaaggaataaacaaaacctctgagaaatatgggattatgtaaagagacaaaatatgtgattcattgccatccctgaaagagagggagacaaagcaaggaaattgggaaacatatttgaggataacaaccatgaaaatgtccccaacctctctagagaagtcaacattcaaattcaagatatgcagagaatcctgcaaaatactatacaagatgaccattccctaagacatatatagtcattagatttgccaaagtcaaaatgaaagaaaaaatgttaaaggcagcaaaacaaaaggggaaggtcacctacaaagggaacccgatcaggcaaacagcaaacctttcagcagaaagcctacaaaccagaagagtttggggtcctaaatgcagcattcttatagaaaaggaattccaggggagtagtcaggatggccgaccagaagcagccagtgtgcatggctctcatagagaaagacaagttaatatagcaccttcaattgaaacatccaggtactcacattgggattaatcaaggaaacaacttgacccatggagaatgaagaaaagcaagacaggacaacagcccacccaggagtaacgcagagccaggggaacctcccctgcccagggaagcagtgagtcaatgtgtgacctcaggaaaccacacttctcccatgaatctttgcaaaccttgggtcaggagatctccttgtgaacccattccaccagggccttcggtctcacagacagagctacatggagtcttggcagagatgctgctcagacatgcatggaaaccctggaggcttagatactgggctttccagcaaaagaagttgcagctctggcaaagtggaaggctggacccctgtacataccccttggaaagaggctgaatctagagggctaagcagccaaaacctacaggccccacttccacggcaccccacaagataagacccactggcttggaattctacccagccaccggtagcagcactgcacctccctagggaggagcgtccaggggaggggtgggccaccatctatgctgtttgggcaccttagccattccagcctctgggctttggagagtccaagctgaccagaggtggaaaggatcccccagcatagcacaactgctctaccaaaatgtggctagactgctactttaagcaggtacctgatcctgttcctcctatgggtggaacctcccaagtggggcctctagccatccctgcctgtgttctccagacaacacagatttgaattctccctgggatgatgctcccagagggagaggcaggtcgccatctctgctgtctgggtgactcagtcattcccatctttgggatttggagagtctgagcagaccaggggcagaaaagactcccagaaagcacagctgctctaccaaaatgcggccaaactgcttaagtgggtccccagtcccacttctcctcactgggcaggacctcccaaccagggcctccagcactcctgcctgtgttttccagccaacagagagctgaattctcccaggacagtgctcccagggggagtggcaggcaccatctttgctgtttgcctgacttagcttttccagccttcaggtttcagagtgtctgaggcaaccgggggctgaagtggacctccagcacagcacggaacagctgctctaccaacacatggtaagactgcgtttttaagtgggtcctcaatcttgctccttcttactgggtgggacctcccaggtctctacccacctcttacaggtgcctttgggccagcaacaggcctgtacctcccagggacaaagctcccagagagagggacaggctctcatctttgctgttttgcggccttcactggtgatacctccaggtactagaaaatccgaggcaaccaggtactggagcaaacataccacagcagccctatggaaaattggccagagtgttaagtaggtgcccattctcagatctcctcaccagacaggtcttccaggcttgtgtctccagccaccctctaccagagctaccgagcaagtagcaacttggcaactccctggacagggcctctaggggaaactaaaagcctctctgagactgccgctgcagtggatctgcccttgccggaccaataagagagtaaaaaccctaagtgtcgtgtccacacctccaaccagttgtaatcagcccaaggagaggaggccagtacgtctcccacaggtcccacacaccccacagtgcttgtgactagacagggaacccttggcctggggccacagtacagaccctccatcctggtctgattgccctgaggggctgctgacctatatctctctgggttggagcccccaggaaacaagcaaatgaccctcagtcacaactactaataagatccctttctctgctgcctccaacttgagaaagaaacataaacactgagatcgccccaaagctgcagtgggcagcccagaagtaccaaatcacaatctacagccagcattcaagggggagagaaactcacactttcagaacattgacagagaacacagctgcaattgtgaggaaacataggggagccacacaaccaaacaagtctaccaactgaccaaaaagcctaagccacctgctggatcacaccccaaggctttaacatcaaaaatacctcactaatgtacccacctctgaaaccagagtcaagaagtcagcttcaaataaagacactgcacaaagccttggcctggtgaaaacatccaaaagagaagtctgttgactatacttaatctacaatgcagataaaggaacacccacacacagagatgagaaagaaccaatgcaagagctccagtaactcaaatgttcagagtattgtatgccatccaaatgaccacacccattccccaacaagagtttttaatcaggctgtactggctgaaataacagaaatacaatccagactatggataggtacaaagatcactgagactcaggaagatggcaaaacccaatccaaggaaaatgagaatcacaataaagtgatacaggagctgaaggatgaaatagctggtataaaaacagaacccaatgggtctgacagagctgaataacacaatacaataatttcacaatgcaattacaagtattgacagcagaagaaaccaagctaacaaaagaatctcagcacctgaagactggttctctgaaataagaaagtcagatgaaaataatgaaagaggaataaaaaggaataaacaaaacctgtgagaagtattggatcatgtaaagaggtcaaatctacaaatcactggcattcctgaaagggagggggagaaagaaaacaacttggaaaacatatttcaggaaattgtccatgaaaacttccccaacgaggtacagggcctaacagttaaattcagaaaatacagagaactcctgcaagattctatacaagaagatcacccccaaaacacatgtcatcagctattccaaggttaaaatgaaagaaagacttttaaaggcagctagagagaaagggcacatgacctacaaaaggaactccattaggctaacagtggacctctcagctgaaaccctacaagccagaagagattgggggcccatattcaacattcttaaagaaaaaaatcttcaaccaagaatttcatatacagccaaagtgagcttcccaagtgaaggagaaataagatccttttcagataaacaactcttgagggaatccattaccaccaggcttgccttacaagagattttgaaaggagcactatatagaaaggaaagaccaataccagctaatacaaaaacatgcttaaacacacagaccagtgtcactgtaaaacaatcacagaaaaagccaacataataatcagttaataacacaaagacaggatcaaatccacacaaatcaatattaaccttgaaagtaaatgggctaaatgccccacttaaaaggcacagtgagaagctggataaaaaagcaagacccaatggtatgctgtgttcaagagacccatctcacatgtaatgacactcataggctcaaaataaagagataaagaaaaatctactaagcaaatggaaaacagaaaaaagaagggattgcaatctgaattcagacaaaagagatttcaaataaacaaacatcaaaaaagacaaagagggcattacttaatggtaaaggattcaattcaacaaaaaaacctaaataccctaaatatatatgtacccaacacacaagcacccagattcataaagcaagttcttagagacctacaaagaggcacaaactcccatggaaaaaatagtgggagacttcaacactccacagacagtattaaacagatcattgaggcagacaattaacaaagatattcaggatctacactcaacattaaaccaaaaggctcggatacacctctatagaactctccaccaaaaaacaccagaatatacattcttctcctcaccacatggcacatactctaaaactgaccaaataattggaataaaacaatcctcaacaaatgtaaaagaactgaaatcataccaaacacactcttggatcacagagcaataaaaatagaagtcaagactatgaaaatcactcagaaccatgcaatcacacagaaattaaacatcatgctcttgagtggctttggggtaaataatgaaattaagacagaaatcaagaagttctttgaaaataatgagaacaaaaatacaacataccagaatctctgagacacagctaagacagtgttaagagagaacttcattgcactaaatgcccacatcaaaaagttagagagatctcaaattaacaacctaccttcacaactgaaagaattaggcaagaacaaatcaaccccaatactagcggaagacaagaaaaaaaatcagagctgaactgaaggaaactgagacacaaaaaaaacaatcaaaagatcaattaatccaagggctgttgttttgaaaaaactaataaaataggccactagttagactaataaagaagaaggaagaaaagctccaaataaacacaatgagaaatgacaaagggaatgttactactgaccccacagaaacaaaaacaaccaagagaaactactatgaacacctctacatacacaaactagaaaacctagaagagatgagtaaattcctggacgtatacactctctcaagacagagccaggaagaaactgattccctgagcagaccaataatgagctctgaaatcaaatcagtaataaatagcctaccaaaaaaaaaaaagccaagggcctgatggattcataactgaattctaccagacatacaaatgagagctggtaccatttctactgaaataattccaaaaaaatgaggaagagggactcctccccacctcattctctaaggccaacatcatcttaatacccaaacctggaagagacacaacaaaaaaagaaaatttcaggctgatatccttgatgaacatcaatacaaaaatcctcaacaaaatactggaaaaccaaatctggcagcacatcaaaaagctaatccatcaagattgagtaggcttcaaccccaggatgcaagtttggctcaacatattcaaatcaataaacatgattcatcacataaacagaactaaagacaaaaactatatgattatctcaatagacacagaaaaggcctttgataaaattcaacaccgcttcatgttaaaaactctcagtgaactaggtattgaaggaacatacttcaaaataataagagccatctatgacaaacccacagccaactttatgctgaatgggcaaaagccagacgcatttccccttgaaaactgagaaggatgccctctctcaccactactattaaaaatagtaatggaagtcctagccagagctatcaggcaagagaaagaaataaagggcatccaaataggaaaagagaaagttaaactatccctgtttgcagatgacatgattctatatctagaaaaaaaaaaacatagtcttggcccaaaagttcctccatctgaaaaacaactccagcaaagttgcaggatacaaaatcaatgtacaaaaatcactagcattcctatacaccaacaacagccaaacttacagccaaatcagaatggcaatcccactcacaactgccagaaaaagaataaacttcatagcaatacagctacccagggaggtgaaaaatctctacaatgagaattacaaaaccctgctcaaagaaatcagagaagacacaaatggataaacatcccatgttcatgaataggaagaatcaatatcactaaaatggctatactgcccaaagcaatttatagattcaatgctattcctatcaaactaccagtgacattcttcacagaactagataaaaaccattttaaaattcatattgaaccaaaatagaacccaaataaccagaagcaatcctaagcaaaaatagcaaaggtagaggcatcacattacctgacttcaaactataccacaaggctacagtgaccaaaacagcatggtactggtacaaaaacaggcacatagaccaatggaacagaatagagagcccagaaataaggctacacacctatgaccatatgatatttgacaaagctgacaaaaacaagcaatggggaaaatactcctaatcaataaatggtgctgggaaaactggatagccatatgtggaagattgaaactggaccccttccttacactatacacaaaaataaactcaagatggattaaagacctaaatgtaaaacctcaaactattaaagccatggaagtttacataggaaataccatcctggacataggaatgggcagagatttcatgaaaaagaaaccaaaagcaattgcaacaaaattaaaaattgacaaatggatctaattaaacttaagagcttctgtgcagcaaaggaaactatccacagagtaaagagacaacctacagaatgggaaaaaaatatttacaaactatgcatctggcatggtctaatatccagcatctataaggaacttaagcaaatttacaaggaaaaaacaaaccactccataaaaatgtgggcaaaagacatgaacagacacttttcaaaggaagcatacacacggcccacaagcatatgaaaagaaagctcagtatcactgatcattagaaaaatgcaaatcaaaaccacaatgagataccatctcacaccagtcagaatggctattactaaaaagtcaaaaataacaggtgctggagatgttgcagagaaaaggggatgcttatacactgctgttagaaatgtaaattaggtcagtcatcagtcattgtggaagacagtatggcaattcctcaaagagctaaaagaactaccattcgacccagcaatcccattaccgggtatatacccagaggaatataagtcattctaccataaagacacatgtacacgtatgttcactgtagcactaaagaaaatgtgatacatatatgccatggagtactatacagctataaaaaagaatgagatcatttctattgcagcaacatggatcaagctggagatcatcattcctaagtgaaataatgcgggaacagaaaaccaaatatcacacgttatcacttgtaagtgggagctaaacactgactacacatggaaagaaggatgagaacaacaaactctgaggtctacttgagagtgaagggtgagaggaaggagaggatcaaaaactacctttcacgtactatgctcattacctgggtaataaaattaattgtacaccaaaccccatgaaatgcaatttacctagatgacaaacctgcacatgtacccttgaacataaaagtttaaaaaaggaaatactgcattgaatctataggtcactttgggtagtatggacatttaacaataaaaattcttccaacccatgagcatgagatatatttctatttatttgtgtcttctacaatttatttaatcaatgtttagtaactttcagtgtacagaggtttcacttccttgcctgaatttcctcctaagtatattattcttttctgatggaaatggaactgttttcttaatttctatttttggatagttcatttttagtatataaaaatgtaacttatttttgtatgttgattttgtatcatacgacttcactgaatttattaattctaaccattttttggtatttaggttcttatacatgtaagataatttaatctgcaaacagggatcattgaacttcttatgttctaacttggataccttttatttatttttcttgcataattgctctagctaggagatccagaatgatgttgagtagaagtggtaggaatggattcccttgtcatgttcttgatcttagagagctttcagctttttaccactgaatatgatgcttactgtgtgcttgttatatatgacctttattatgttgaggtacattacttctgtactttaattgttgagaatttttattaagaaaggatgttaaattttgtgaaatgctttgctaagcttcttgaatctataaatttatcttccccaaatctaggaacttatagctattattttgtcaaatgtattttctatattaatctcttcctcctctccttctaagactccaatgacacaaacttatatattttgctataaatttttaaatttcttcctgttctgttcttcagattggatcatttctattgatttactttgaaattcatatacgcacctctatcatctccattctgctttagaggctcatctggttaatgttttatttcagacatcatacttttaaatttccatggttcttcctgaagattttatttctctactcagaatttccatttttctattcatttcaagagttacaccttacatcatggagcagggttataatggctgctttgatgtctttgcctgattattccaacatctgggtcatctcacaataagcatctgtattcctttgagaattgatcacattttcctgcttccttgtaagtaaagtaattttggttttaccctagattttatattttatttttttagagatggtatcttgctgtgttgcccaggcttgagtgcagctgctatctccaggtacaataatagtgtactacagccttgaactcctggcctcaagtgaccctcctgcctcagcttcctgggtagcttggactacagaagtgtgccaccatgcctggctaccctgtatatttttaatttaatattattttaaaagtgaatgacagagtctttcctcaaagtgcacagagacaagaagatataaacatgtaagccaatagctacaacacattgataaatgctgtatgaaatgaattgcatgcctccaaaattcacatgtttaagtcctatccccaatatatctgtatttcaagatagccactataaggagttaattaaggtgaaatgaggtataagggtggggccttcatccagtaggatcatacaaagagtcaccagagagctctcattctctgtctccaccaagtgaggacacagtgagaagacgaccaaccacctacaagccagaaggagaatgcttgccagaaagcaaatcagccaatatcttgatcttggacttctcatcctccagaactgagaaataaatttctgttacttaagcctctcagtatgtagtattttgttatagtactctaagaacactcagagaattaggttattattggacttactctaccttgtctaacatcctaagttcagtaagatttttcaacagtagcttttaaaagcaataatgtggaaaagtatacagtattttaaaagattaaagacaaaatctatgctgtaacagaaagatggagtagaaaaataatggaagttttcttgagaaatttactgaaaataaaaaggtatacaaagaacacagaattcaataatacatagtagcggtagaagaaaagccaactgtagggaaagcttaataagtattgactagatagatggaaatagagagaaaacaggggaagaatgcagctgaactggacaacgagatggttagttaatagcgtcaatgggtaataaacacaaggaatagatctcatcatgcttaagtagaaaagaaccttgtatttacaataaaataagagggattaacagacaagagaaagaaataaagggcatccaactaaaaaggaaaaagtcaaattatccttgttttcagatgatatgatcttatattttggataacctaaagaattcaccaaaaagccattagaactgataaacaaattcagtaaagttgcaggatacaaaatcaacatacaaaaagtcagcagctttcctatatgccaacagtgaacaatctgaaaaagaaatcaagtactattatttataattgctataagtaaaatacctagaaataaactttaccaaagaagggaaagatctctacaatgaaaactataaaacactgatgccagaaatttaagaggacacaaaaaaactgaaagatattccatgttagtgaattggaagactattgttaaaatgcccatactactcaaagcagtatacatattcaatgcaatccctatcaaaataccaatgacatttttcacagaaatagaaaaaccaatcctaaaattcatatggaaccacaaagacccagaatagacaaagctatcctgagcaaaagaaacaaaactggaggaatcacattccctgacttcaaagtatactacagggctattgtaatcaaaacaccatggtactggcataaaaagagatacatagaccaatggaacagaatagagaatgcagacataaatccataaaactacagttaactcatttttgacaaagattctgaaaatgtatattggggaaaggacagtctcttcaataaatggtgctgggaaaactggttatccatatgcagaagaatgaaactagacccctctctctcactgtatacaaaaaatcaaatcaaaatggattaaatactgaaatctaaaacctgaaagtgtgaaattattaaaagaaaacattgtggaaagtctccaggacattggactgggcaaggatttcttgactgacaccccataagaacagggaaccaaagcaaaaacggacaagtgagatcacatcaagttaaaaagcttctgcactgcaaagtaaacaatcaacaaagtgaagagataacccacagtatgggagaaaatatttgcagactactcatctgacaagggattaataagcagaatatataaggagctcaaacaactctacaggaaaaaactaataattaaacttaaaatgggcaaaagatcagaatagatgtttctcaaaagaagacctataaatggcaaacaggtatatgaaatggtgctcaacatcattgatcatcagataaatgcaaatcaaaagtacaatgatatattatttcactccagttaaaatggcttttatccaaaagacaagcaataatgaatactggtgagggtgtggagaaaagggaactcttatacactgttggtgggaatgtaaattagtacagccactatggagaaaagtataggggtttctcataaaacttaaaattaaactaccatatgatccagctatcccagtgctagatatatacctaaaagaaaggaaaccagtatactgaagagatagctgcactccaatgtttattgcagcactattcacaatagccaagacttggaagaaacagacaaatgaataaagaaaatgtggtaaatatacacaagggagtactattcagccataaaaaaatgagatcctatcatttgcaaaaacacggatggaactggaggacattatgttaaatgacaaaagacagacacagaaagacaaacttcgctcattttcacttatttgtgggaactaaaaattaaaaacagttaaacttatagagatagagagtaaaataatggttaccagaggctggggagggtagtgaaggtggggggcagttagtggggatggttaatgggtacaaaaatgtagttagatagaactaataagatctagtatttgatcacacaacagggtgactacagttaataataatttattgcatatttaaaaataactaaaagagtataattgaattgtttgtaatgcaaaaaaatgaatgcttgaagtgatggataccttatttatgctgatgtgattattacacattgtgtgcctgtaaaaaaatctcatgtaccccataatatatacacctactatgtacccataaaattaaaaattttaaaaatgtaatctatcagaataaaatcatttaaaatacctaatatcaataaataaagccaaaaaatgtaaataacatttgaaaaaagataatcaacaattaagaatacatcttcttctcaagatgggacatttattaaagtaactataaactaggcccttaagtaagtcttacaaatttcaacaaaatctaccatacaaaccaaattctgactataactcaattaacatagaagtaaatatgaaaaggtaaaatctcctattttcagaaacataaaaagacttccaaattactcataagacaaagaaatgatcagaacaagtagaaattacttaaaaatgagtattaatgaaaatattacattactcaaacataaatttagccaaagcagtagttggagaaaaatttgaaaattaatctgctaagagtccaacataaacataatagagccaaagaagatataacagaggaaacaataatgcattaatatacataaatgatcagcaaagccataaattagttatttgaaagactaataaaacagacaaatctctggcaatactggttaagaaaaaaagaaaaaggaactaacgatcataaaataaaaacaaagaactaaaaacgttttagactttatatctctttagagagctttaatttttaaaaaccattcagctgaattaatctactttaagtgtcacattaaaggaaatactacaactaactagagatttaaaaattgagagtatatgggatagaagacattgacaactttaaggagaatacaaaatagaataacatcaaagaaatcaacaacctgaatagagttgaaagcataaagtgaattagtagttgaagtgcatgtacacacacaaatacactcactcacactcaccatttgacccagagagtttttactggtaactgctacctaatagaccatgattccaaacttacgcaaaattctcccaaagaatgaaaaaaagacaaaacacctgcaatgcatttttgaggctaggataaccttgacaacaaaacccaaaaaagcacaaaacagactaattttactcataaacacagaacctaaacctctaaaatgttatcaaaccgaaatcctaaatctggcaaagtagattaaaacaatatatgaggctcaagttggatttatcctaagaatatttaggtgatttaacatgagaaaaacaattgatgtaattcttcacattaaaaaataaaggcaacttctgggatagaacaaaattaagtagatgtattttcctcctgctaaatacaactaaaaactctggctattttatgaaaacaaacattaaaagattctgaaggtggagataaaaaggaagactggctagaaacttcagaacccagagaatgacacagcagtaagttccctgggtttctttttacctcttataccccggactgtgtgctagacaaattagcaaactgtatctacactataaatacaggaacaacaaacttgctttatccttctcctcttgagtgttctaaattatctttggtggtggagaaaaaaaattataacactgtctaatgtggtcctatatgtatgtagaggaaatatttaaaacaactatgctacacacacagggtagaataaagggacataaagaaaggtaagatttttaaacttcacactggaaaatgataccagtagactggtataatataatactgcaaccactgaaaaatctatataaagagatacactaaaaaacaatataaataaaaatggaattctaaaaagtattcaaacagccccctagaagacagaaaaaagaaaacagagaaaccaagaacagggggaacaaacagaaaactaaaagtaaaatggaaagcctaatgtatttacccatattcttgtttactgtatcctttcttcctgttattccaaagttttgttgttgttgtttgttttgagacagggtctcattctattgcccaggctagattgcagtggcatgatggcacgatcacagctcactgcagcctcaacttcctgggcttaagtgatcctcccacctcagccgcccaaataggtgggacccacagacgcatatcaccatgtctgattaattttttgtatattttgtagagacagggttttgccatgttgcccaggctggtcttgaactactgagctcaagtgatccgcttgctttggcctcccagcctaaagttctttcttttatcatttcctttctgcttaacgaatgttctttaaccattatttgagggtaagtctgccggcaacacatttccttagttgtctttcctgtgagaaggtcttaatgtttccttcattgctgaagaataattctgctgtgttgacagttatctttcagcacttgaaatatgttttaccacttcctcctggcctccatggtttctgatcagaaatctactgtcattcaattgcttacttgtaggcaagttgtcatttttctctatttgcaacattttttctttgtctttatttattggtttaattatcgtgcctttggcatgaatttatttgaatttttcctatttgtggtttgctctgtttcttgaatctgtttgcttatgtctcttgctaactttgggaaattttcagctgttgagtactttttcagtcccaccttctttcttctctccttcaagaattctgacaggtgtcatcttttgttattgtcccacaggtccctgaggctctgttcattttttaacaagtctaatttctctctgttgttcagattaggaaatttctattgttttgtctttcagttcactggttctttccactgtaactcccattttcctgttgggtccatccactgaactttttcagtttcatattttttcagcaccaaatttccattttggtcttctttgtatcttccatttctttgctgtggatttctactttttcatttgtttctcacatgtattgctcaaagcattttaatcatggatgctttaaaatctttgtcagtgattctaacacctctgtcatctcagtgttgacatctattgactatcttttattatgcaatctgagatcttcctggttcttggtatgacaaatggtttcaatggaaagctggacatatttatattatgttatgaaactctggatcttatttaaaccttctgttttaactagctttttgtgacactgctcccacaggggaaggtgggaggggggcattgcttcattactgccaagtggaggatgaagttcaagtttcccaattggcttccactgacacccaataagggcatcctcattactactgtgtgggacttggagtccaggcttcctacatggtttccactggcatggtacttggggtggcctccttaccactgggtgacagtgaaagacataactctctaacaggcctcttctgaccccaccccagtatggccaggaaccagcacattacttttggatgaagatggcagcctaggctccacagtgtggtgttccgtcaacattgtgggaaggggggtgttggggaagagagagagagtttttgaccagccaagagggaagaaatcttatctctctggccttctctgatacaaccctaatggtggtactgggacactgttatagcctcaggagggcggaattctaagcttcccattcagccttttttaagagtaggtggtactacggtttttttgtgtgatgtttaaagtagagcagatacggctgaaaagttttctgttttgctaggctgttctttctctggtcctttggctagagagaatagtatcttgtggagaggttttcattgttgttgtttttttccctttgcctgttgaaatttgcaggttcctggcttatccaacacccagtctgggatatatgaggtaaaaagtaaatccaggcaacccactactgtgtcattcctaaggttctagtgtccttaaccagtctttcttctactcgctacctttcagagtcttcttatgtttgttttatgtataatgcccagggtttattattgtacttagtgagagaaataggggaaagtatgtcatgttcatcttcccagaggtacaagtcttcctaaattgcatttccctcccaccatttgatatgatagaagctatgaatgagggcagggatttttgtttaattccctactgtatgcccagcacttacaacagtgctaggcatatagtagatactcaataaatacaattgaataaataaatgaaaaaatgcatttatagtgatccattacattatgtttttgaatgagtaacttgaaatttaagtagcttagtgatggataaataagtttagaagaaaaatagtggtgaactataatacaactaacaagttaaaaaacaaatcaattgattttcctctataaatgaaattaaataattaggttttttttaaactatcaattaagtctaccaacttagactaaatctaactctgttttggaaaatgagtatcctctaacgtctttctcttctttattctattttcctcctccccctttatcttcccttgctttctctttcttctcctatcattttttctcaagtgtccaaaacaaaccttgatattttctcttttcctaaacatgttcttctttttcagtcaccctgggtaatgaccacatccagactggaatctctgcatcgttccagtcctcagctttctcctacccacaaccaaccaattcctaagatttcttaatactactaatgcataccgtattgtctagcttcactggttagtctcttctttcttcttttttctttgaataaacttataactgtattaattttttctttttaaaaattatttaaaaatttttaaattgacaaatacaaattgtatatatgatatacatgttttgaaatttgtatatatcatggaatggctaaattgtactaattaacaaattaatatacatattacctcactttcttagtccatttttgtattgctataacaatacccaaaactgggtcatttatagataactgaaatttatttctcatagttctagaggctgggaagtccaagatcaaagcaccatcagatttggggtctagtgagggtcctgtctctgcttccaaggtggtaccttgaacactacatcctctagagtgaaggaatgttgtgtctccaaatggcagaaagcaaaatggcaaaaaaggacaaactccctctgtcaagcccttttatagaggtattaatccactcatgagggctctgcccttatgagctaagaacacctcccaaaaagccccacttcccagcactgttggacagggggttaagtttccagcatatgaatttgaggggacacatttaaaccacagccctcacatacttatcattttttggtgagaacactgaaaatatactcttttaggaattttcaaatatccaatacactttaactatagtcaacattttgtacaatagatctcttgaacttatttccttttaactgaatttttatatcctttaaccaacatctctctgatccctctccttccagcacacggtaaccaccattctactctctacttctacgaattcaacttttttagatgccatgtataaggaagtcatgcagtatttgtctttaagtgtctggtttatttcactcaacataatgtctcctgggtcatccatgttgtcacaaatgacaggattttcttcctcttaaaggctgaatagcattccattgtttatatacgcaactttttttttatcgactcatcagtagatggacaattaggttgagtccttatcttagctagtgtgaataatcctgcaatgaacatgggagtagagataactcttcgagacactgatttcatttccttggctatgtacctacaagtgggattgctggtttacatggaggttctatttttatttttatttaatcacatagaagactaatggcagttctatttttaattttttgaggaacctccataatgttttctgtaatggctgttctaaatttacattcctactacaagggttcccttttctccacatcttctccagcacttgttatccttcggctgtttgataatatgcattctaacgaggggatatctcactatggttttaattttcatctatttgctgtatagtgattttgagcacctttttatatacctgttggccatttgaatgtcttatttgagaatgtctattcaggttctttgcctaaatcaggctatttattttcttactattgagttcctcatatattttggaaattagccccttatccgatgtgtggtttttaaatatttcttccctttttgtaaattgtctctttactctgatgatgtaatttagtttgatgtaattccacttgtttattttcctttagttgcctgtgcttgtggtgtcaaatccaaaaatgtcatcacccagaccaatgtcatggagccttttccctatgttttcttctagtaattttacagttgtagtagatagatcttacatttaatgcattttgagttgattttcttctgtagtgtgaagggtctaatttcattcttctacatgtggctaaccagttgtctcaacaccctttattaaagagactgtcctttccctagtgtgtgttttggcacttctgttgaaaattaatagaccagaaatgcatggatttatttgtgggttctctattctattctattagtttatttgtctgtttttatgctggtaacatcctgttttaactaatatagctttgcagtatattttgaagtcaagtattttgatgcctccagctttgttctttttgctcaagattgctttggtcagggtcttttgtggttccatattaattttcaggattgtcttttttatttctgtgaaaaatgaccctgaaattttggtggagatttcagtgaacctgtagattatgttgggtagattgttaatataaacattttaacaatattaatttttcaatctatgaacacatatatctttccacttatttgtgtttttatgtctgaagtggaaaaagaagaaaaaaaatactgcatttatccctatcaaacttcagctcaggcaaactaacttagagaaataaaatataagctatagttcaattttttaaaagccttgggattttactcagcctcaatttcaatgtgaaccaaaagtctatgtaatcttaaattctgactaatacagagtttagcctatctgaagcactttactcagctctgagaaccagatttttaagagcaatactaacaaatcagtggtaagccagaagactaagtaagactgtggtggttccagaagattaaagaaactagcaataccttacctgggagaaagaaaagagggaacttgggaaaaggattataaaatagctatattttaatatttattggtattaggctcgcatttgaaaaaaaagtagcagaaaaaagaccaaagcacaatatgataggttggtttcatatacataagaattttcaaataatctaacctgtccaataacttgatggactgctttatttagttctcagagatcagaagtgttaaggcaaagactatatgtccccctgttagaaatactgttgagtagattgcttcagcaggaaagaggctagaaaacagtagtgcttctcaatctgtgatcctttgtgctagctgaagtggtactatgtatggagttttgaataggttgcaattgttgctgagcaggcaaaatgcctaacttctccaacctggcttcaacaaaatgttctacatatttatccagcttttgcagtggcttttattagagtggtagggttagggtggagagaagtattatgctttaaataaataaataaaagttcaaaaattactgaaggacctgaacaaagatctctttcaattctaatattgttattaattcctatttctcagctatatcctaggaaagtaagatcaacatcttattgagagattactgcaaataatattaatatatctgattttaaaagcctccttttcttcaataacggggcttttagagtaaagtaactgtctcagctcttcactttgcctgtatcagcacagcctatactgtgtctgggggagattttatctctctctggaaaagtttaatgttgaaaacaaatgtccttttacttcaaaaataaccagtagttgtagaaaagtagatcttagaaacacgcaaagttataaaattttaatttgtacttctgtaaaggaaaacactggaaaaattagttgctatgtaactaaatcataagtgaagagtgtactatcaaaataatcatgacttctccaaaagtaaaagcaatttgctatatattaaaataccaaaaaataggaaataatatatgaaagtcccagatgcttggatctttaaaatacctcatctcaaaagttacagattatttcatacttcctactatatatatatatatatatatatatcagtgaccacaagagtcaactgacagaaatttttaaattaacttacctagcttaaaaaattaacacaattcgtactgtatcagctttcttactatatcttagtcacacaagtagaattcttatccataaatcaactggggattctatttgcattatagtattattcagaaataacattaatggatttgattgtttagaaataattctgaaggggtgtgatctatattttgctgaagcacaactcagaagatggcagattagtgcgcaggaggcatccacttacatagtagtgagtctacccaaccacttggcatgggagtctcaacatagccttactgttcatttgctattgatagttttctattgatagtttttgtgagagaatcatatgctaaatgatataccagatcaagggaattaggttttaaggtaaaattctcatgaacatcaaggtacatcagagtctattctattccatatgctttttagttaggcattgtttataaatttatgcataaaatttaaaaatacgatcatcacacaatatagtatctaataatatctcaaaatactaccatatcctttgcttttataaaaattttattttcttataaaaggtaacattaatggcagaaaatttaggaaacacagaacagcaaaaaggacaaaaaaaacccttttaaaatgcaaaacaaccaaatttaacagaaaaaagcattagcaattttacaaaccccgttttaaattgcagagggataaatgaattcatattttttctcccatgtagtttcaattcaatcctttgctctgggcccacagtactgctcaactcatttaaacacttatattaaaacctggatgctttcagcatcaaaaagtacagaatagaattaatcttcacagtacgcctgagatgctcataagttatgttaccaaagcaagttactactactgatgtgaaactgtatcattaagattgtaaagataataaaaaacttaagtgaaaatatctgatgatcaagtttgctttaggaagaccagataatgggattaatgtgataaagttagtacttattgttactaagatttatactatataatacttcttgaattttagcaactatattttatagatctttttaatttaaagaatctaaaattcagagagtatagcttccaagttcccctttaaattgttgagaattatatttctaatgtaagtatactttttgatttaagaaaatcaaagacaagcatgtctcttacatacctcttttttaacctactacctgctaaaacatttacaaagatacctaagtttaagaaagtagatgctaaacaaataaacataatgcctggaatgcttctctgtaaattgattaaaacaccatctagtaacctttgggatgcgcttcctttcaatttaagcttttattttaattacttatggaaagtcacttttctccttgtatgtggcaattaacacaacattttcaatgcatcccagaaataggtgtaaatctgagaacagaggctctttcgtagtcacacaggccaaaagatttgacatttcacattatagaatgttggctatctaagtcacacagactgtatgatttctaaaatttcaagcttattataaagacagctggtgggaaaataaatagtacattagtgcttttaccttttagccggtggcttaaaatctgttccaaaatagctgcaaaattgttaaattcaggagaagaatcatcaattgtctcaaagcaagaccgatcaatcagggtcttcacagaaaacctatgaaaaaaagattattgttgcttttaggcagagttgattcattccctaagtatgaaaaaaatgggaggaaggcaatttggggaagagttgtaaaaatattttacaagagtataacatctgaaaaaccccatttattcaaatttactctgtaaatggaaatttttacagaaaggagtctttttattgatatatttcctatttcctctggtcagaatgtttgtgtactcccaaaattcatatgttgatacctaatctccaaagcaatagtattaagggtgggtgcctttgggaggtgattggataatgagggcagagctttcatgtacagaattagtactcttataaaagaggcctgagggagcttgtttgcctcttctgccatgtaaagacacacagaaggtgtcatctatgaggaatgggctctcaccagacacccaatctgatggtgccccgatctcagccttcccagcctgcagaactgtgagcaataaatttctgttgtttataaattacctggtttaagacaatttgttaaagcagcctgaaaggactaagaaagtatctactgaaaaaactaagactcagaaatagctaattgtccccattaaaatcaaaatgtgacctaactaaattaactccaaaatactcaaaaacagtaatactacttgtaagaaatttgagctgcagactcaaatgcttttgagagtttctgagcacaaaatagaataaaataggacgtgagcattaatgagaagaatacgtctgtattagtctgttttcacactgctaataaagacttacccgtgactgagtaatttataaaggaaagagatttaattgactcactgttctacatggctgggaaggcctcacaattatggcagaagatgaaggaagagtaaagggttgtcttacatggcagcacgcaagagagcatgtgtaggggaactctcctttataaaactatcaaatcttgtgagacttattcactactacaagaacagcatgggaaaggcccgctgccatgattcaattacctaccactgagtccctcccacaacacataggaattatgggagctacaattcaagatgagatttggatggggtcacagacaaaccatttcaacatccaaaatttttatgagcttataaatagcaaaacctgcaaatctgtaaagtgtactatatttttccttatcagaatgtcctttgtctctatttttgactgtcaaaaatcaatgtattttccaagtctcaactcaaatgtcatcttctcaatggagaattatccacctgcatattcctagcacaaacaaacattttatttgcatttatttcccttaagagaaaattacaatttatcttactgctaccatttgtgttttcaatcttcatcttattaggacacaattccttcaggcagaaccacgctttctgaactatgtatctccctcagcacctaggacaatgctttgaacgttgtacccagtaggtacctgttgatttatttgtaagctctattttgaaagaatggtaaataaatgtttaaacgtcctatcatggcaagacccaacatatagtttatgggttttaacatgtgtagattcatataaccactatcaaaatcaggatacaaaacagtcctgtcacctcaaacaactccctcatgctctttatagtaatatcctataaaggatggtatatgagtgcctaagacagtggggaatcaagaagataaggggagctgttaaagaattagaaataaaaactataaaggagataaaagagtacaagctttttttaaggttttactcttgatagttatgctattcaatccggacagaaaatacaggagacaggcataaagggaaatatagaaagatttgtttatataggttatatctagtattcaccatattagaaattgaactaaaagattttaaatataggcagtcctcacttagcacagcagtacaggaccataacagtaactctgcaagttgaaaccatgcaaaataatctttataattaagtaaaaattataattttcctgtgacctttataaatttttgtcaaaacattaaaaactttcttacaaccagttatatcgggaaataaaaaatactaaaacatttatttagtacactttaaaacattagaaacactgagaattcaagtgttttacttctctgtaagaaacttatgaagagtaatctgaacagtgcttgcctcattcttctcatttatacaacttaagatatagtgtaagcctctttttttttttgtcttttggcaaactgccatatttcttgaactagcttccaatatgttttcctttacactttcaatgctgtgaaatacctctgagaagccctttaatgtgaagtgttctgtcagtgtcacttcctctgggacattttcatcctttctgttgcaaccactttcctcatttttatatgaacatttgcctccactaagttcctttggctgcatatctagattctcttaaacaggagaaatgtgcacattcccatgatcaatgatttcttctgtaactccctttatattcatgcaaatctcactttgagcattatcattttccatttctttctttctttttttttttttttttgagacagagtctcgctctgtcacccaggctggagtgcaatggtgtgatcttggctcactgtaagctatgccaccccggttcacgccattctcctgcctcagcctcctgagtagctgggactacaggcgcccaccaccaagcccggctaattttttgtattttttagtagaggcggggtttcaccatgttagccaggatggtctcgatttcttgacctcatgatccacctgccttggcctcccaaagtgttgggattacaggcatgagccaccgtgcctggcctatcattttccatttcttttctgtactttcatctctgcaagttggccaatttactctttttgattatccattttcagatgcatagggacaaatcctagacagactttgaaagaagtgatattattggtgtctgatcatgatgtgtatttgttagttatgtaatggtttgtggactaaagagctagtggcaaaatgtgtattttatgcaactactcacaactgaattacaatggtaattcaaattgaaaccacgttattgtaggactgatgttacttaactaaattatgaaatactggaaccatgcaaagtaagaactgcctgcatttatttactaattataaacaaaataaattcattacatgttgcataaaaatatatttttatgaaacttatattttccaaaagaaaaatgtagcaatgtttacatgtttgcaaatatctttaatgtgtttaatagaagacaattagattatattactgcttttgcattcaagctattataatagcacacattatgtagcttctggaaaactccagcatacacttcttagaaaatgggaatttttaataaaaaagacaaagaaaatgacaataacaacaacaaaagagaatggaaattttaaaaggcaaataatgtcttagaatacttaagaaaataattttgactttgtggacctctgaaagcatctgggtccagaagtacactttcagaaatgccaccctatggcattcttgttgtgtaatgaaataactctcctatgaaacgagaatgatacaaattacataccattacatatatatgggataatggaaaatataatcactcaaataattttcagtcttctttggttcagatgaaccctgattgaggaatgctgagatagattaatgttcaactacatagtattatctacaacagcaactggagctcaatggaataaattatcatgcaataacgggaaataacatataggaagtaacactgataaagttagtttcttgtacctaacggatagtcaagttagacaaatgccagatgtaatgcatagtaaatggatagaaacaaaaagataaagagaaaacagatttaaaagggacttgaaaacttttatttcctacgtccatctcagtgacaatacacaagaataatgctgccaatccctggcaaacttttaataagaaataataagtacagtgtgtaggaaaaggaaatgagaaatgtttctaaaatgaataaataaaaagcacacaatctccacctccacctccacctttgacctgaatagaaggaaatttctgaatgtatttctctaatcttcattcagtagaatggaataagaaagctaactctgcatccacactgctcaaggaaggaataatctactgcttgtaaaaattatgccatttaagatagtaatgcatctccataaaatacaccaaaacttatatttgaaaacaaaattaacaaagtgcttaattcatcaaaaataaaaatctaggttagaactcaatttccacctttaacagtctgataagattttagtcactatgttctccaggaataacactagattacttaacaaactatttactttgtaaaatgtagtgggaagaaaaagccatggctattagtgcatatattttcatatcatcaagagacctatatggatcaatcagtagtcaacaaaatgcacaaatatttttctacattactcataggttacgttcctacagaagatactatctgtgtcataaaaacataaaatgtcaaatatcagagcactaaattactttaaactcaacagctaactaaaaactaaaacaaaagcgaagtccaaatatcccaaagcatatccttagacacaatttctatgattttcaagcataaagacatttaagggtgagaaagcattacaaaaatttctattatatcaaagtcagtaatgaagaaaaataatgttctccagctttgcttcatcattcatatcctgctctcctccctccaacacaacccaaaatttcagaaggcaaatcaatcccttagagtctatgcttcactttcagctaaccgattcttcccactcaatactcacttctctaaaatcatatagctagtcatgagtatatgccagagtaatgagaatctgtccttcataacacagtaactaagatgtgctataaaaatcaaacctgtagaaagaattttaatatatctaagaaatatcacacagatgctgagctatttcctgataatgatgacattaatattagtcatctgtttcctaaaaaggaatgatttttaaataatgaaatgacaatttgatgaatgtctaaaaatatcaaatcaagtctaagtaacagcttttacataaaaattaaaaatcaaaagtttatataaaagagacttataattaagattttgaaatgcagtttttgaaatgtctctatttaaaaagattctctttcccaccttcaaagtccaaggaaatttttgttagcttagaaatgagaaacaatgggccaggcgtggtggctcaaccctgtaatacctgcactttgggaggctgaggcaggtggacaacctgaggtcaggagttcaagacctgcctggccaacatgatgaaaccccatctctactaaaaatacaaaaaattagctggttgtggtggcacatgcctgtaatcccagctactcaagaggctgaggtaggagaatcgcttgaacccaggaggtcgaggttgcagtgatccgagatcgtgccactgcactccggcctgagcaacaagagcaaaactctgtctcaaaaaaaaaaaaaaaaaagaaagaaagcatgattgtgactaaaaccttaaaacttaagaaagcatggactacctttttccctttgtcatcatagcaagagaaatgagatggttaccaaaactgtttaaaacatattaattacatccatattacattaattccttccatagttcatagatttgtaacataattataattaaaaataacttaaaaattttaaatgtgaggacaaatcaaaaataattttctttaatgtctatagtttttattagaaattatttttatagtgaaaattcatctttaatatttaatgttctgcattaatatatatatatccatatatacacagagagaataagtagtaaaaaaaattatattcctatccctttacaacaagcatatattatttggccatttatccaatatgcttcaggaaaaaaaatgttcaaataaaatagatcttcttatctataccatgttatatccctttatatggaatgatatctgaagataactaatgtacatgaaaacatctagaatcatcacatttcaaaacttaaaagggctcacaaaggttaaagtcattaataagagtgatgtttttaatagaacgtaagtatccaaaatatgagacagagaactctccactatttcaaaccaaatttacaatattccttattatatgtcattgctgttagtagtctctaacacaggggtgaggtaattatcctctgccattaaaataacagtcagcatcaatgatcaacaaggagatggcttccaagagacatgacacaatccacaccaaacataatataagcagtgactataggtgataataagcacaatacccagagatatctgttcactggaaggcctattttctctcttatattttacatcagaaacacagagaatttttcagaatcaacaatttgcaggtctgggcacggtggctcacgcctgtaatcccaacactttgggaggccaaggcgggtggatcacctgaggtcaggagtttgagaccagcctggccaacatggtgaaactccatctctactaaaaatataaaaattatccaggtatggtggcacacacttgtagtcccagctactcaggaggctgaggcaggcgaatcacttgaacctgggaggaacaggttgcagtgagccgagatggtgccagtgcactccagcctgggtgaaagagcggaaacaaacaaaaaaagtaatttcccttctttcttcaaatattatgcaacttgcgaattcttggccgggcgtggtggctcacgcctgtaatcctagcactttgggaggctgaggcaggcagattgcctgagctcaggagttcgagactagcctgggcaatatggtgaaaccctgtctctactaaaatacaaaaaaaaaaaatcagctgagcatggcggcatgcacctgcagtcccagctactcaggaggctgaggcaggaaaattgcttgaacctgggaggcagaagttgcagtaagcccagatcatgccactgcactccagcctggcaacagagccagactccctgccccgcacccacacacccaaaaaagaattctcaaacatcatgtgtattttcctctttcttttctaatataattttaatctatttaaaatattttataatgagaaaaaatacctttcacatatcctttaagcaggggtctacagactgttgtccacaggcctaatacaactagttaaatgtttttgtaaataaacttttattggaaccaaaaaaagtcccaaccatcttccctgaaatttgtaccctgaaacatgaaactctcttcgtgatattttattatctcaaaaaattttacgcaatgtaaaaatcaacttaaaaataaaggaagaaagcagggccaggtgtggtggctcacacctgtaatcccaacactttgcaaagctgaagccacaggatggcttgaggtcaggagtttgagcaacaaagcaagagcccatctctataaggaaatgtaaaaattagtcaggcatggtggaaagaggctgttattttaagcaactcagaaggctgaggcaagaggacaacttgagcccaggaattcaaggttacagtgggctatggtcatgcgtctacactccagcctgtgtaacagagcaagaccctgtctctaaaaaggaaaattttaaaaattaaataaagagacagatgtgtatttaaaatattttctcaatctgtactgtcaaaatttattttaaaagagaattgttaatctagacacttaagaatggaaatactatattattaacatcttgtattgctatataagcagactgatgacagcagattgccaaacataaaaaataacgttagaagcacactcttaaaataaaaaagacagtttgctgagaatgatggtttccagcttcatgcacatgtaccctagaacttcaagtataataaaatatatatgttaaataaataaataaataaggcaaaactttccaaaaagattcatctaaaattagtaagccatcaaaccaagaaaacttcctatcttaaaatacattggtttaatctcatatgaaagaactcccaattaaaattattttaataaagaacactttatatacttggatcacatatcccttgggaatccaattattctttatccaagaacaaatgaaaatattcaaatagaatactttaacatagtgagcttcctagtaagctagacattaaaagcagcaatagaacaacgtgaagaacagaaaaaaaccataacatatagtcttcatggtttatcaacactagaatgctacgaaaatgaaaggtcccagtttctgtctatgcaaacacacacatcagctgacttgtatcacagacaatcaagacagcacagttttaaaaatatatatatatgttttgaaaccagatatatttgggtttgaattctggcaatgttagccttaactataaaataaatctaatttaaataaaaattattataattaaaatttccattattagtgatgaaggctgaatctaatatttttcctgcaaaaagcatatcgtccacgtataaattaaatatattttcttatcatgttaagatacagatgttttgtgattgatttatgaaaattttaaattgttattaatattaattttgagattagacctgaaatataacagaagatttggttctgtaaatactaagatttaaaaatcacaaaatctaatgttaaatatgaatctttggaggatattgttttcctaacctcttctaaagacaatcaccatcactggagataacagacaataaatcattttacttagctaaaacaacaaaatgtgggcatcatatccactttctttctttcataaaatattttcaaaacaatatgtattttggaggatttgtttttgaatatgcaatctagtgtcagagtaaaagaggaaggcagggaagaagagctctttcatttagtgcacattcacagctgtcggccagcttttggtaaacagtagttactgtgattgtttactgtcgcccccaaatcagtgcattttgttgttttggcttgctggaggaagggtgctagaaaatataccaaatccaagttgaaaaccctgaaaggccaggagcaaactgtaggttgttcaagactaaccatggttaaaacctagtctggattcagcacagtccctgattggatgaaagcaatcagctgctactcaatcttatggaggaagatgaacactagtaaagcaaagtggtcattaacctacactattggccatgggtactagtaaactgttggcgatatctttctaaaattaagtggtgcattccatctgtttactccactgtggtctatttctactgtatactatgttcttatgaatactttgacacaaaatggttgacaaaagggtaaacatgatagtactaaaagaacaacaaaagtattaaagaaataacttaataaacattgtgtggcattcaataacattctagatgtgacaaaagatagaacatacatgacaaagaaaggagtaagagagaaaaagcagaccataaaagtagatataaagataattcaaaattctaaattaataagaactttaagataaatgtgagtaatacattcaagagatgagaagaaatgaagtacataggtaaaaagacaggtttttaaaatcagagggttagagtctattttaaaaaatcaaataaaaattctggaactacctgaaattaaaaactcattcaatggattaaacagtagaatagacaaagcataagacataattaatgaactagaaaaggagtcaatagaaaacatacaagctgaagcataaagagaaagaagaatagaaaccatgggaaagaatatgaatcaagtgaggcctggtaaagtttaacataatgtaattggagtgtaaaaagataatggagacacacgtggtggctcatgcctgtcattccaacacttttggaggcccaggcaggaggaatgcctgaggccagcagtttgagaccaccctgggcaacatagccagatcctatatctacaaattaaaaaaaaaattagctgggtgtggtggtgcatgtctgcagtcctagctactcaggaggctgaggatcactggaacccaggagttcagggttgcagtgagctatgatcgcactactgcactccagcctgggcaacacagcaagacccaacctctaaaaaataaaaataaaaagtaaaaagaagataataaccaaaatttttccaaaactgaggaaggtaaaatggaaagggtaaatatgtggataaatataaatgtgtatttcctaaatacctactgtaaaaaaatatggtaataaaataatgtaagatttaatatatatatatatatacacatatatatataagtatgttttaggatgtgggggaataaatggttctaacactattggagaagtagtaaaagttacaatttgcattaagctgtaataaaccaaaggtaactgccaaaagaatagaaatatatataaacatatataaagaaatggaatatatgactcacaagttcacaaagtaaaaaactggaatcatggaataaatggaactataaaaatattaatatttaagaaggcaagaaaagagaaaaaagcaaacatacaatgaacagtaagatagctataaatccaaatataatagtaataacgttaattaaaatgggctaaataattaaaagactaagattatcagactacataaaatgcaaaattcaatcctatcttacctacaaggacactctaaatataagagcccagaaagagcaaaagtaaaagtaaaagatggaaaaagagacatcatattaacattagctaaaagaaagctattataactgtattagtagcagataaaacagactttaaggcactagcattattagagataatgagggacatttcatgatgacaatgaatcaaactactaggaagagaccacaattctaaatctccataaaactagtaacaaaacaaaatatttatagtaaaaatcacaaaactaaaaggagaaacagacaaatctacagtcatagaggtagactttaacacatctctctcaatactaaagagtatacaaaaaacaagtaagaatacagaggacatgaacaaggcaattaaaacactagacttaactgacatatataaatcatgcaatcaacaatgacagaatacacattatttccaaatgcatattaaatatatgttgaaattaaccatatactgcatcataaagcatcaacaaatttcaaaagctcaaaatctttcagaatatgttctctgcacaacagaattcattcgaaatcaacaaataaaaggttactaaaaaaccttcaactgtttgaaagttagacaatagatttttttttttttttttttttttgagacggagtctcactctgtcgcccaggctggagtgcagtggtgtgccgtctcttctcactgcaagctccgcctccggggtttacaccattctcctgcctcagcctccggagtagctgggactacaggcgcctgccatcacgcctggctaattttttgtatttttagtagagacggggtttcaccgtgttagccaggatagtctcgatctcctgacctcgtgatccacccgccttggcctcccaaagtgctgggattacaggtgtgagccaccatgcccagccgacaatagatttctaaataaactgaggagtcgacagagaaaattaacaaagtcataacacgagtcgacagagaaactcaacaaagtcaaacgctggttctttgaaaaagttggtaaaattaataaatgcctagcaaaataaatggggaaaatggagattataatatcaggaaagaaaaatgggaaatcactacagatctttcaaacaataaaaagacattaagaggatattaagaaaagtctcagcaaaaaaaaaaaaattgacaatataaatgaaataggtatgttccttgaaaaacctactgaaactcataccagaagacacaggaaatctgaattgttcagtatttattaaatgaattgattccgttactaaatgatttcccacaaagacaatttgcggttcacattgcttccctggtgaattcttccaaatgtttaagaaagaaatatcagtcttacacaaacttttctacagaacaggggaggaaacacacacacacacacacacacacacacacacacaaacacatacttcctaacttgttttataaagccaaataatcttaatgacaaaaccagacaagaacattataagaaaggacaatcacataccaatctctaccatgaataaatatgcaaaaatcccaaaatattaacaccctaaatgcaaaaatatgtcaaaaagacaatacatcacaactgattgtttttttattccagagtggtttaacatgcaaaagtcaacataattcactatgaaaacaacaaaagagagaaaaatcacgtttacttgaaagacaaaaaaaatttaataatacaataataagcatccatttatgatacaaattctcagcaatttagaaatagaagggaagtaagaaaaacctactgcaaacatcctatttaataataaaattttgaacgttttctgcaacactgcattagtggtcctagccagtgcaataagacaaaaaagaaaagccataaagattgaaaaaggaagaaataaaataagcaaatgacatgactgtgcactcagaaaaaaaaattttaactgcaaaaaatctgttagaattaataaagaaatctggtaagactgttagatataagaccagtattttaaaaggtcaaatttatatcgatataccaacaaccacaagaaaatgaaaagttttcaatgatttcagttaccataatataaaaatatatcaaatatgcaagaataaatataataagagatttaaaatatctatatatgcaaaactacattattgagaaaaattctagaatatttaaacatataaagaaataggttatgttcatgggttgcacgtaagtcttaatatcataaagatggcagttttcccaaaactgatttatagtaccagtgcaagcttaataaaaatcccagaaaaatattttaacagaaattgacaagttgattctaaaatttagtttgtaaaaggccaagaatagccaagataatcttgaaaaataaagctagataacttatattaccacacatcaagacataatataaagttataggtattaatttagtacgatattagctcaggagagacaaatagactattggaaaaaagaaagtctagaaacagaccacaaattatccagtcacctaagataaatgtgatgcatgagtgtagtggagaaagtatggttgatatagtttggctgtgtccccacccaaatctcatcttgaattgtagttcccataatccccacatatcatgggagggagcagatgggaggtaattgaatcatggggatgttttcccccatgctagtctcatgatagtgagtaagagctcacgagagctgatggttttataaggggcttccccctttgcttggttctcatgttctcatttttctctctcctgctactttgtgaagaaggacatgtttacttccccttccaccatgcttgtaagtttcctgaggcctccccagccctgcagaccaatgaatcaattaaacctctttccttcataaattacccagtctcaggtatgtcctcatagcagcatgagaacagactaatacaatggtctttccaataaatggtactaggtcagttgattttccttaagggaaatatttaatcttgactcctgtacttcacatcataaataaactacagatggattgttgatataaatgtaaaaataaaacaataaagctttagaagaaaaaagaatattttcattactttggagtaggctggcttcttaaagacattacagtaagcattaaccatgaaggaaatttatgggccattttacaatcagaaatttctattcatcaaaacatactacagagtgaaaaataaagccaccaaatggaagacatttgcattacatgtatccaacaaaagattcccatacagaatgtacaaagaactgcacatctaaaaaataaacaaaaagcagagattccagttgctaagtgacttgaattgccattttatgaaagaaaatctccaaatggcctacagacttacggaaaggtgcttgacttcattagacatcaagaaaatgcaaactaaaaccaccatgtgacaccccaacaaacatacaagattggctaaaatgaaagaaaatgtcaagcattagttaggatacagaacaactggaactcctacacacaatgctcactagtatgagtgttggtacaactccttttgaaaactttcacatctactgaagccgaatatctgcatgccatatgactcatcaattccactccaagctaatatcagacagaaaaatgtacatatcatcacaaaaataaatatgaatgaatatttagttagtagtagtcaaaaagtagaaacaactcagatgacagtcagtgacagaatggaaatattgtggtatattcatccaatggaataagatacagcaatgaaaatgaacaaactacagcaacatgcaacaaaatggatgaacctcacaaacataatgttgaacaaaataagctaaacacaaaaaggtctatactgtattattccattcatttaaaatatttaaaaaggcaaaacaaaccatggtgttaaaaaccagggtattaactacaagaaagcaaggaggaggtcttgatatttgaacagttctttctcttgacttgggtgctagttacaacattgtgccctaccacaaaaatgaattgagctgcatagttatgctacgtatacttttctatatggaaagtataagtcaataaaaatttatattaaaagaatagtggcatagtagagctagaaataaggctaaaagcattatcacaatgtcctacatatctcgtagtggttgactacagacttgacactaagatttctaacagctgcatgagaaaaagataaagttgtcagttatacattagtgtccagtagatacaaataaatcaattgcttgaaaatacaaattgttggcactaaacacagagatttctcacagaagtcttcacaaaaaagaagccccttttgacataataatgtccttgacaataacttcaagaccctctgtgactgcttcttatgatgaccttcagtgcagactgatggaatctttccaatatacaactgggtaaaagcagttggggatagaagagtgtggagcaatgcagtctacatacccaattctctctgatgctttggactgacccagggatatattttataaacctgtaagagggaatagaagagtgggtaagcttcaaacattcccccttgaatatcatctctcaactgaaattttgacaattatcaagcagcaacagcaaagttaaaataaataccccctagtaaaggactgggggatagctagtctctgttgtcaattaatatgaatgcagtttggttgggggaagagaaaatgaccttttgtgaatgctgaaatgtctactctaggactagtcgttgaaaagaggatcatcctacctccattgtgcgcatctactaattagagcatgaagaatccttagaaatatttaataatactgaacctgcttccaaggtatataactaatgttgaatccaaactcaaactcaaagttctactacatataaaatgactgaaagagttttagccaaaaatattataatcactatagccaaggtatgaacagtcttatgaggcatactcaagcatattcaaccaaatagtaacaaaaaaagtaaatcactggatttaaagttcttttttttttcttttttttttgagacaagagtctcactctttctcccaggctggggtgaagtagtgaatctcggctcactgcaacctccgccccagggttcaagtgattctcctgtctcagcctcccgctggaattacaggtgcccccccccccaccccccaccaccacgcctgactgtttgtatttttagtagagacggggtttcaccatgttggccaggctggtctcgaactcttgacctcaggtgatccatctgcctcagcctcccaaagtcctaggattacaggcatgagccaccacacccagccaacaaatttaaagttctttaaaggattatgctgcaatctgtatatggttggtctgcccccatcaaatgacatgttgaaatttgatctccaatgtgatggtgttgggaggtggggcctagcaggaagtatttggctaatcatgggggtggatacttcatgaatggcttggtacttatcacccactagtgagccagttctcactctagcaaggctggattggtctcaaggaagaatggatcagttcctagaagagtaggttgataaaaaaccagaatgccctttgggtttggtctctcttcacacctgcctgcttcccctttgactctctccaccatgttttgatgaagcacaaaagccctcaccagaagctcagcagatgccggggccacggtttttgtacaacctacagaactgttagctaaataaacctcttttctttataaactaccccacctcaggtattcctttatagcaacacaaaacaggataagacagattatactgtcattaatattcaataacatttcacatatctgcatttctcccaccaagttcaagcatagactagacagtttttctgattagttagcaccagaatgttaagaagttcagagttctaaagctcactaaacttaactcaggcctctgggtgctttttaaaaaaaaaaaaattaaacacctgataagtttagttatatactttcccaggtcacaaccaattataatctgcaagtcagaatgggaagtacaaagaaaagaactgctagaaataaaaagagttgtaagaaataacaaataacttggtaggaagaaacagaaggatgcaaaagctcaaagaactccaaacacataatcttctggggccacttaggcaaaagctctacatgctgcaagagtctccaagggcaaccactgcacagtgggcatattcatagaggcagattcagagtaaagtcatcaataaggattacattattctatgtatagtctttgtcaagaaggtagggaaacgtgtaatcattttttaaagcaatccatccaaaatattgtaaatattatgtgttgtggattaaacttgtgcgcttaaataaatttcagttatacaaatcctgcgctccaaaataaatgctgagtaaagcactacagttgatgaaggattttaagcttaactcaaatattagttatgtataaaaatataagcttctcattccttgactataatggaaaaactgaggtgctaatgtaatttgaaataatattcaagttctgaaataatatcatgacctatagaaaactaagactattcatatgttattaaaaacacttgaattgtgaaatcatcacttgtctccaccgtgcttatcacactactccttatattcctcttattagtccctcctagctacaaaacaggaaaattatgactttgcatgggaagtttctcttaaaagtattgacttaaaagtttgacaagtgttattctgaaatgtttatatgtgcatattttaataatttgctcataagacattgttaagccatagaaagagaatttagattttaatactctgccaccaaaaccaaaatcaaaggactatataaggttttctgtaaacaatgaagcttataaaggacagaaaaaatgactaatatctgattatctatggataaaaatgcaagttaaaaaaatctgaagggcgttaacaacttaattttctgaagttctaaacgatagagaatatacagggaaaatactagttggttctcagagccaaagtcaagtgtatgaatattttgaagttgagtgtgtaagatttagagtcctcaaatgacctactatctcttcaccaaaatctgtgaaaaatatgaaaaaacagtacttatctgatgaaataaggactatgcaaatgtttttagtctacaacatgtaaatgttcactaaaaaaaactaatgaattacatacacatatacaatcacacatgagccaaaattcaattcagctctttatctgattatcttacctatctaaacaacccactttcaaagctcaaaactatatattgcacttgaataaagctttaaacataaagaattgtgtactcacataagaagactttaaacctaaactgagaatacacctaaattgtttaaggggtaaggaaaaacattactgtgaaagtataagtggatacactagaatgatatatgctggtgactttttttttttttggttttgtaaatggttcaattttttccagaacatcagcagagaattacaaaatcaaaggcacagtccaaaatatttttgtttatagagaaaaatgcacatacgtaatttagctattataaacatttatcttatcattattaccctgctcatatttggaaaaattcaaaactaaatataaacattttttgcttggaggctattattaattttaagcctataattgaaggttaacaatgatctagtccaatattattttacagacaacaaaaatgaacaaatggaaaggttgcatggcttgtaaaagtgcacactagttaatgataaagtcaacctagaacccagttatatttccaccagatcaacttctttccaacttaaatatcaaatcatctctgatttgagatataaaaataaagaggccgggcgcaaggtggctcacgcctgtaatcccagcactttgggaggccgaggcgggcggatcacgaggtcagcagatcgagaccatcctggctaatacggtgaaaccccgtctctactaaacaaaacacaaaaaattagccgggcgtggtggcgggcgcctgtagtcccagctactcaggaggctgaggcaggagaatggcgtgaacccgggaggcggagcttgcagtgagccgagatcgcgccactgctctccagcctgggagacagagcgagactccgtctcaaaaataaataaataaaaaattaaaaaaagaattcataagagacatgagtgaaatacccagggtttggtgactctggaaagtaaactagcaataaatgcataaatactgctttattcatttttcttaatttgtcatggggatacttaaaatgtacaaatggcctatagtgactttcttccaaaaagtaaaagtcattcagacaaagcctatcatatagaccccattactacacatggataatttacatgcaccatcaactatttggatctgaaaaacagccttaatattatccatataaataacaatacaaatgaaatccagagcagaaaccacaacttattttagctattacactaaatctatgtgtaaactgtaactaaagttagcacatattcatttcacagtagaaaataataattatgtaaattacaatcatgaaaatacaactaatacagagagctgtccccagaaatcagtgtgacgttcctaaaatttcttaaagataatttaaaatttagtttaaataaggttgaaatacaaatccttttcttttcaactgtctctgataagggcacacatgatcattacatgacctaaagccagccaagacaaaaatggagaagcaaaaggaacagtacccatcactgaaattattcattcaataaatattttttgagtgttagatgctatactgagaatttgaaagaaaaaaaaaaaaagactaagcaaaaagcagatagaatcactgcccttgtgaagtttaacaaaagctgatagagcttttattaaatatgttaccccccaagaagcactgtatatgttgaaactacccttatttttaaagcaatttttgatgtctgtatattatggttaagaaaatcagccttgcttatggttccatttacctactttaaagatatttacctatattttaaaacacctaacagcctatttgtctcaaaaagttacatcctagacagcacaaacggcaaattaaacggataccatattactttaccatttacaactcaaagtgctgtaataattacattatacaaatacagtcaatgaagaaggtcttcttgctagataaacatttgtaataattcaagtattttttaaaaagtcactgtgagttattgcatttaagtcctggaataattatctgtattccacttaagatgctagacacatttttacacaagaaaaataacggaaaaatacagagaaattgcaaaggaagaaaaagtttcatcatcatctgattcttaagaggaatatcactaggtgatgattaggagtctgatggaggaaagtaattttaaaacaacttaatggctcagagaagttcctaagaaattgatgcttagggtttcaatttttcttaatactcagatataagacttaaagaaaatatatcagcatgttaaaaaccagttatctctgaatactaggcttactataaatagttctttttttttttttttgacgaagtctccccctgtggtcccggctggagtgcaatgacgttatctcagctcattgcaaccgcctcccaggttcaatcgattctcctgcctcaccctcccgagtagctgggattacaggagcccgccaccacgcccggctaattttttgtatttttagtagagacgaggtttcactatgttggccaggctggtctcgaactccgacctcgtgatccgcccgcctcagcctcccaaagtgctaggattacaggtgtaagccaccgcgcccggcccaatagtaattattcttttattgtttctatatttttctgaaggaaatactacatttacagttataaagcattaaggaaaggcaggccttaaaataaatcattgacataaagactaggtatcctccacagtcccactcttaataacaactgcagaaccagcactagcactgtagctgaaaagtggatagtacacacacgctcacatacacaatggctggcatgtagtaggcactcaactaacgtgtgaaatgaaatggctgaagataatgtaaacaagccaaaacaacgaaatgcactctgatttgggggcaacacagtaaacaatcacagtaactaccactttatccaaagctcgctgacagctgaatgggcattaaatgaaagagctcttcttccttgccctcctctttcactctgacgctagattgcacattcaaaacaaatcctcctccagccccgccccaagctctaccctccagtaccttcagcactggaactgacacaaagtccagggctgcgacggtgtccagacccgggcccctgtccaaggagctgcgcgctcacagatttggctggcgcaacataggcgggggcactgggcggcagcccatcatgcccgggacccccaaggacccgcgcggaagcccagagctctcagccccggcgggaggctggttcccctcgccctgcgctgccgtacctgcacacggtgatcaggttcctcctctccaccgcagcattgcgggcgctcaggcttttcttgccgcctccgccgccaccgccgcggatcccgctcaggccccccaggctccgggaggccatggcgggcttacccccgtgccccttttgtctcgtgccaccccgcacgccccccacacctgcttaagggggttctcgctcggtccgcaaccgtgggggcgcgggaaggatgtaggaaaggagcctggagggaggaagggtgtggaagacagcagggactcgcacccggggactgacggctcgcccttggcacccgagctccacacacacacacacacacacacacacacacacacacacacgcacgcacgcaccacctccgccctcggcgcgccgccgactgccgggctgcgcctgcgggtcggcgtcaggcgctctcctccttcccgagggacctcagcagacggcgcgcgcgcgagcccgtcggcccctcacgcccaaccacccacactccgcagccactcgtgccccagcccgggaggcagcggcaaggcccccggcctcgcgtgcgcagccccaccctctctgcgcctatcaaatcaacgctacccccgccggatccaatcgcggcaccagaggggcggggccggccgcgcggaccttttaaagcagcgggctcaagccccgccccgacgcgtgggctgctgtcaaggacgctgggctcgctttcgcagcccgctagctgccgccagtagccacacaggctagccgcggggattgtgggatgcggggccccacagcgccaggggcctattgccccccccttgcctgtagccaagctttaacggctgatacctatttgcgtggctgccgtagcttcagtgcctgcctagaaagcagcgcgccggctcccacacccgaccttgggcctaagtactaagaagggaggagggttccttttgtcctgacgccctcccaggggctaataaacagcaacacaatggcccgaggggggaattgctcgtagaatctccttcttggcgcgtctagtgccgacatttcttgcccctccacaccatgtcgctcccacctcagcctccagcgcagcccgcacccgggactgacggcccgcctaaggaggagcgtggtgccagtgtagagtcttttcgcgtcctgggccgtgactccggaatcgggagtccgggtctgggaatagtaagcccaggaacgacgcggcctcggtccagctgggctgctccctcagagtcctggaacgccctcctcgacgcgcgtgttcggaagcgcccccttcctagagcttctcactacccaccgttttacctgcaggagggtcccagcttgggtcaggtcctctgacactcacctacgcctgctgttcacctccctttgcaccaatatgcccagattttagagtgcaatcctaaatgacttactctccctatgggacctagcacagtgctgtacatagaacaggttctcaataaatgtttctcgaatttaatttgaagtcacatttgacataatttttactgaaatttcacggcttcagtggctccaaaatccatgtatctttcacctctacttttgaagtttctgtcaaagaatgtcagagaatatatagttttgtgtggctatctctatttttcttatatattatccctgttaatgcagggcatactgttactcttgaatgttttaacaacgcacgtttgtgtaataaagttgtaaattcctaatttctgaggtttttaaagtttaaaaatctctatttaaaatagtcaaaaaatcatccttttcagctaccatgtctaattttattctactattctgtttagtagaataaaaatatatgggctgggcgcggtggctgacgcctgtaatcccagcactttgggaggctgaggcgggcggatcacgaggtcaggagttcgagaccagcctgaccaacatagtgaaaccccatctctactaaaaatacaaaaattagccgggtgtggtggcacgcgcctgtagtggcagctactcggtaggctgaggcaggagaatcgtttgaacccgggaggcggaggttgcagtgagcggagactgcgccagtgcactccagcctgggcgacagagtgagactccatctctctctctctctctctctctgacatatatatgacatatatatgacatatatatgacacatatatatgacacatatatatgacacatatatatgacacatatatatgacacatatatatgacacatatatatgacacatatatatgacacatatatatgacacatatatatgacacatatatatgacacatatatatgacacatatatatgacacatatatatgacacatatatatgacacatatatatgacacatatatgacacatatatatgacacatatatatgacacatatatgacacatatatatgacacatatatatgacacatatatgacacatatatatgacacatatatgacacatacatatgacacatatatatgacacatacatatgacacatatatatgacacatacatatgacacatatatatgacacatatatatgacacatatacgacacatatatatgacacatatacgacacatatatatgacacatatatgacacatatatatgacacatatatgacacatatatatgacatatatatgacacatatatatgacatatatatgacacatatatatgacatatatatgacacatatatatgacaatatatatgacacatatatatgacaatatatatgacacatatatatgacaatatatatgacacatatatatgacaatatatatatatatatatatatgtctcagcctgggcgacagaatgagactccatctctctctctctctctctctctatatatatatatatgtacatatacatatatatgtacatatatatatatatattcctctctctctagccatacgtatatagtgtcagtcttaactaatgtgctatgataaatattcattcatacattaaaattttaagaaaacaatttagtcagactttacactttatctttcaagttaataaaagcaggcgaaatttctatatatggatgtttgtgactagtcagtgcacttcttccagaacattacgtgtctgctctcctgtgacacggaggcttataaagagtcttcttttcctaggagctacaacttaacttgtctcttcttgctagttcaacagtttggattcagaagtagccatcaggaaacagatgcactggttatgcaggcagtctcagcaaaatatttgcgctggcaatgacaaatactactcaaattgatgttgttattatttaaccacagataaaactgcagaaagaaaagagtggaaaaccatcagttatcaataaaatttctaaaaaccgatgcttgggtgtgtcgtgagtgagggagagaacacacatgcctctgaagcatttatcaagaagataaaagtgagtggtcatgacagaacgagaaaagtgagatgttaatatcctcaaaattggcttcctagcctccagtacatgttcatgttattttcactgtgaactatgactgaaaacttagtaaaactccatcttaaatgatgaggtaatcgtgttatttttcttttttcttttttttttttgagacgcagtctcgctcagtcgcacaggctggagtgcagtggcaggatctccgcttactgcaagttccgccacccgggttcatgccgttctcctgcctcagcctcccgagtcgctgggactacaggcgcctgccaccacgcccggctaatttttttgtatttttagtagagacggggtttcaccgtgttagccaggatggtctcgatctcctgacctcgtgatccgcccttctcggcctcccagagtgctgggattacaggcgtgagccgccgcgcccagccataacgttatttttcaaatgttactcttagaaggatttagttgacatgttagtacttgcttaccaagactttgccataaacaagctgtgtttttcttttttgttttgttttgttttgcatgtatggagtgtcattacactgccacatgggggccttatttgataaggcttttctcatttatcctaagtagtatgtcctgggtctctttctccctctagattactaatctggatattgtcaatcaatttattcagtacacagcataatactattatagaactccatgagtccacgttactttttggacttcttttggcacctatttcaattatttttatttatttaagcattgcacaaaggtattcaaagattttacaaagagtcacagtaaaaattatgaaaacagtagatacctaaattaacttataggaattctgtagaaccgaatgggcagaacatacccattcaccgttttcccaacttccttcttctcatcgaaacagacaaaattacaagtgcaacatataaaatgtcctcaaatataaaatactataaaatgtatatataaagtgctataaaccagagagatcaccaaaccatagtttattctagtctcagagaagtggactttttaaatatgccataaacccagcatctgtacagaagaaactagaaacattgaagatgtaagtttttttaatttttatttactttgacgtcagatgggtaatatgctgacatcataacaaggattgggtgaggcacgtctcacatgtgtgtgaaagctcaatcatcacgcttatgaaccacaaatggatagatataaattttttcaaatccacaaatcaagtatcatcataagcaaagtcaaaagtaaatgagaccgagaaaacatttttaaaactcaaatcatagacaaagagctaatttcctctataaaatactcctgcagatcaataagcactgtttcagtggcacaatgaatgtgaaagccaaattccagtgagtaaaaagtcagtgggaagtgagtatcacacaatcttaaaaagttatgaaaggggagaaaaaaagagtggtggtatgggggaatattgaacagagggacattggtgttttattgctatcatgtcattatttttcacagaagtgacttgagcatattttgaagctgatgcaatgaatctactgggagggaaaggttagtaatgcaagagagaaaaaaaaactatcagaagcgagcatgaagaaaatgtatgaaaattgctttaaaaaaaaaaagtccatgtgagagtaagtcaagagaagcagaacactcaggggaggtatgggtttccgttgagaagaggaagcagaaagaccattccaaagaattggagaatgcaaggtagtattggtcatagagcaaaagttccagagagcatcatggaagggagtgcagacagggtcatgggccaggaagcgcgaagcgtgctcattaatagggtatggatagtgaggtgggtattacaggctatgacagacacataatgaagagtaccttgatgggtctcacaaactgttctctgtaaaaagtcattgggtaaaggctgattgaaacaaagtggatttggtcctacagtttctttgaggagggcaaatactgaccctcagttcgaacagaggatatttttctttttaaaattttttatcatgtagaagggcattaacaaaccagaaattatagactccagacattgtatgcattgcatcaattaatcatcagaaccgttctctaaagtaagtattattatattctcccatttacaaacaaggaaacagagacttggagacattaagtaacatatagaaagtcacatagtaaatggcagagccaggattgaaatctaaatcattagctagaaaatctattatttttttaaatttattattttaaagacagggtcttactctgtggcccaagatggagtacagtgggtaatcatggcttacctcggccttgaactcctgggctcaagggatactcaaagggcttagcctcctaagtagctgggactacaggcatgcaccaccacagctgcctagtgttttttatttttaaaaatgttttactgagacaaggtctcactatgttgcccagattgctcatgaactcccggtctcatgcgatcctcccttcttggcccctcaagtgtggggattacaggcatgcaccaccatgactggcccataatttattgttttttctaacatgtttcactgcctttttgagaaagtaactccagataaggcttaaacacaaaactcccatactgtacacatagttcttaagaatcaagaaggattttacacactgaccaactgtatcactcatgcaatatagtctctagataattctggagctcaggctttcattttttattcagaaagtgtattctgaatcaaaagatatgcataattttaaccacaaattaaattttttcctagagatgttttaccaatttacatcctactaacagtacataagttttcttgcactcttgctcactctagggactattgttctttttatttttctgcataacaagcaaagagcaatatctttttgatattttaacttgtttttcattagtaatgaaaatgcacatttattttgtgcacttattgttcatttatgttttgcccgttcatgccctttacccatattttccaaaaaatattagtcttcattatagtggctcatgatcatatttgtttattgtatgtatggcaaatacttttcccagttcgttgtttgccttacctatggtgtgagttatttataaagagatgtttaaaaaattttatataaatgaaattcatcaatattttcctttattggtttttcctttgatcattttagaatagcctttgccacctccaagattatatactttatggttacttttttatatcaaaaatagttaacctatttgcactatgtgaaggtatgaaattagaatataacttcattgttccaatgattaaccactgtcccaattctatttattaaatgatccatctttgccttactgccaatattaaatttatcatgaaataattaaataacaaggttgcattttaataaagaattgtgcccatgataataaatccatagaaacagctaacattaatgtttcacaacaactttttttggataggtctccagacatacaaaagagaaatatatacttaattttacctaaatcagtttattctacacacagtcaatatattttctcaccaatctgttactatgtgtttgtatttgtttatgatttgtttcccatagaaattttgaatttttatgcaatcaaattttcgtttttttaataatttctggttttcacacaatgtttagaaaagcttctgtatggtaagataataaaagtgtttaccaatttttctgtagtgtttttgcattcacatatttgatatttatagagttatctttgtgtaagagtcaattggtgaaagagcctaatttttccaaacagtcaatacttatctaatgctagtattaaataatgcatactttcccactgatataaaatgctacctttgtcaggtactaaatgtatacaattttagtctactgctggattttctattttcatccattgatttatcatttatgagctagtggtaccaaaatctaataagtggcaaagcctggtaattatttttaacatctcgtaaggttagtgttccctaattattctctttcagaatgttcttaggtaattctggaatgtctgttcttccatagaaacgtaagaatcattttgacacatctctctcaccaagaaaagcctatagggattctaattagaattgcatgatatttatagattaggtaaaattaacatcttcccaatatttgcaatgatctaagatgacagtatgtctatttcttcacattttttttttatttcacttggtggcgtttcatagttttatcatggagtttcggactggtattatgagtaaggttttttgtatgagtagggttctttttttccactacacttcctaaatagttgcaatatttacacaggaaagctatacatttttgcacaatcaccttttaacatgtatttattgtttttaataaattttcagattctgttggtttgatttttatgcagtcaaatttttgtatttttacttttataatttttggttttcacatgaatcttagaaaagattttctgtgcttagattataaaagtgtttacccattttttgttatgattctgttggttttctaggcactagctcagaaaaataaagattaatggtgaagttagtggaacaacacgtaaatctctttaacattaagaatttgctttcaaaactaaaatactggaataccaattccacgaagtaattttctgtaaattatctcatgcaacggattcaaatgcaaactctttagaaaaaaaaaccctattgaagatattttggcaaagactaaacatcaattagaaacgagttactcgcctgtaatcccagcactttgtgaggccgaggtgggtggatcatgaggtcaggagttcgagacgagcctgaccaccatggtgaaacactgtctctactaaaaatacaaaaattagctgggtgtggtggcacgcgcctgtagtcccagctactcaggagggtgagcagaagaattacttgaacccgcaaggtggaggttgcagtgagtcaagatcgtgccattgcagtccagcctgggcaacagagcgagactctgtctaaaaaaaagaaagaaagaaaaaaaaagaaaagaaaaaaatgagttactcacaaacgtctaaacaggattttcagctatgatgtcaagaaaaatcttgttttgatttttcctatggatagactaaatgagactttttctcataaaataatttttaagaaaatgttccctcaataatccacaagcaatctctcagtaatccacaagtaatctttaagaggattaaaagacattttagtaccaatttactatatccacggctgaattctgcttatgcaagcttaaaatataacaaaatgacaatgatattaatgatcgccccttgaactttcaggatcaaaatatgtcaaaatgacaatggcattaatgattcctcttgaaatctcaaggtcagtttattcatatatatatatatatacacacacacacacacacatgtgtttgtgtgtgtgtatatataaaaataagtttacagtcagtacgatttctgcttagtgttcaaaaattggacagcagcaatcttcaactcataaatttggccaagtatatttacctgtgtcaaccaataaaccttagtaagaaaaagaagaatgttgtggttatcattcagatatttgtcaagtttactttttttttttttttttgagatggagttttgctctatcacccaggctggagtacagtggcacagtcttggctcactgcaacctctgcctcctgggttcaagtgattctcctgcctcagcctcctgagtatctgggaatacaagcatgtgccaccatacccagctaatttttgtattttttgtagagacggggtttcggcatgttggccaggctggtctcaaactcatgacctcaagtgatctgcccacttggcctcccaaagtgctgagattatgggtgtgagccactgtgcccagccaagcttacatttcattcattgtggtttatataattgaccttgatagtgaggttaatatcttctcaaatatttactgacaaatttggaagccaatgtttagcagttatattagttttctattgttgtataacaaattacacaaacagatggtttaaaaacacccatttattagctgaaagttctgtaggtcagaagtctggcacagcacaggtgggttttctgctcaggggttcctaaggctgaaatcaaggtttcagttaagctatgtcctcaactggagactctgggaaagaatctacttccaagctcattcaagttgttggtagaatcccattgtagttgtaagagtggggtccctgatttccggctggcttttgactgagtgttgctgtgaagcccattgcatatggcttcctccatctatcaaatttcatgattcaaatttctgacttcttctacccctaactaaagaattctctctgcttttaaagggctcatgtgattagatttcgcctacctagataatctccctatctcaaggtcaactgattagtaaccttaattacatctgcaagatccctttgctttgcaaagtaatgtaatcacaggagtaataccagggagccaagatcataaggaccattttagaaatctgtgaaccacagtggtgaaagaaggaacacattctctacagagatgtatattaagtgtctgttaacctggcattgtcctccccaaccaaaactatttctattgataggcttataggaatttggatacagctaaattcaaagcgactattaacctcctggtagtctccaagactatcagcctactggtagtccccaaacatttgttgtatttatttattcaataaatattttttagttgcccattaagtgacagacactatgctatactgtgggtgtacaatggtgagcaaaaattcctgctctcatagagcttaagatttagatgggagagagaggtatcaaaacctaaagaaatcaacatatacatatttataccgtatgataaatgttccaaaggagagaagaacatataaaagaagttggggcaggactccaggaggcactattcctacagaagataatgtcaacagggcccccggaattagacaacactcttgccctgcaagggtgccagggaaggaagtaatgactgaattctggtatgaaggaagaataggagtgaactaggtaaagcagctcgaggtaggagaaactatccaggcagaggaagagtatgtacaaatggcctgtggctggaggaaatacactgtgcctgaagttaatgtggctggagctcagagagtaaggaggatcaggagagtatggctagacagaaggccagagaggaagataggatttgttttattcacaggctcactgatcacattaaacattttcatctttatcctaagaatgttgagaagcccttggaacagtttgaaaccaaaggcttacaagatcagatctgagttttgaaatgctcattctggctgccatgtggagaatggtggagaacattaagtacaaactgctgccccaaaatgatttcacagcactccgaatgcaagatttctttagcttccctaaagacttaggactacagtctttgtgattggaagctctagttcttgttttaaaactttagtaagttcctgataataggtggcagtaatgtgcaatctcatgtactgagcctagttgtactctacagaagaagacaaacaatagtcactctgctcctttttcaacaatgtgctgtgttttgcctcagatggaaggacacatgttgtcattgttaaatgttttctaaactttaacacagtgaggttctcagaaaacatctcctttataatatatggggatccttgacatacacattaccaaagttttggttttctgggactttgttatcttctatcaaaaagaaaagtacattggagaacagataagaattttttggacaactgacaatgtttaaagggaatatctgagtataagattgcctggttatgcatgagttctctcttcccttaagtgaaatttagcaaacagatccatgtcttcaaccacttaaaggtatccaagtcaacagatctagataatctcattttactaattttgtgattcccagattgcaggctcaggaagaactctaatttcatgggctacatagaatatataacccaaatcaacttgtatcccactcccatgagctcatctctcctccccttgtcacacaaacccattccctactaggcctcaccaataatttgtgcaagtttgcttgctatctcttagatgaagagacagaccaattctagctgcccttatcataagggaagagaccaattggtttcttatcacaagagaagagaccagttggtctctagaccaattctagctgcccttatcacaagggaagagcatatacaaatggctcttagttttgctcttcatgaattatatgaccttgggaaaactgtataatttctatgtactttggttttctgatctctaaggttgggataataatgatagtacatatggtaatttcacaggagctgggacaagataaatgagtaactaatgaaactctgatatttacctggtggggagataccatgatcataaacgaaactcttagggcatgatgtgtagcaagtgctgcagaattgttagctgttttcattagttgtccttccttaagatattccagtgaatatcaagtctgatggcttggcaagagctccatgattttgaccttaacattgtttctgcttaaaacaaaacaaaaccaagaaattgtgtcagctccagattgcacaaaacatccatcacttcttatcacatatttccccttcttcatagtcttataacaaacgctttatagtctttcaggtttgacgaaaaaggtttcttggattatcttcatgcttttcttatatatattcactctgcacaagatgtccaatgcctcacaatgcagaaatcacaacaaactaacaatagcccagaatactgatatttaagatatcttattattccgagtaatagacaataccattttggatataaataacactcaggtacataattttagaaggtagatgcttattattttataccactactataaaatataactttatgttaaaatctaccttaaagtatcttatactaggcaatagctataaaggtataaattgtaccttctatttactatgaacttaagtattagcaaagccacgcatgagcttgttatgctctcctcaatgcttgctttctcagtcttctgaatatctcaccatccccatcaggaaaaaatatttggtagatttttactctctgtagtttgtgttcaaaaatcatttttttccaataggaaatcagattaaatgcacctttcaaacttaaaccctagagattctgatatggcttcttacccttcttttcctttctcctttgatcacttcttattaataggctattttaacaactgtatcacaaagtctacaaattatattatcatggcatgtaaggccttttgcaatcttgttggtgctaccctcaaaatatatccagagtctaagcacttttcattattcccactattacactcccctgggctcacctggatcattgaaacagcttcccagcttccagctgtttctgcccttggctccctacagtctgatttcaatttagtagccagagtgatgagattatgttacttctctgctccaaactcttcaatggttttctctctcactcagagtgacgaagtcctcaagatagcctacacatcctgcaggatctaaccatatgtcacttctctgacatcatctcctactgctcttttcctttggttacaccactccagccacactggcctcttgttaactctcagtggactaaacacacagcacaaccttatttatccattaattgaaccaatattgaggaagcccttactctgtgtagaggcttttggggattatagaagtggacaagatagacagagctccttcctttgtgaatgtatagtgtagcaggagagataagaaacaatgcaataagaataaaaggcaaggctgggcgcaggggctcacacctgtaattccatcactttgggaggccgaggcgggcgggtcaggagatcaagaccatcctggctaacacggtgaaaccccgtctctactaaaaatacaaaaaatttagcaggacatggtggcgggcacctctagtccagctactcgggaggctgaggcaggagaatggcatgaacctgggaggcagagcttgcagtgagctgagatggtgccaccgcactccagcctgggcagcagagcatgactccgttccccggccccccccaccaaaaaaaaacacctacacacacaaaaacaaacaaacaaacaaaaagaataaaaggcaaaaccattagtaattattataagtacctaaacatgctattaaactggatattagcaggagagacaggaaacaatgtaacaagaataaaagccaaagccaatagtaattctaaatatctaaacaggctgtctattaacacatctcagtttgctttattttagatcgcaacactcttgttacacaagattcatcttgaaaaatatctttatttaatctgatgctttgtgatgcaaggtcatgaactgaaatgccataaactagaagatgctgtaatctatcacacataaatattagtcaagcttgtttctttccctttctttctctttctttcattctttctctctttctttctctttctctctttcttctttctttctttccctttttctttcttttctgagatagagtcttgctctgttgctcaggctgtagtgcagtggcatgattgctcactgtaacctcaaatttctgggcttaagtaatcttcctgcctcagcatccctagtagctaagaatacaggtgcatgccaccacatctggctaatttgttaatttttctttagagacagggtctcactatgttgcccaggcttgtcttgaactcctggcctcaagcaatcttcctgctttggcctctcaaagcactgggattacaggcatgagattcttcactcatcatattataattattttggtttatagtagagaactaacttcataaagtaaaaaaaaaaatacaatatttagaattgtttgtccaaaaatagaggatattaaatattatcataaaactaaaggataatttaacacaaaccaagtttgtctagattaataaataagaataaactttccaaaactggtaatttctttttatagatccatttttgactaaaggaacataggttttatggctaagggaagtattttaaaaataatctcaacttttattttagatacagaaggtatatgtgcaggtttgttacatgggtatattgtataatgctgaggttaaggttatgaaagatcccatggcccaggtagtgagcatagttcccaatagatcaactcttgctcccctccctctctccctctttagtagactccagtatctattgttgacatctttatgtctgagtacccaatatttggctcccatttgtaaatgaaagcatgtggtacttagttttctgtttctgtgttaattcacttaggataatggccttgttgcagcaaaagacatgattttgttctttttttatggctctgtagtattccatggcgtatatgtgtcacattttctttattcagtccaccattgatgggcatcttggttaatcctatgtctttgttattgtgaatagcactgcaatgaacatataagcacatatgtctttttggtagaacaatttattctcctttgggtatatacctggtaatgggattgctgggccaattggtagttctcttttaaattttgagaaatcgaaagtccttgccagagcaatcaggcaaaaaaaaaaaaaaaaaaaaaaaagaaataaaggacattcaaattggaaaagaggaagccaaattatctcatcaatgatatggtcttatgcctagaaaaccctaaagcctcctccaaaatacttctacatctgataaataagtttagtaaagtctcaggttacaaaatcaatgtacataaatcagtagcactgctatgcaccaatgaccaagctgagaatcaaatcaagaacccaatcccccttacaatagattaaaaaaaaaaaaaaaacccaccaaaacctaggaatattcttaaccaaggaggtgaaagatctctaaaggaacaactatgaaacactgcagaaagaaatcatagatggcacaaacaaatggaaatacatcccatgctcacagattagaaaaatcaatactgtgaaaatgaccacactgcccaaagtaatctaaaagttcagtgcaattcctatcaaaataccaacatcacttttcacagaattagaaaaaacgatcctaaaatttatatgaaaccaaaaaggaacacaaatagccaaagcaatcctaagtaaaaagaacaaatctggaagcatcacattacacaacttcaaattatactatacgattatagtaaccaaaacagcatggtactggtataaaagtagatatatagaccaatagaacagaatagagaccccagaaataaagccaaatacttacagccaactgatctttgacaaagcacacaaaatcatgattggggaaaggacaccctattcaataaacggtgctgagaaaattggatagtcacatgtacaagaatgaaactggatccctatctctcatcacatataaaaattaactcaacatggattaaatacttatgtctaggacctgaaaccataaaaattctagaaggaaacctaggaaaaactcttctggacattggcctgggcaaagaatttatgactaagaccctaaaagcaaattcaactaaaatgaaaataaataaattgtacctaattaaactaaaaagcttctgcacagcaaaagaaacaatcatcagaataaacagacaacctacagaatgggagaaaatatttgtaaattatgcattcaacaaaggactaatatccagaatctataaggagctcagacaaatcagtcctgccactcactttgcaactcattgaatcttagttccctcttctttaaaatgaagataatcataatactacctgtgccaagattcagtgggaaaacctgactttagagctcaataaaaattagttgttttattttctctcctcaagtgtattagaagctcctttaaggtcaataattaaatttatctctatatctagcatgctcagtgcaattgctctataaatatttgttaaatttagttgttataaaattcttagaactggagtgcagaagccatctgcagcatgctatgaaaatctaaaataaaataatgtaataaaaaacaattcctttgagaaacttcataccctgattattttatttgcaacagatgcataaaactaaaactcaaatctgcataaatcaagtagttcagacttgctgtaagcatttaaaaatatatttttaaaatacatgctattttctagcaaagacatgtaatcaacctaggtgcttattaacagtggattggataaagaaaatgtggtacatctacaccacagaattctacacagccctaaaaaaaaaaaaatcatgtcctttgcagcaatgtggatgcagctggaggccattatcctaagcaaattaatgcagaaaaagaaaatcaaatatcacatgttcttatttgtaagttggagctaaaccctgggtcttcatagacataaagatgaaaacagtagagacttggaacctaaaaaggagggaagaagggaggagagcaagggctgaaaaacatcctaatgggcactctgggtgataggatcaatagaagcccaaacctcagcattatgcaatataaagcctagaaaagctccaaggagctgacagaagactggtgtggatggatcatgaaggaataaggggagaagtggcctgaggctatagaggtaagcagaagacagattattgaggacctttggaatagaacctgagaacagtgggaagcccttgcaggccttacccatggatatgatatggtcctatgtagattttacaaatactttggctgttacgaagggagttaattagaagaagaccagagtaaatgtggagaaactagttaaagtagcccaagtaagagaaaatggatggtggatatagtggtttggacagttattgtcattgttgagaagacgctggattcaaattggatatagagagtaagggaaaaggggatgctagcaataacctctccccttcctccaggtttctgacgcaaagtaaatagtggtgttatgtacttagatatgcatgctgaatgagaagccaatgtgggggcaggattaagagttctgtctgggcagttctcaaatatgagatgcatagagccacccaagtggcaatttctgcaacataatttttataattatttgtcttaaacagtaacaaagatgatggagaataaggaaaacttgactatagtagagtaagaaggtttgcctttgccacatgatgcaatggtaacaaggataaacccagcctgcatgactactttggttgtaatgcatagcattcgagtaaaacaaaaagaacaggccagatgcagtggctgactcctgtaatctcagcattttgggagcctgaagcaggatgaacacttgaaagaggattgccagaatgtcaagaccagcctgggctacacaggcagactctatctctgaaaaaaaaaaaaaaaaaaaaaaaaaaggccaggtgtggtagtatgtagtcccagctactctggaggccaagatgggaggatcacttaagctcaacagttggaggctgcagagagcaatgactgcaccattgcaatacagcccgggtgaccaagcaagaccctggctgagaaaaaaaaaaaaaaaaaaaaagaaagaaaaagctagttcgtacataagaacactgcagtatgacttgttgccaattagaagaaacacaactacaaggtcagggcatattattcaaacagtagagacaatacagtcaaatatttggcagaattacaaaatatctcattggaaaagacacgcaagggaaatcaacaaaaagatatgaatcagaattcatctgtgtctcaagaaaaggtcatgcgataaattaagttctgctagtgtttctacactaccgttagcctcattaccttattttttaagtgttaatatagttttaggtattttacatacatttttattattaattacaaccaaagtgcaacttgtaatagcaattccttcacattttttttttcaaatcttgcaccttaaaatccacctcgggcctcagttggccagctttggtatctgatacttggactacagataccactaaggcaagtagataaaatgtactctaggacctacagcccttctgctagatcctgaagaatgatcattaaaacaagctggtctagctggtcaagagcaaaaataaaatcaagatgacagaaaattgatgcaaaagtgaagtaaaatagctagagaatatgattgcgcctgtccccttagcatggattcccatgctagccaatctaaaatcctcactgttagaatcctcctgtcaatatgatagaatgaacagcaagctcagtgtcagaaaacctgtgttgttaacttggccctctttctagctgaatgtgtgtttttggtcaagttctttggcatttcagagactcagagtagtgaaggaagtggataagatgacctctacattctcttgcaagctcaaacatctatgaatccagagagaaaaactagagcatgaaattaaggttattttaaagaaataaccttaaaattattagtattcgaggatctccaatatattcatggcaccactcaaaactttccttctgctctatcccgtcttggctcaaagttatctccttaatgaggtctgccctgactatcctacttaaaattgtaaactttgcccacctggtacttccactctctttcccctgctctgtttttcaccgtaatactttactctttttaacatacaaaatcacttatttactgtgttgttatctatctgcctactcttaccatcaaatataagttctacctaggcagggatttttgtatgttttgctcatggatatatacgaagcacttagagtaatatgtgacatatacagggtacttgattaatactgttgagtgaatgaatgagtttccaatacaaatttaaaataaaatatttcctaacttaaaattgtaaagtcagatctaaccaactgttcattggtctgctagcagtgtttcttgtatatggaaatatattttaaatagatatgtcctgtgaaataatactaagtgttctaaagaaataagtgagtgaacgttacctcattgaactaacttgaccttgctcctgggagagagttcatttgagattaaacaagttcaaagtctatgaatcataaaacgataaaaaaaactaaaagggaaatggtgtttttataagctctgcaattcaaaagccatttcgggtaatattgttatttttatgtcaggaattcctcagtgctgatatcttagggcaaagggtttggttataaattaagagaatgaggaaataggtacatagtaggattgttccaaccaaatatgtgttgaatgtcaaaggaatttccctgaggaataatcttcagaataatttgctaagcacaggagaaaatttggcttattactttatagccagatttcatttttaattgaaacttctttcaagcaaatcacttactagtctattaacaataacaacataaacacaagtaaacattcggaatatagacatccaggtactaagctgattgctttacactcactgtcttattttacaagtaaggagttttagttgcagcaaaagaaataaattttccaatgtcaaatgaccagaacttaaacccaatctgtttggtgctaaagccaatgttctttactgcaatgttgggttatcttgtttctaaaacttaaatttatcagtaaaaggcaaaatttgctattattgaggacattaaaatcatatttttgtagactctgaggacaaatccaacaaaaaagttccaactatttcttggcaggcatcattgaaattggtatatagcttccttgggtattgactttgaaaaggaagttggtcactttagatatataagttcagtctgtttgtaaaaacaaaatgaaaacaaaacagttgccttatatgctaaaattatcctaatcgttttcacctttaacaacatatacacacagaacttgaggaactttacacggctcatcttcatattgtcagcatctagcaaagtacttgccacatagtgatcaataaaagttttagccagcctgggcaacatagtgacagcctatctctacaaaaaaaaattagccaggcaaggtggcgcacacctttggtcccagctacttgagaggaggatgtggggagatcctttgaatgcaggaggttgaggctgcagtgagctgtgattgcgccactgtgcttcaaccttggtgacagagcaagaccctgtctcacacacacacaaattaagtaaagaaaaaaaaaagaatcaaagaaaaaaataattccccagcttaagtccatctttatttgtttggataagctataaagtgtcaaataatgctgttaatggacatttctctagctctcccaaaggaggaattgagcacatagtatgtgctgtattttatatacagaataaaaatagagacaagatttctaccctcacagaacttaaattcttcaggagaatgacactgaagtccttaattggacttctctcttctgtattatcttcctcaagtggaggtatatggtgcttagttatgaaaaatacctccagggctttgatcttctcaataactctttgaggctgatatgaaaacagtaattagaaaaaaaccatgtatccaacttatatagacagttgatgaccaaagctagaatccagttatttcagcctcccatgtattttcttattacttaaggagaatctctatctctacctctttctctcttcttcctctctcacttttcttagaaacatgggtaagattttcagaaatatgagaaacttattaataaatgaaaaatactgggaattctcaatgtttcttgttttagccagttaattttggccttcattcaatgtgagtgtcccttaataaggagcaaactccactgagagatagatactaataaccaggattctgaaaatgcattctcatccccatctccaaacttttataaaaaatattataaaataatacacttttaatataggaaatttctcaaatacagaaaaaattaaagtaaactcagacctaactttcatcactaaaagataatcactcttgacactttgatatctttatctctaatattacaccaattaatttgcttgatatagtgaatattatgctattataattttcccctgccttttgtccttgcatattagcataggtattttctgaggttatcacaaactctgtaagcacgttttatattactacttttttaaagaggatgtataataattaattcatccatatatatgtggttaagtattcaggtcactgctcatttttcactgttataaaataaagcagcaatgaatacctttggctgatatttttttctgtacttggaattatttctttaagatagatttcctaaaattgaattactgagtcaaacagacttaagttttccttatgtatgtttccttattcatttgaataattttcaactcctacttgtttatttaactcttgtgagcatgtgatagtctcatttttcaaaatatctttgctgttgtaatttgcatttctttgtagttagcatgaatatttcagtatgttttcttctgtgtaccagtatactacatacttttttatatgaattgcctatttgcatcttttgctcggttctattagacctttgaattttttcttatccatttatataagctctttatatattaagaatattaacctattgtgatatttgcaataaatagctatatggtttgttgttggttttaaatgtgaatttattcaattttcttcataattttgttgtttttatagatttctttaaaagtaataaaattattgccatattattatttattttcaatgtccattactagccctttccagtcatcacttttactctcatgttcttaatttttattcatatcttggctccattgaccatctttattaggatatttgggaaataatacaatttatactaaacacacatcaaatcttaccttattttcttcttacaaaaaccctaggaatatgctgtttttgtctttatttgaatgacacagaaatcaaggtttttgagcagtggagtatttcttcaaatgacacagaaatcaagtcttttgagcagtggagtatttcttcaaagccacacagctagtaagtcatgaagctggaattccaagagttgccacttcattttcttctttccctttatcttactcagttgtcttctctcctcttaattttgtcattcatttaaaaacatttcttgtgctattatggtagatttattttaatagggggcagtgacttactcagagagatgattctctaatggagttttaaagatcttagaagttgatagaggaggctgggcgtggtggctcatgcctataatcccagcactttgggaggctgaggtgggtggatcacttgaggccagaagttcaagatcagcctagtcaatgtggtgaaaccccatttctactaaaattacaaaaattagcctggtgtgctggtgcactcccataatcccagctactcaggaggctgaggcatgagaattgctggaacccaggaggcggaggttgcagtgcgcctggattattaacactacactccagcctgggagacagagtaatactccatctcaataaaaagaagttgataagggagatagttcatggcaacggatctttgaaggcacgctaatgataacttaggcatttagcctactagtgtaatttccataaatctgcctctgatgtcatactctcagcacctaatattttctacaaacatttattgaaactttattttgtataagtctctgtccagtttgaatatttaaaaaattcataatcatatgaaacattaataataaatacaaaatgagagatgccgatactgaaaagtaggattgcggagtggtagaaaatatttctggctgtagtagatggggaagtgttcaaagaggagtataattcaggtttccatttgccatcgacttatcacatggctaactcactaagcgacttaattaaaattaaattaatttatcatcatctgatcaccatttcacacaactcatgtctgttgctgtattggctaaatgatggcaagacaaacgacctctgaaaatgatcctattgaccttcggaatctggatttttttttcaatgcaggtgtccatagaagcaatctgatgtaatccaacatgagttcaagcacagtcatttaatatcccctatcaagtacagtcatttaatatcccctatcatcacatgtccttcatacataaaaatcattacatgtgaaagggtggagagtgtgtggatcccttattattgtgttattgtaacacaataacaatattgtgttattattgttaacacaagtgagtcatatgtcttgctctttggactgagtggaaacttgtattctttctctgcctcaggtcaattaacttcattgaggtgagttgcattccttctttaagcatgttgaaccttcaatctggactcagatgggctaaatagaggagctaggaaaaatacagaaaataaattattagagagatcagagaaagatacataagatttacaataaaagaattatgagaaaaacatccaaaagaattaaaaaccataggagaaggaaaaataggtgaacagctttttaatttctataaatgtgttgttaatactcataataaaggactcagagctgggatatgagaataataggtcaaacgtatatggatacatagatgtgactacatacatgagttgcaaagaatgctaaggagggcaaaaagagattgagaagagggcattattactaatatatagcaatgttgaatgtttagggtgtttcaggcactgtacaaatcttttaaatacacaaatcacttaatcttgccataacattagaagatactatctactctttaccaaaaaggtaactgtgggatagcagagttaagtaacccgttcaaacctatgcataataatcagcagagatggtccttatctaagtttttctgcctttgaagtccaaatagtttaatgcagccaggtactaaagaagaaaacttttgtaaattagtttagtttaatgatttacatgtggaaaagcacagagtgaaaagcacatatcatctgagaagcccagtgagtttggctgaaatggagtgaacatgtacatgttgagggtgaggaagatgattagagagaagtgatgtgttgtggttcttaaaagctaagaggaaactgttagatatgatatagtctgtggcagggagccattgcaggttttccaagatggactcataaggagaaaacacttcgtgggactggaaaaggcagtgaagtggtgtgtcctatgataatgtactacagtgtaggatagtggttaagagtacagttatgagagagggactactggttagcaccttacctgctgtgtgactgggcaaataatgcaaacctcagtgtcttttattgtaatatgggagtaacaaaaatagtaactacttcataggattcttgtaaagattaaatgacttaatttctttgaagtgcttggcagttcctgataaatgaccagtagttaataaatgttagttgttattattatcattatatattattactcccatagatacatatagaacagactgcagcagagaggcaaatctttaatgttgtcagagtatagacaagttggtgaaatggctacatgagagcggaggacaagaaggtgcagattgtggcagtcacttcaaatggaaatatcaccgcttgaatgaaggtatatgagtgtcaacttgcaaggggaccaggtaggtttcatcagaaattaaggaagcttaaggagaacagccaagttcagcttgacagaagtggtggtggcacaaatgcaagactggtgtctttcaagaaaccaaggactgttgaaagtagcaagagctagtttgttttaggtccatcatgttttatattcacactttcatgtcagtggagcaaagaaatggaatacaatataatagaatggtagaatcttatttttaaaatctgtgttattctgatctttaacttacttatatctttgatagagatctttacctgatgctcaagattgtagaaatagtataatcaacataacagtatagcactgtatttatatcctgcactgtttagggagggtttaaggccattcaaaaggatacataaaatacaacaagattacataaatgaaaggtgagataaagcaacaaagcaaaacaaaagtgaaaacagagatcataggcacaaataagattaaaaacgcatgtaatgaagatgaaagcttttacatttaccccagatggaccacagggttgttgttaagcctttaaacagtgaacaatgctgtacacttgcatatgcaattagaacatgtggaaaaaatagtggcctgttagaagcctaattaacaatttgtgaaaaaaaaaaaaaaaaaaaaaaaaagaggccgagctgtagctcacgcctgtaatccctgcactttgggaggccgaggcgggcggatcacgaggtcaggagatcaagaccatcctggctaacacagtgaaacccagtctctacgaaaaatacaaaaaattagccgggcgtggtggcgggagcctgtagtcccagctacctgggaggctgaggcaggagaatggtgtgaacccgggaggcggagcttgcagtgagccgagatcctgccactgcactccagcctgggcgacaaagcaagactccgtctcaaaaaagaaaaaagaaagaaaaacaaaagaaaacttcattgtattgtaaggccaagaacaaaatatatcaagataaggaaaatttgtagtcaagaatagaaaaaaattatggctttgaagtatgagttatttaaagaaagtggaaacatcctcagactatgcagtaaaaaacaaagtgattttcttcttctaaacttatgcaataaactgataggtaatatgtgaaagtcatagaatgtagactagaggatacaacaaacctatttcctctatgttcataagaagtaagaaaagctctgatgtgagttagcattgctttacaattttgaattgtgcagattgcacgtacttttcctcagtttgaagtaaatagtggacaggaaaaaatattaaatgttggcagtaaatatggaaggaaattacaactaatgtaatatgctaaaacatgctatgtttattttactaatttgaattaaaatgtaagaatttaaaatgccctggaaaaacacgggcattgatctgacgtctgaagttttaaaatattacacactttgaaatagcatttgtaccttgaaatacctgtctctatatattttttaaaacttcctttttctttcattccatttatcatcaaataaaggatgaacagatgtaactcagaaactgtcaagcatgctgaagaaagaccactgcagaaaaatttctcctagccttttcaaaggtgttaggaagcagaaaggtgatacagaattggagaggtcggagtttttgtattaactgtattaaatgcgaatcccgagaaaatttcccttaactacgtcctgtagttatatggatatgaagacttatgtgaactttgaaagacgtgtctacataagttgaaatgtccccaatgattcagctgatgcgcgtttctctacttgccctttctagagaggtgcaacggaagccagaacattcctcctggaaattcaacctgtttcgcagtttctcgaggaatcagcattcagtcaatccgggccgggagcagtcatctgtggtgaggctgattggctgggcaggaacagcgccggggcgtgggctgagcacagccgcttcgctctctttgccacaggaagcctgagctcattcgagtagcggctcttccaagctcaaagaagcagaggccgctgttcgtttcctttaggtctttccactaaagtcggagtatcttcttccaaaatttcacgtcttggtggccgttccaaggagcgcgaggtaggggcacgcaaagctgggagctactatgggacagttcccaagtgtcaggctttcagatttcctgaacttggtcttcacgggagaagggcttcttgaggcgtggatagtgtgaagtcctctggcaagtccatggggaccaagtggggttagatctagactcaggagctcctggagcagcgcccaaaccgtagtggcactggaccatgttgcccggagcgcgcacagcccgcgcggtgcggggacctgctctctgagcccgcgggcggtgggtgggaggaagcatcgtccgcggcgactggaaccgggagggagaatcgcactggcggcgggcaaagtccagaacgcgctgccagacccccaactctgccttcgtggagatgctggagaccccgcgcacaggaaagcccctgcagtgcccatcgcggccagagcagctggggcatcaacggcgggcgctccctcttactgctctctggcttcgacgggggactagaggttagtctcacctccagcgcgcctgaggctcatgcatttggctaatgagctgcggtttctcttcaggtcggaatggatcttgaaggggaccgcaatggaggagcaaagaagaagaacttttttaaactgaacaataaaaggtaactagcttgtttcattttcatagtttacatagttgcgagatttgagtaatttatttctagcctccagctctgaaataaatgacatgttgttgtttttaattatttttaagaaacgcaagctagcctttggaatcaatatccctgcttagagcagaagtttgttggctgagtggagcacagcatatgcattttccctgtcttttttgttctttcttttaatgatacataatattttacatatttatgaaatggggtacatggaagcgttttttacatgcccggaatgtgtaatgatcaagtccgggtatttgaaggatacatcaccttaggtatatttcatttctatgtgttgataacattttaagtcttctagctactttgaaatatacaatatattgctaactgtagtcaccctcgtctgctatcgaacattggaacttatttgtcctatccaaccgttcttagtcattcaccaacctcttttcatttcacctttttacccttcccggcctctttcccttagtcttggtgtgcctctttctcagctttcctgccccagacaggcggatgctcatatgtgtttctgtcttatgaacttctgcttttcaagtggtgttggtcgcccacacgtgagccatatgctgctggtgatctgctctgtggtccaggctcttgcttccggtaaatggctatgtaaacatcgcgtttgtggcctggctgatgagacagaaggtcaaaagtacatttaggttgttaactggcaataaatatctgtatataatattggtaatgtaatcatatagggaaaataattatttaaagtaaattttgatcatggtgctctgcctttatagaatatttaaaacttcactaaatagattcattgttagtagtaaattgtaaaatagactagtaagtttaataatattagaaactgtaatgtaaattataagataaattagtaaacacattaatattataagaaaccaagcttttcagtgtaagagaaaaaatacaaatgtggaaatcaaatacatttttaaaaataatgttaagtttgaattagaaatttcaatatgaattcataatcttttaatagttcattttcagtccactgaaagggacagtaacaatgagcactgttagtaccagatctgggtttctaaataccattcctccctaaaagaaatgaacccctcagtagctaatttcagccaggtctgggacaggaaaaatagaaagtgagcctggagtatcttgtggtacctgaaaataaggaagtggagtttaatggagtagtcgaaagcacactgaagctgtctggaagatgcttccaatggccaactctgggacaatttgagcatcaaagaacatcgtaactgtaactgattttgagatactgaatgctactgctgaatgcttaatattctgagagaagggaaactgaaagaaagtgtgagaggtagagaaaataaagcaatgatctttagagaaaaattccagctatcattttggaacttccattgttataatagattcaggcaaggattgtcaatgaactctaaactatcagaaaaatgttgtatctaagaattttcttcagaatgtttactaattggaaggagaatatgcttctccaattaaagattttgcagttagcaccttaaccgagtgatcagacctggtatctctcacggtagaatggactgtagtaaatgactcatcacttggattttgagtaaacaacatcacctagcaaatattaatatatctgcaaaaacatttagtctgtatacaattaaacttgtagactggggctgtccaatggatatatcatgtgagccacatttgtaatttaaaattttctagtagcaacagtaaaaaatgaaaataaaaagataaagtaattttgtaaatatattttatagaactcaatatgtccaaaagattggattttctacatgtaatcaaaatgattaataagatagtttacattctcttttatgctaaatctcctgtttgatgtgtattttacatttattgcacctcccatttgtattcagtttgatacaggtatacccaagatgtgggacattctgtaagacagctgttcttgttcctttacaaaagtcaatgttaaaaaaataaaaggaggacttctagattaatagagactaaagagatataactaccaaacgtagtgtgtgaacattacaaaacaaaacaaaaacaatctaaaagttcaacaaggaaaaaatcctatggaaaacattcttgggagatttgaatgtgcattagatattagccaatatcagaattgtaatcacttttcttagatgtgataatggtaggagaacatgtaattgcaattgaaaatttttgtaacaaaaatgttcatataaaccatgaaaaagactccatagagtggagggtaggtattccactttttgtttttaactttgtatttttgaaaacttgatagcttaaagaattatgtacttatgatacaaacatttaggtagatttaactaagaaatattgagggtatgtgaagagaaacagtaaagaaaattgtatgatctttcacatatttctattattggttctatcatggcctatagactttttttttcaaattagagattatattttaaagtagttcttattaaattgtgttcattgccattgatttaaatctattttaacatgggattgtaaagaagcatatggctttggtaatagataatgctgggataatagtcctatttggaatatgactattagcaaagattctttattaaaatgatgtttgatgaatgacttgtctttctaagcactgttttttgtgctaatggggataagtaagttatctagtaggggtgagagtttgtgtgaaagtgcattttaatgtgatgcgatgcagtatctcagaaatctgaggttgcaccttatagtttggtggtcagggaacagacttggcatttaaatattggcttagttatagctgtgaaccttggacaagttaactcttctcactcttctacgtctctaaaagaacaaaaatgtgtcttcctcatagaattgtttatgaattgtgtgtgggaagtgcttacttagccagtgcctggaacattataacttctccagagtagcagctgttttagagaacaaaaaaataaataaaaggcttagagctaaaactcaactatttatggctatttttctcctttcatcctggttccagggatactgaaaccatgcctttactgggaattgggtgggaccaaacctgaagagttgtgtttgtgtattttatgtctgtctaacattactccaaagccaaatgggtaaactctggatttttttctttagaagtctcctcacctcttttgacctcacttagtgtaaagaacaaagacaaagatgaatttaccttatgaacttaaaaaccgtgtaaaaaataacacaaatcttttctaaaatagtttttcttttatacctacaaaaatacagatgaggcagatttgttacggttggtttgctttcacatcctaggtagcagttacacagagtagaaaatgggctacagagttagattcatttgtatctgggctcaaaataatagttgaccttatgcctgaggagaactttttgacaatttatagaacatcatttctgaccatagctttctagcgtgcatttatttcataatggtccatttaggactccagacatttttttcacaattagatttgcttataaggagtaatttaattttcttctgaggctagttatgcccagcatctaattgccacttctcttcactagaaagggaaggattaagaataatatctgggtagtggatggataaaatgtctactgccatcattaatcaaatgacaattaaggggattcataattaaggggaagcatgaatgattttctaattagaataaaaacagggaactcttttcagtatgtatatttttctaattgcaaagggtgtatgtatgtattcatcatagcaaatcaggaaatatcaaaggcacaaggaagaaaatatttttagagagattccagcactcagtgataaccacgtatgtagatttctaagatatatgtaaacatatttaaacattataaatggggtcatactattatcatcctgttttttaactgtataatatagacatatttcttcttcctattagtcattaaatatacattctatgttaatttgggtaatttaaaaaatatgtactttttaaagttttatgtaattccattgctgttttgcagtgaaaaagataagaaggaaaagaaaccaactgtcagtgtattttcaatggtgagttttgaatttattaactattcaaaatacttcggaaatttgacatctccttacatggaaaagagatatttcatctgatgtaagattttcgtatagggtatgttaatggagatgcaaaataaattggtttgatttagcttattttcaggagaatgctgatcataacttgctatctatattactaatctacagccaccattcctgacttagatttcaattcttctaatgaattatgttgccagtgatccattacctacacaagcacctctcccatctgcatagaggaaaccaatcacatagaatgctgtctttaatggctctgaaatttggcaggttttttaggtcaaagtcagttgctatcaataaaagttagcaatggattatttattactatgcaaattttaggtcatttaggttagtccattgcaaattttagttcaaaatccattactaacaataaaaggtagcaatggattatttattactatgatttcaaatatgtcatatgccattattcccctgtgttaaacagatgaaaatctagaattcgaaaaccttattgtaactctttatttcattttctggttgcacagtggtttttttagaagcttttctttaatcacacttggaatcagacatgtatcatatatgtgtggttggttgatgacctcagtgctgtgatcttggctcactgcaacctctgcctagttaatgacctcttatttacctggattcttacttccttttttctaagagtacaaatttaggtgaactgttaggtgaaagattccagagattagaacctggaagactactaaaccaattaagtccaacagcacatgctttataattcagtcataacacagcaatttttttaaggtaagggagtggatagattgtcttgcaaaatggattttaataaattgactataaaaatagttgtaggtagggaaaaaacagtcatgtgacttttacactgaggactctatggttcccttatgtgatcttcgtttctctgtgctaccattgctcttgccatgactcctgcttttattctatctctacgccctttggaattttggtgagatgagactatgtacttgagtcattcttaggctacttgagtaaccaagtgacagttttcattgttactttcttgtatggaaagaagcgtttaggttaaagttgtatttatccccaggatttcagtgctgtcactttgagactttcagtttttattatttgtagttaaatttttttaaaccttaggagtcttatattttagaaaatttaacagacctactatatagaggcaatgttatcaataattcattttaaggcacaaaagaataaaaatatggagctttaatatgaggtagtagtaatagcacacataaagcactgtgtgccaagcattgtcctaagtatttcatatttaatctcatttaatccttacaactccttttgagaaagatactattattattccagttttacacatgaagaaactggagccagacatgttcacttgtctgaggatgtacaatggggccaggatagagagaatatattctaagtctcttgatgaagtactctactacttagatagattttcctcacatctttttcctgaaaagtcaacatagaaaacattgaatgtaacttcaatataaaacttataaacacaagaacataataaaagtttaacaatatattggtgatgtcactggcattgcttattaataatagttttcagtgaagacaaaaaacattgtgtgttcagggtttccaagaagcccagcttcagtgattcagactaggaggacccagaggatttatggctaatgtttattacaacaaaaggatacaaggcaaaatcagccatggcaaaaggcgagtggggagaagtccagaagaaaccaggtgcaagctcctagagttctctcctaatggagtcacagggcacactgaatttccccaagcaatgagttaagacagcacttgtagaatgctgtttatcagagaagctcattagagactcagtgcccaaggattttattaggaactgatcatgtaggcacctacccagcatgcaccaaaatttcagactcatagaaggaaggcagaactgcagaatgaagaatcatattgtttgtacagatagtttggccatacttatcagttagaatggtggtaatcctccccaaatccaagttccagccaagggccaacctttgtatacaggcctttctaaacatggcagcctcagagctgctgtgttagctcttgtctgcacacaatgtctgttaatttatttccactatgagattttttagcaatcttaaaaaagtgatgaaagaagtaaggaatagattcaaaattctatactagccttttaaatttatatcagaccttgtttcaacatttacagaaacacaaaagtagaataaaatctaaagcaagtgaggaaatgtgacacatagagctgggctgtaatttctacacaaaatgaacttcttagagattatacactcttggtcaggtgctgtggctcacgcctgtaatcccagaactttggaaggctaaggtgggcagatcactagagccctgaagttcaagaccagcctgggcaacatgacaaaaccctgtctatgtgaaaagtacaaaaattagctgggcatggtggcacatgcctgtagtctcagctactcgggaggctgaggtgggaggatcacttgaacccaggaggtggagatgcagtgagccaagattgtgctactgcactctagcctgggtgacagagtgagacactgtctcaaaaaaaaaaaaaaaaagattatatattcttgcaagaattgtgcactgtagattgaactctgagctttctattatgtgtgtcttagggaaacattaatttttttctaaatagataatacctaacaatgttaagtgtttcccttgtaccaggcatttgttaaataccctatgtttattgtgtgacataatcttcatatagggacataagtacctgcaatttaggaacttgtgttattcttgtgttccagatgaagaacttgacttagagaagttaagtaatgcattcaaaatcacagggtcacatagctactaagcagggtagactcagatatgcccagttgcttttaacaactgtaatcatttatgactggttaaactgttatctctctggaattgaagagttctttattgctgctatcttttgatcttatgaccatctcatcatcaaagactacgccacctggctcagtatcctccctttccactttggtgctccaaccaacttgggtgacttttatggttatatggataatcactccttgagcttcacagctgcaataatcataaaaacctacctgtgtctgaatctgtttcctcctccttctttccagttatgacagagttttagtcttaagactaatcattcatactttggctcctatctcctctgccttctcagggaccttacatcattattaccactcattctcttctgtatcttccatctttccctctcaactggatctgtcccattggcattgacacatcaaggcactgatgcccttcatggagccacccctgccagctcccttcacacacaaaagtggcctttgcgttctgtcttgatttcgccattgacttagttctcaacctattgaagtttggctcctgttcctgtctctctctacattcagtggacattttaaaattctatcttgatctctcagcagcacttagactttctcctatattttttgtatttgcttctgttatgtcacggtttgctgattttcctccagctctttggctttttcttgtgctgccctcgcctgtaaagttaagttcctcaaccccttatcacaggagtcagagatgatgtggacattcctatagttccacaaagccattttcaaattttttttattctcatgcaaactcctttgtcatttgagtttcattctgcataattatactatcttctatctattttcggtggtatcctcgaagtatacccccacccccattccttgaggactttggcatttgattgcttctacttcattcaccttatgttcctgttattcttctgagtattttggtgaccttacaaataagtctcaacattctctgactgcttcagttccaacaacgacgctccataaattacatgagtaccttagtaaattgcacgtgtggacaggatcttgggcttattgtctgggtgagctttcctctatgaaggtataaacacacacacacgtgtatcagtctttgaccacaacctgtgattccttccagctctgccctgcctctttatcatccctcttttgacattgtgtattcatttcctattgctgctgtaggaaaatagcactcacttagtggcttaaaacaacacaagtttattaccttactgttctggaatcgaagttttactgggctaaagtcaaggtatcagcaggattgcatttcttctggaggctctgtttccttccctttttcagcttctagaggacacttgcatttctagactcacaggcccttccttgcatcactccaacctcttacttcaatcatcacatctcctactgactccaggccccctcctccctcttataagcacccttgtaattacatttgctctcctagataatccagggtaatcccctatctggagatcttttaaatctgcaaagtcccttttatcatgtaaagaaatatattcacaggttcctgggattaggatttggacaggctgtggggggagaattattctgtctaccacacctggtcaagactttactctctcaactgctctttcatctcctagtatccctccttcctttttgctcttctaaaaatttacccatagcagccacatcatatcaccttggtccctaccttaaaaccattaaatgctttcctttctgcttacacaggaagttcagtgtaaaacccagactccttcctgtcatcacaaaatgccctacatatctgacctctgttatttctgactttactgcagacaaatattccctctcactctgctcttgccacagtgttcattctctttggtccttgggatacagcaagctggtttttacctaagtacctttgcattggctcttcctgcctggaatgcactgtccccagatcatcacaggatgaactgtatccttcctgtcactgaagtctcatcatggatgttacctcctgagaaagacattctctgaccagccaatctaaaccaggtgaccctgcctgtctctgtgtcataccatgtatggcttttctcctgaatatttatcactgtctgatttcttttttatgtgtttgtcttctctctgaaggtaggctccgtggaggcaggagattttttgtatattttgttctctactataacccaaatgccctagaatggtgcctggaactttcatagcaacttaaatattgaatgaatgttgaatacatctattcccccttttagtgtatgcactagagtgtatgctttgtgaggataggtagcttttcttactcactgttgttaccagtacctagaaccaagcctgaccttattaggttctttcaaatatttgaaagatattttaaaatattcacatatcccttgaatgttaaatgaataaatgaatgaattaattctctctcaaatccaagtcatgtttgccatctaatctggtgaatgttacctaaacctctctcctgtcagtaccttctacttctttgccctgggaagcccagtctttggcattaggcacggatcaacatgccttttatgtggttctggttcaccttctctctctttcctttcagcatctaatcaaactttctttctttctctctctctctctctctctccctccctctctccctctctctctctctctctctctctctctctcctctctctctctctctttctttttttaggtcttaactctgtcacccaggctggagtacagtggcatgatcacagctcactgcaggttcaaccacccaggcttaagtgatcctaccaccccagcctctggagtagctaggaccccaggcacatgccatcacacccaaacaatttttaaatttttttgtagagagagggtctcctatgttgcccaggctgtaccaaactcctgggctcaagtgatcctcctgccctcagcctcccaaagtgttgggattacaggtgtgagccatcatgcccagcgcatttccttttttaaaagctcctattacaattagtttatacttctattttacatttcacctgtgttacaacgttttttggtctgcctgctttttgactttatgagagtgaaaagtcttgttaattattatattttcaaaaccagtaacattatctgcttatatcatatatttgcatattgtatgctcaataagtttcttgtattctcatttttaccctcataacagctatgtaaggttttctgtgtgtatgaatattttcctcattttgtaaattcagaaactgagactcaaggttattaagatttttttcccctaaagtctccttcctaataaactacagagtgagggcatttgactgaggcttttgtcctactcagcattatgttaccactttcttcaaatcttctcacccccttctctctagaaatcaatcttgcttcatgtcattaagaaatatgaggttctagcatttataaggaacctaaacaaatttacaaagaaaaaacaaacaacccaataaaaagatgggcaaaggacatgaatagagacttcttaaaagacatgtggccaacaattatataaaaaaagctcaacatcactgatcattagagaaatgcaaatcaaaaccactgtgagaaaccatttaacaccagtcagaatggctattattacaaagtaaaaaaataacagatgctggcaagattgtggagaaaaaggaacatttatacactgttcagccattgtggaagacagtgtggtgattcctcaaagacctaaagacagaaataccatttgacctattactgggtgtatacccaaaggaatataaatcattgtattataaagacacatgcattgtatgttcattgcagcactattcacaatagcaaagacatggaatcaacctaaatggccatcaattgtagactggataaagaaaatgtggtacacatagagcattgaacaccatgcagccataaaaagaaacgagatcacgtcctttgcagggcatggctggagctggaggccattatccttagcaaactaatacaggaacagaaaaccaaacaccacatgttctcacttaaaagtgggagctaaatgatgagaacacatggacacctagaggggaacaacacacattggggcctttcggagggtggagtgtgggaggagggagaggatcaggaaaaataactaacgagtactaggcttaatagctgggtgatgaaataatctgtacaacaaccccccatgaaacaagtttacgtatgtaacaaacctgcatttgtacccatgaacttaaaagttaaaataaacaaataaaaaataataaaaaaaaaaacaaaaggaaatatgaggttctgaactctttcaattttctgtctttattcctggaaaattagtactcactttaatctccttccttctagtctaagattaagagatgtaattccaattttcccagctcagtgaggggtgtcttttgatcagtcagctatttctgtttccacactttacaccccaaacttgagggtccccagtcttttttaagcacattgtgctcttttctgtctcagtttacttttctttttggcttaaatgccttttttttttttttttttttgagacagagtctcactctgtcgcccaggctggagtgcagtggtgcgatctcggctcactgcaagctccgcctcccaggttcacaccattctcctgcctcagcctcctgagtagctgggattacaggcgcctgccaccacatccggctaatttctttttttgtattttaatagagacggggtttcactgtgttagccaggatggtattgatctcctgacctcgtgatctgcccgccttggcctcccaaagtgctgggattacaggtgtgagccactgcacccagctacacttggtaaactttcaaagctggaaggaagcatcacctcttttatcatatgaagccttttcacaaaggagggaatgatgattgactcagttttgtgtctattctatacactgtactgtcaaagcatgcagagcatgtattgcatatacatttttctttaacctctctgaaggcagggttatatctttggcatttatctctggattttatctgtcattgaataggcattcagtaaatgtctactttcatgatccacttatttttattatggccagtgacagttctggaggtaaaatgtcctgtgttggtggtgatgggagaaattttttcatatcaactatcttctcttcctgtactaaggagtttgatattttatctactttaatataatctctaaaagaagacctcttccctttcatttttgtttaaggaagcagatgaattcttatctaagacaaagtacatagtgcaaaatttagccagtgtttcaatgaaatatgaaaaaatatgccaaaacgtgttgtcccattaatgttttaatctgtaaatatgatgatgtttttagatcatcaacccataaataacatggaaagttatgccatgaacccaaacttaagctcatttgataacacatttaagagctagaaaaagggtaaatgcaaatacttaagtatctattagatactcttttttacacaccatatcttaattttcattaattatttcataatttggctttactttttatctcctgctttatggactgccattcattactggtaataaccattctttatttctccactcggcagtccagtaccaaatcccccagttgctactgtaagattcatgtaagctaactctaggattggtttctatccccttgtgaagtatatgtaagttctaaaatcttgctgtctgtggctatgtcttttttgctgcctaatctttgttttggtttatatttcctgcctaggcctatgatttttttacccagtttcctccctgcattacaaacctgttgcctacagctacaccttgcatccacatgttaaccttctgccctgggatttatccatagacacccacagctggctttaccccatttctgttttttttccctttggttttctttcaatccttagctagttccttgagttatagggaagcagtattaatcacttcccaagggggccctgagcccattcctcttaactgtgtccttttcctgtaactttttgggttcagagaagcttttctttccttcctgttacctgcctacatttaaagagattatgcagatctccaacgtgggtcattcattattgccatattctgtcttctcagaaaaaatgttccttgacaagcatgcatcagactcattcctttcttttttctgctcattcttgaggcctaattatcttcaaatcattttacctttataccagttccattgtttggcaggtctttaacccaaaccactttcttaaagcaacacaatgtttcctccatggtatcctcagaggggcctttggcattcaagtttttgcccatgagatgataagtggcttctattcttagaaactagagcaacaaataccatattatataccattaaatacttttacagtttcccagaatgtcccatccttctcattagacttcatataagaagacagaccaagtccaatatgaagaattaggccagaactcaatggaagaatcaaatgtccatttctaattagactattgcaataatttagcaaaggtagagggtgtcttggactaggttggtatcagtagtagtctgaaaaatgtttggattttggatatattttgaaggaaaagcaaatcttccatgaaactgtactaatttttcctctgctattcttttttctctctttttagtttcgctattcaaattggcttgacaagttgtatatggtggtgggaactttggctgccatcatccatggggctggacttcctctcatgatgctggtgtttggagaaatgacagatatctttgcaaatgcaggaaatttagaagatctgatgtcaaacatcactaatagaagtaagtattgtttgtgtaccaattttattggaaacttgcagcaaaaacaagcacttagagtgatgtttatggattctttactaaatacacattagtgtgtttagtcctgtaggaggcagacagtctgagttataattcatatttgtagtgagttagaaaagataatatttacaagcattacaacacacaactgaagtgccagcagagatatgtagaaaaagagagagccctgtgaagtcagaaatattctggaaagcttcaagaagaaatataggaacttaattagaaccttgaatgataagtaggaatctgttgtgagatttcctaacagattgaacatgggtgtaagacgaaaagtcggggatgattctaaagtttttagccctagaaactgggaggatgcagttactatcaacagaaatgagagatggagaaggagagtggatttgagcaataaatcccagaaatttagttttggacattgttatatgttgggctttctggaagtagatgcaggaatggaaaagtggggcaaaattgtgtgtgtgtgtgtgggggggtattttaggataggataaataatagcttgtagcttgttttgtgtgttaatggaaatgatccaaaagaaaggagaaagtgatgtttgaatgaaagatggaagagatttgctgagtgatatccttgagaaaaaatggaatccagtgctgaggaggaaaacagtaacaggtgggaaaagtgaatttgagtgtcagtacccagtggtgggtagatgagaaggtgagaatctgtggaatttttctcctgataactttagttttctcagtgaagtaggaagcaggagaattggctgatagagacagagaaaacagatgtaacacagctctcaaggaaagtgggaaagtgaatagactacagaaataatctgggtgtaacatacatattctttcctctctctccctctctctctctctttctcgattggggaggaatgggttgatatctctgagtttcctaggttacctctggtcaagcctagattgatttaaactgagctactcaaaaacttacaatccagtttgcactcaggtggtcaaatgttgaaaatgcctgtttgataacgtacttgaaaatgtagtgataccacttagcttacaaggacctttcaacttttgaactttcaagtttctgatgaatgcaatgaattgcttccccagaaacatgcacatgaatattcataccaatctcgggtatatacggatcttttgatacttgtcagtgggtcctcagaaccacttcatgaccctaaaaagtacattgtttaccctggggtagaactacttcaattctgtggatgcaggtaatgagctgggccagaaaaatttttgtatgtttgagctatgtaaaattcttatgctttattacatcctttcacggcatccaaagggacctgcagaaagatgctgcaccacctctgaactggtacctttcttttacaccattcaccagaggaagtcctcaatgctttctgaattcattagttcctatacttgctatattggccaatattctgtggcgttagctctcttactgcttcatagtggaagaatcaaatacttcatcactctctggtggctcagcaggcctaatgggtacatctctgtccatccagatcttgctcactttttaatgacttcccagccttcagaactgtgggaaataaatttttattgtttgtatgttaatacatacagtttatgtattttgttatatcatcccaaatggactaagacacacagtaaactcacttacttaatagcatgcatgagctcccaaacagatgatgatctagttgtgaagactagctcctttctggataggcccatgtgtctgtatgcctatcaaaatctcctaggttaaacaggggccacatcaccacagcttgccagctggtaatttagatttccatcttcatagatatctagtttctaggtgaggttgtaattcacattgcagtccttgccagtcattctcattcagctcactcttctagtcttgagaacgggaaagagaaagcttagagaaatatttgaaagtttacttttgttattctcttaagaggtggtatatttagtggttagcgaacatactctggagttggactgcctggctcaaaaaccacacccttaccaatttttaattttgaggtttagggaatttattcatactttagttattaagttggataacaatagaacctacttctcaggatggttgtgatatttaagtggattcattcattgaagaatcacagaacaaagtctagtcataagaagtactcaacaaatattagttactgttattatcaacaggctttcatgttcctcacaaatgaaattacataactttcaatgatgatatggttccttatataatttcttctttacaaaattctgtgatactacctcaattttcatagttgttgaaagtttgggacatacccaaagttactcagtacctattatatgatgtgaataatcatccctttaagtagaatttccttggttaccagccatgcctttcagggaaggtaggtatcctccaactatgacccctgggctaatttggcctgctgcctctttttgtacagggtgtgaactaagaatggattttacattttgaaatcattgaaaaaaaatcaaaagaagaaattatattttgtgacccgtggaaattatgtgaaatttaaatttcagtacctgtaaataaagtttaatgaaatgtagctacacctattcatttacattttatgaatgtaagcagcctatggctgcttctatgccacaatgacacagtagagtagttgtacaaaccgtatggtctgcagagcctaagatatttactatctggccctttatagaaaaaggttgccaatctctgaagtagggtattgagtgaggggttgttatcttcagtcaatccatcaattaatttgtattagagcattctgtgtgccagtcacagtacatgccctcatcattcccaactcttgaggagcttagtgtagtgggagggatggacaagggtgaaccaataaatacagtcgaatttgattagtgatataatacagagataaataaaatgcattggaaaaagagagaaaggacacctgactccatatagaggaatcatgggaggcttccaagaggaggtgataaccaaatatggtcagcatctatctcctacacaaagtgtacctattctgtgtaacagatgaaaccatttcaaaataaagattaaataagtaagattaatatccttccctcactgccactccttatttccactcccctcaccattgtctatccttccatgcctttccaaagacagcatgctatctttactgtgattttcactttaggacgcttactacactatcactaatctgcttgtctgcagattcagactgccagataccctcaagtctgcctggaaagcagggaatagcatcaaaggttttgatgcttgtcccagagatgagggcaaacatgctctgtcatgcctgtggagggagaaccagcctactaaattcttggggcccgagatacagtcagatcattcttctttttgcccttccctaggcagaacctcattatctctccatgggggtggactagataccagagcctccttattggaaaagtagtccttgcttaaggggacttggacttgcggaggctcttgaaagcctgggggtttttacaataaacataggatctaattagacagctctaaaaccttcttcagtaagcagatccttctctgttgctgcaatagaacccttgtaagttttctcgtcccaatactttgccttaattaacagacatcagcttttgttctgctgttttactgtggaccagatttcctgacagccactcccatctatctctggtttaattatagaatatgtgtagcctttgccttaaaatctctgatgactggagcctagggaactctctgattctgtcatatcacttttttttttgtaaacaaagcttaatcactgatgaatttctgtaatattctgtgaattctcatcttccttatgagactggccactatctggaaatgatcctagataaaggcgattgtggttttaaatgtgttgtggtgaagacggcaggtggggtgcctgtaaaatgacatccaggcagttgaagaaatgacactaaatcttggcataaagaacaggactagaagctgggtgtggtggtgtgtgcctgcagtcccagctattggagaggctgaggtgggaggatcacttgaggtcagaagttcaaggctagcctgggcaagatagtgagagtttgtctctaataaaacttaaaaggttaaaaaatgataaaatgtaaggaggaggtggaacaagatagccaaacaaaagcctccagaaatcatccccccctcccccatccctacaggaacaccaaattgaacaactattcacaaaacaaagcaccttcataagaactaaaaaccaggtgagcgaccacactatttggttttaacattatattaaggaaagaggcactgaagaaggtaggaaagagagtcttgaattgcctgcaccactcttcccctcccccaccagcagcacatactgaagaatgaatcacagtctcttaatagcaaaattgatcaagcagaaggaagaattagtgagcttgaagacaggctatttgaaatacacacactcagaggagacaaaagaaaaaagaatgaagcatgcccacaagacctacaaaatagccttaaaagggtaaatccaagagttattggccttaaataggaggtagacagagagattagagtagaaagtttatttaaaagggtaataacacagaatttcccaagcctaaagaaagatatcagtattcaagtacgagaatgttgtgggacaccaagcatatttaactcaaataagactacctcaagatatttaacaatcaaattcccaaaagtcaaggataaagaaaggatcctaaaaggagcaagagaaaaggaacaaataacatacaaaggagctccaacatgtctggaagcagacttctcagtggaaactttacaggtctgaagagagtagcgtgacatatttaaagtgctgaaagaaaaacactttttatcctaaaatagaatatccaatgaaaatatccttcaaacatgaaggagaaataaatactttctcagatgaacaaaagctgagggatttattcaacaccagacctgtctagacaagaaatgctaaagggagttctttaatcagaaagaaaatgatgttaatgaacaataagaaatcatctgaaggtacaaaactcactggtaataataagtactcagaaaaacacagaatattacaacactgtaattgtggtgtataacttactcatatcttgagtagaaaggctaaaaaatgaacctataaaaaataataactacaataactgttcaagacacagtctaataagatataaacagatacagatataaaaagtagggagctgaagttaaagtgtagagtttgtattagttttccctttgcttgtttgtgtatgtaatcagcattaagttgccatcagtttaaaaatgagttatatgatatcatttgcacacctgatggtaacctcaaataaaataacatacagcagatacataaaaaattaaaagcaagacattaaaacataccaccagagaagatcaccttcactaaaaggaagacaagaaagaacgaaagaaggaagagaagatcacaaaaaacaacaaacaaaatggcaggagtaagtcttcacttatcaataataacattgaatctaaatggactaaattctctaatcaaaagacatagagtggctgaatggattaaaaaaaacacattaaaatattatttaagaccaaatggggtttatcccagggatgcaaggattgttcatcgtatgcaaactaatcaatgtgatatgtcatatcaacagaatgaaggatataaaatatatgataatttcagttgatgatgaaaaggcctttgataaaattcaccacccttcatgataaaaactgggtatagaaggaacattcataaacaaaataaaagccacataaacagacccacagctagtatcacaccaaatgaggaaaaactgaaagcctttccttcaagatctggaacaagacaaggatgctcactttcactagttattcagcataatactgaaagtcctagcgagggcaatcagacaagagaaagaaaaaaaaaggcatctgaattggaaaggaagaagtcaaattatccctgttggcagatgatacaatcttatatttggaaaaacctaaagactccaacaaataactattaggagtgataaatgaattcagttaagttgcaagatacaaaatcaacatacaacaatcagtagcatttctacatggtgacagcaaacaatctgaaaaggtaatcaagaaagtaatctcggccgggcgcggtggctcacgcctgtaatcccagcactttgggaggccgaggcaggtggatcacgaggtcaggagatcgagactatcccggctaaaacggtgaaaccctgtctctactaaaaatacaaaaaattagccgggcgtggtggcgggcgcctgtagtcccagctacttgggaggctgaggcaggagaatggcgtgaacccgggaggcggagcttgcagtgagccgagatcccgccactgcactccagcctgggcgacagagcgagactccgtctcaaaaaaaaaaaaaaaaaaagaaagtagtctcatttactattgctacacatgaaataaatacctaggaataacttttactcaataaatgagagatctctacaatgaaaactgtagaacattgatgtaaaaaattgaagaggacacaaaaaatggaaagatactccatgttcattgattggaagaatggatatttttaaaatgtccatactaccaaagcaatctacagacagtgcaatcgctatcaaaataccagtgacattcttcacagaaatagaaaaaagaatcctaacatttacatggaaccacgaaaaaaacagaatagccaaagctatcctcagcaaaaagaacaaaactggagaaatcacattacctgacttcaaattatactacagagctagtaaccaaaacaccatggtacaaagaaaagagacacatagaccaatggaacagaatagagaatgcagacataaatccacaaatctacagtgaactcatttttgacaaagtttctaagaatgtatattggggaaaagaccgtctcttcaaaaaatggtggtgggagaactggatatccatatgcataaaaatgaaactaaatccctttctctcaccatatacaaaaataaaatcaatatggattaaagacttaaatctatgacctgaaactatgaaactactaaaagaagacactggaaaaactctctaggacattagattgggcaaagatttcttgagtaatacccctacaagcacagggaaccaaaacaaaaatggacaaatggatcacatcaagttaaaaaccttctggactgcagaggaaacaatcagcaaagtgaagagacaacctgcaaaatgggagaaagtatttgcaagctatccatctgacatcagattaataaccagaatatatgaggaactcaaacaactcaataggaaaaatctccaattaacaaatgggcaaaagatctgaatagacatttctcaaaagaagctatacaaatggcaaacaggtatatgaaaatatgctcaacatcattgatcatcagagaaatgcaagtcaaaactataatgcgatatcatttcaccccagttaaaatggcttttagccaaagataggcaataacaaatgctggcgaggatgtggagaaaagaaaacccttgtacactgttgtacaacttgtacatttttgagaatgtaaattagtacaaccatgatggagaacagtatgggggttcctcaaaaaatggaaaattaaactaccatatgatccagttatccctctgctggggaaatactcaaaagaaaggaaaccagtatatcgaacctgcactcccatgtttcttgcatcactattcacaatagccaggatttgggagcaacctaagtgtccatcagcaagtaaatggatgaagaaattatgatacatacacacaatggagtactattcatccttaaaaaaatgagatcctgtcatttgcaacaacaaaaatggaactggaggagattatattaagtgaaataagccaggcacagaaagacgaacttcacatttctcacttatttgtgggagctaaaaaattaaaacaattggacttatagagatagtagaatgacatttaccagaggccgggaagtgtagtggggtggcagaggtagaagtggagatggttaaaggatacaaaaatatatagttagctagaatgaatatcatctagtatttgatcacacaacagggtgactacagtcaacaacaatttattgcacatttaaaaataactaaaagggtataactggattgtttgtaacacaaagaaaggataaatttttgaggtgatagataccccattcaccctaatgtgattattatccattgtatgcctatgtcaaaatatctcatacaccctgtaaatatatacatctactatgtaccacccaaattaaaaataaattaaaattaaaattaaataaatttaaaaataaaactaaaaaaaccaggactatcaacttggctttatttaagttgaatgtgatgttaaatcctctgggatagaatatggagaaaagtagaaagaatgggagccccaagccttgaggaagaactcaactgttagcaataactgaagccaaccctcattgaacatttactatttgctgggtcttgttcttggagctttacatgcagtaactcttttaattcttaaatacacatgagattaatactattatatatgtgtgtaaaagtatctatatatacttacatataattatattttatatataatatatacttacacacacacttatatatagtgtgtgtgtatatgtatagctctgtgaaaccatttgcaaattttttgaataggttaagttatagcagatacaacaggttgggcactggatatataaagataaacaaaatatagtacagttttctaagaccataataatatatggtataataatatttttggttaagggttttcaagccaaaaagtagaattagttacaatgtaatctctgcaatatattagaaaaacagcaaaaaaaaaaaagatcaatatacagatagtacctaacccattctaggtgcttaagaaattggatgaataaataaaagactgaataatagaattttgtaggtgaaaaggggcttagatgttatctagcctgaacccataatttatagacatacatgcccaggaggttgaattaatgtggccataatggaattgcttgcgggttgacagagctgaattcctgggccaggaatcctactttttagtctggtatcttttccactctgctagtggttttcacactctgcctaaattggaagcaaatgccagcacttggtcttttaaatctcttggatgctgccctgtaagtttgatttttagtgtgtcaggaaggtcaggcaagaggcacagctcttcaggccagaggtatataaacagctcacataaaaagactgtagttcctggaatcatctctgtcacctgcagtaagcccaactacactgagtcacagccttcagtttgggccaatgccatagggatttatcatttaggcaaaagatccaaattccccttccctgcggttgatggagctttctgcacaagaagagtagtttattggtttattagagcttcttaaatgggtagaaaagctaaatgaaaaaaaaacggaagttcctgggaaaaactgtgctaaataggtcagcagtgttaccctgtcacctgaagtttgaggcctaaaagtgaaaggatttcttacttgaacagaaatccgatgatattagagaaagtggctctcattctgggtttatcttcagtgtctggaatgatgcctggcatgaagtctctgtggaagacagtttgaaaaccaccttttcaatataatttcagtttaccaattagggaattatcaatgcatcatcaaaggataagactatactaatgtatccatgttatatattttttattcatactgttcttaagtgttcagttattaaagttactaaatgtactgaagtatttaggtcaaataaaaaatccctaaatggtacagtcttatcctttaaagtcttgcttgggtttagaaaaggcttttcttgccaggtagaaaggtctaatgtatctctctttaatcttaaaatatgtgagacacttgtatacaaagtaggagaatggttggatggaatattttgataaatggtctggcttgtgtagtagctctgtgaaaccactcgtaaattttttgaatatgctaagttatagcagatacaacaggttgggcactggatatataaagataaactagatatagttcagttttctatgacctcacaccagtgggagtgggaggaagagataggtgtaaatagtcatacttctatttttgtatgacttagtaagttgaatcatctgtcaattactacggagttctattgcaagatgagtcactctgctaggggtaagatgatgtaatactttagtttattcatggaggaagagtatattccaggagaaaaattttgataaagggcattccagttagagaaagcagaatggataaagccttgaaggaagaaaataggatagttagggaacagtaaactcttcggtgtgcttacagccagggctacacagaagtgagcaaagctggtgaagatggggatgggggagtggagtgagttgacgctagaaagggatgtagcaaatgtaactattattccagaatccaagtgtgcaaaaatcataacttttattttgtataacataatttctattttgagtccctcttcagtaaatgtggcaaaaacccaatctcagttattttggggtagctctcacctttccctggggtgtgtcttggaggccaacatagtttcagatgagtgagaaggccaagtgttgttcagcatcatcatctacataggcattccgtcaagctctctcgtcctcctctcttagaagctttgatgtcattctgttccttccgtgtctctctaggtccaaggagattcttggaagctgttctaaagccgtcccttcaactcactacatatttccttttctgaggtcttgctctagggtctgcttaggtggaaggaggcaggcttcttttacctggaccctccagtgcctatgtagtcagcaattctcaactacttattttcttctcagcatgtggaaaatattttttcagtctaaagggtggagcttaatctcatgaaatttaaacaaaatattctgtcatgctcagtttcctctccaaccctcaaaggcataggctttgggaacattttatatatatatatcgtgtaggtttcttcttggcttttattacatatataaatttttttaatgcagcagcagctctctctgaagacagtgactgcacagtgctctagctactgaaatgaggagataggtgtgggggtaaaggaaatatctggtaaatcattgttggtactttaaacatattttctttcatgtgtatattgtggcaagattgcaaaagaactaatatgatgtatcatggatcttgatctttatcctttatgcagtggactgtcattgaaggttatcaatggaagcactatgattatacttttgctttcaaatataaaatctggggacaatatgaagacctaactggggtagaaagattagttacagtagtcttgttacaggagaggtaagaaatgatggggacttgaaccagagcattaactgtgaagagggagaggatttgaatagctctagatatattttggagtcactgaagctgtggaagtggctgaggtcagcctggagcctgcatagagttctgggaaacatcagtgtgtaggaaagagggagagcataaggggtcagtaactgagactaagggagaagcatcagagtggtggaagtaggagaaccaggataatgaggtcctacaaactggtgataaccttcaatgacagtccactgcataaaggatgatggttttattaatgggagttcccctgcatgtgccctcttgactgtcgtcatgtaagacatgcctttgcccctcctttgccttctgccatgattgtgaggcctccccagccatgtggaactatgagtgcattaaacctctttttctttataaattacccagtctcaggtatgtttttatcagcagcatacgaatagactaatatagttacataggtaaatgtgtgtcatggggtttttgtgtagagattatttcatcacccaggtattaagcctagtacccactagttatttttcctgattctctccctccccccaccctccacactccaaaagtctccagtgtgtgttgtttccctctgtgtgtccatgtgttctcatcatttagatcctacttataagtgaaaacgtggtatttggttttctcttcctgtgttagtttgctaaggataatggcctccagccccctccctgtccctgcaaaggacatgatctcattcttttttatggctgcatagtattccatggcatctatgtaccacattttctttatccagtctgtcattgattggcatttaggtttattgcttttgtgaatagtgctacaatgaacatatgcatgcatgtgtctttataatagaattatttatacttctttgttgaatgcccaatttttattttgactggtacactttgaaaggtgaagcacaaataaaaggaacttggtgctagacttgttttctatgtattttgatggctgaagctataggtatggtgtaattggacatacaaacataaaggaggcaattttgaccttgaacaaaattttttactttttgagctatttagaaatgactgtagacttagaagacatcattgctgaagaacatttatttaaattatcttggtttcttatcttaagaattgagaaaactggtagaaacaatgagtagaaaacagatatttagttagacttgaaaactggtcttcatttggtagtgacatactggcaacaattaatactatatagagacatttcctggtaaatacagaagatacataatgtaagctttcccaagattgatttggagaaaaatcctcacctgactattcaatgtcctgtttcatttttgaaaacgtggagcagaagaaatctcacaactgatttaaataaaaattcaatctgaaaaagtttattgttgtattgacataaggcaaagcagtcaagaatccctcttgcatgtttttctaagcttctgcatctctttgtttcttccttaccttctgtcttaccctttaatggagttttctccaggattctgtgcttggcctgctgttttctccctatctgctggcctgtccttatgggtaaggagagatggatttagctatggcctctagcacatgaatcctaaatctttagatctgaactgtctctaaaactggaaagttacggtctgaatacttattggacatcttcaattgaatgtgccaggcactgcaaaacaaaaatgttcaagaccaaactaataatctctcctctgaccagggtagctctttttgctgacttcttatttcccaccatgacactagcattctccaaatgcttaggcttgatgttttgatcatttttaaaatttttactctctctacttatattctatcagttgctaagtcctgtaacttcttcctctataagtctcataagtatttgctttcttttctattctcatttagactctctttccctacatagttatagtagctgaagtcccttagtctctccacattccagttaatcgtatacattgctggtggctaaactctcgtagaacatacttctaattatatcctattttgctcaaaactgtcgaacaactgctggtctgttttcttgcaccatacctgcaggacccagattatctttccagctacataaccacctccctccatccacacaacacacttcctacccctgtcaaaaacaggcttacccattcttcaaacttgccgttgacttttgtccatattgttcactttgctagaaatagtttttcccctcttttccataccagttgaaatcagactcaactgaaacaggccctttcattttaacataactttttgcagtctcgattgtgataatttatcctagaaaatatttactctttgtacatttataacatatgtgtataagtatgtttaacacagcattgcttgtaacagtaaaatattggaaacaagtgaaatagttgcaacattgaaaaaatagatacacacatatatatactgacaggaaaaaatttggccactaaatgtaaactatgactccattgttaaaaaataagtgtgtgtgcttgtgtgtatatacatgcgtacataaaatctgaaaatgtacacacaaaaatgttgaattgtgctcgtgtgtgtatatgtgtctgagtgtgtgtgtgtgtgtctgtgtgttaggggtaaagttatgaaatacttttataatgtactttttatccaaaaatgttagcatttgctaatattgggtgatgagctcactggtgtttattacactgttctttgtatttgatatttttaaataagaataaaactggaaaaatgctaagattttaaatatataccttagtaccaagtactcaatggcatttatcaggacaaaagatttttctttagtgggatcttggagtgatattccaaaaaatattttaattcaaggacactgatatttctgctgacagactacctcttaccaaatgtgggtttcttcttgcaaataaacatcactgagttggtgtatatgtggttgcacacagtcagcagagaagtatttgaatgaatgccataatgcttacacacaattaaaactgagtcagttcgacctatttttatgtaaatcattaaatgaaatgagtttgattcatttttacatgtttatttttaatggagactaaagagacataaatggtatgtttgttttgtggtggtctaggtgatatcaatgatacagggttcttcatgaatctggaggaagacatgaccaggtaattagacattctccttactattgttaagtttttctatattcatcaagttgtagaaatgtttaaaactttgcattatcatcacagaaattttaaggagaacaatactcttgatagtttttagaagagtatatgtagactttttaagaaaagaattggctgcataaagtatacaaaagttagagttaagcttaaaatggacatatatgcattgatcaatgtagaatatcatattaatatataaggaaattagaggagtttaaggtagtcttttaaaatgcagttgaattaagaatcattattttctataatatatatgtgccaggtgtggtggcacatagctacagtcctagctacttgggaggctgatgtgagaggattgcttgagcccaggagttcaaagctgcagtgagctatgatcacatcactgcactccagcctgggggaaagagcaggaccctgtcccccacacccccccacaaaaaaagagagagacagaataattattttcaatggcttataattattaatttgtttcctggatgttttcatacgacatgacaatgaaagcagccaaaagaaattttttttaaactcaacatctgattctgaacaataaaataaaacatcccagaaaaaatacagtctctctattcttaactcacactggggaagcttttggttaatgatttacatatcttgaagtttattctccagaacagcttataacagatgtccaaaggtacgtgtaggtgaatcagaagaaaatgattttacattactgtgtaaatgatctgggtacatttgaaaaaaatagatttttttttttttttttttttgagacagagtgtcactctgtcccccaggctggagtgcagtggtgcgatctcggctcactgcgaccttcgattcctggcttcaagcgattcttgtgtctcagcttcccaagtggctgggattacaggcgtgtgtcactacacccagctaatttttgtatttttagtagagatggggtttcaccatgttacccaggctggccttgaacttctgacctcaggtgatccacccaccttggccttccaaagtgctgggattacgggtgtgagccgccatgccctgccgaaaatggagacactttatcatattttgaaagctgaggaccaaatacctccaaatattcctgtggagaggcattgttttttacattggggaaaatgaaacagaatgtcttttaatcatcatgtacatgcttttgagtaaacatacactgacagtttaaaatacattaacttattctcaaagcatgagttttccttgtgatgtggggtttctattagctatctcttgctatataatgaacacttagatagaatactatctcttgttgtatcatgaacacttagatagtaattagttattgagttatctgttaactaaaacttagtgttctaattacatcttccttgataaatgcattgtaagttacaaggtagagtttggggaaaacttgtttcccaagattcctgatgggctgagtgctgaattgtgaacagcaatgtcagagactgtctgcttgttacctagccatctttatagcttctgcatgattcaaacacacagtttaatttgaagatggtaagtagtgaagtttaaaaagtgggaatattggaatactgtattttattttagaatgtttgcctttaacctaaaaattaattgtttagtgaagcccaagaattgtttgcattttttttttttgagatggagttttactctgtcacccaggttggagtgtagtggcacgatctctgtgcactgcaacttctgccttcaagcgattctcctgcctcagcctcctgagtagctgggattacaggtgtgcaccaccacacccggctaatttttattattattattattattattattgtcgtatttttagtagagacgggatttcaccactttggtcaggctggtctcgaactcctgacttcatgatccgcccaccttggcctcccgaagtgctgggattacaggtgtgaattgtttgcttttctttttttttttttgagatggagtccagctctgtcacccaggctggagtgcagtggcacgatctcggctcccggcaacctctgcttcctgggctcaagcgattcttctgcctcagcctcccaagtaaccaagtagctgggactacagtcgcacgccaccacgcttggctaatttttttgtattttttgtagagacagggtttcatcatattggccagggtggtctccaactcctgaccttgtgatctgtctgcctcggcctcccaaagtgctgggattataggcgtgagccaccacgcctggcctgtttgcttttttaaatatgaaaactcagagcaaggaaacattaattcaggatttctagattgattaagggtctgttttttaagacaatactcgtgttttttaatgctagaatttaaattggaagggccactatttgattcgttaagcattttaggataactcacgatggccagttgggcaaatgaaataaaactactttttaaaaatttcatttgtctcttggcatctaaactctactagattaatagcccaagggataatccctagcccaaaaggccaagggattatttccatttcttgatcccactttctgacaagttctgtcacttcttttcatccccaatgtacagagaccaacccaatgcacttatcaactgatgctgatgtaataaaaatattacagtggtgggtcttacctgatgctgtgattccccaatataccacaccatctttcacagtaactggcattctctgagtgcttactatgtgctgggcactggtccaagtatatttcatgcatgagtatttttatctctgttttactaattagaaaactgaggcttagaaaagttaagcagcttgcctaagattacataacagtgaagtgaagagctgggatttgagccaaagcagaaatcattcttaaccattccaccatattggtgcaaacatagttggatggtgactatcaactctgcttgttacaaccccttcttatttgttaaggatggcgagatacccagataagtgaaaaaataggaatgagtggtctctttggaaaaggtacattgattaggaaacagagagcatgtgcagtgttcttgttgtttttcaggtatgcctattattacagtggaattggtgctggggtgctggttgctgcttacattcaggtttcattttggtgcctggcagctggaagacaaatacacaaaattagaaaacagttttttcatgctataatgcgacaggagataggctggtttgatgtgcacgatgttggggagcttaacacccgacttacagagtaagtatttagttttatgttgaacttgggtgtcgttcttatccttagtaaaatgaaatagatgtcatcacatctgttaggaggtgttaatgtatcattcaaaggtacttatgagacaaaattccttctaagcagcaacaatgtcgtgtgcatccttttgttcccagtgccttgacagggtatggggggacctgcatgactagcattaaatgaaggactgggctttgccagaatgaagaaatcctctgagaatgtgcagtagagcaaaacaagatactttctgaggaaatttctgagcaatttgaaattcctaggttgaatacttcttgtgtacacgatgtccatttcctggggccatgtgggctatggatttttgttgttaatgacaaatatcctagtagaaacttctaccctgctaaataaaacaaagcataggcacaaaatactctagccataaactaccctacactcaaaacaggcttcacgagaaaagttgatgtttacaattctgacaattatttctaacactatctgttctttcagtgatgtctccaagattaatgaaggaattggtgacaaaattggaatgttctttcagtcaatggcaacatttttcactgggtttatagtaggatttacacgtggttggaagctaacccttgtgattttggccatcagtcctgttcttggactgtcagctgctgtctgggcaaaggtaggtgaagcctgtgaatccagattttgaactgcaccttctcccttcctgctctcaccctacggaaaggtctttttactacatgatgactctgattctgtacttgttacttttacgttttctgttcaaaatcagctggataagcatatccagcctcactgagtactacccctgccaagactccatgctgttcttggccatgtgattatttggggaagggatgagaaagaagaatgtagctctcatatctaccttctgcctttgtaagaaaacgagcaagtaaacaaacaaaaacaaaaacaaaacaaaaaaaaaaaacttgaactccaaagaaccatgctctctagtggatgatgccccattcacacggcaagtagagactcaagtttagtgaactacagatgtcccattcaattaacatttttttttactttaatgtttttggctttctagatttttgtttaagttttaaattgattttacagttttgtcagcattcaaacacagttaaatttttggttataaaataatttaagaaaacagatactttctagtccctaaggatgcatataaatccttggccttcagctctctctcctgtcatgaaggcagagaggtagaagtggccctctctaccccagcacacgtttccagtgatcttttaaaacttattttccatttcaaggtgaacatggtgttaattttaaactgatttgatatgagtgtattttcagtagagaaattggcccagtatgtaatttttgtggagttcaacacaactcagataaggcaatataaattcatgtagcaaaagtaatgaatggacaaccaaaaccaagcatcacacaaaataagtcaggtagtaagtattaagaaactgtagaaattttaacctgtataatggatattattttgtttctgcaaataataattatcatttattgagcatttattgtcacgcaaatgcctgtgttatctttctgaagtataggtattatctcactttacagagaaagaaactgaagttctcaggtctctgttaattttttgctcagagtaacatagagttcaaataatgtttctggggattatcagttaactaaaatatttggcaaaagcttcttgtcaattgatttttctgtatactagaatgttaagcaagttaggtggcaaactcttcacatcagtatttgttgaaaaattacttaaaatgttttgatgtctgttttaagattaaaaacagaccatgagttaatcttttaatgattaattatgcattgcttcacatgccatttatttagtaaaaggagccccaggctggctgctagagacctaagctttaatcctcactcagcattacacttttggtatcatttcaaacaaatttcttaaattctttggatgtcaatcatatcaaaaaagaaatgtagttcactctgtgtctgggaagcctctttgtgtctgtgagcctgaggctctaccttcaaacctagagacacagaagcaaatagatatagcagaaagggacccaatcacagcaagtgacctggcccaggaagcctcttttgtactttgtgcccaagactgtcttcccagcgcccagagacactgggccactagagggcattggtacaggaaaccaccacactcttcccgacctggcagtctgatcttgaaaaaccactttcactccctcaagcagcagaagcaggggccagtgggagccccagaagcttcacataaatcaagccgaccaaaataatactacaaacactctgaatattaaaccgctcctggaaccacagctcacaaaagtagaccaatactatcatgctaaacttcaatggaacaactgccggctagagtaaggcaggtttattttattttaactttttaaaacttttattttaagttcaggggtgtaagtgcaggtctgttccataggaaacttgtgtcatgggcatttgttatacagattatttcattacccaagtattaagcctagtacccattagttatttttaatgactgtctccctcctcccactctccaccctctaataggccccagtgtgtgttgttcccctctatgtatccatgtgttctcatcatttagctcccacttataagtgagaacatgcagtatttagttttctgttcctgagttagtttgctaagcataatggcctccagctccatccatgtccctgcaaaggacatgatctcattttttttatggctgcatagtattccatggtgtctatgtaccacattttttttttatccagtctatcattgatgggcatttaggttgattccatccttgttttgtgccagttttcaaggggaatgcttccagcttttgcccattcagtataatgttagctgtaagtttgtcatagatggcttttattattttgaggtgtgttcctttaataccttgtttgttgagagttttgatcatgagtggatgttgcattttattgaaagactttttgcatctattgagataagcaagtgcttttgtttatgtgatgaatcacatttattgatttacatctgttgagccaaacttgcatcctgaggataaagcctacttgatcatggtagataagctttttgatgtgctgctgaattcagtttgccaggattttgctgaggatatttgtatcatatttgttcatcaaggatactggcccaaagtttttttgttgttgtatctctgccaggttttggtatcaggattattctggcctcatagaatgggtcagagaggagtccctccacctaaattttttggaacattttcagtaggaatggtatcagctcttctttttacatttggcagaattcagccatgaattcatctggtcctgggcttttttagggggtggtaagctattattactgcctcaatttcagaactctttattggtctgttcagggattttatttcttcctggttcagtcttgggaggatgtatgtgttcagtaatttatccatttattctagattttctagtttatgtgcacagaagcattcataatattctctgatgggatccttgtgactgaattgttctgcatcatgactgtgttgtgtactaccatgtccagctagtttttaatttttttgtagagatggggtttctatgtgttgcccaggctggtcgtgaactcttggcctcaagtgattctcccacttgtcaccccaaagtcctgggactataggtgtgagtcatcacacctggccttttcatatccttgataataggataggttagagggtctttttttttttttttttcttttcacagacatgatctcctgaaaaacacaacacttaatgaagattcaaccatacttttgtctgcttataatgatggaaggtcatagaaggaaaagggagctagatttgtagaattcattgtggtgtttgatatattaataataaattaaaataacatttttaaacactcctaactttaaagtatttctttaaagtatcactttgaagtgatcttcctatttttggttgtctccattgtggcaattgttgtggcaccatgaggtttcagaaggagcagaaaaacattcctaaagcatgttgtatgagcctcctctattctacagatgtttgttaagggatggcgctggccaccctatctcagacctcctaccgtgaatggttctgcaaatatggtgggacagccccaggaagattgctttgagaagtcaggaatgtctagtgaatcaatggaatattattttgggtactaaagaggctaggtacgtgcagcacaatgtctgcacttagaacataactaatcaatgttcatttgccttcatccacccattcctctagctgtcatagctccttttactttcacacacaggaaagggagaaatccactgtcaaaacccaaacaactttgagctttttatgccaagaagggatagatcaatgttacttacataaatgagtccacaagtgcctatgaattttttattgaaagaatataattctatttaatcagaatttttaaaataaattggttttgtgtaattttgggggaggggtggggagaacagggtctcactctgttgcccaggctggactgcagtggcacaaccactgctcacggcagcctcgtcctcctaggctcaaacgatcctcccacctcagcctcctgagtagctgagacaataggcatgtgccaccacacctagctaatttttaatttttttgtagaggcggggtcttgccatgctgcccaggctggtctagaattcctgggctcaagcaattattcatctttggcatcctaaaatgttaggattacaagtgtgagccaccacacctggcctgtcatgtgtaatctttatttaggtagttgaccacttcagcattctaggtacaataacgttagcccttttcccattgcaattgatccagctttcataataggaccctctgggacccaagttcatgcatcagtggctggtttcagggagaggtttacttcagtggctgttaatacagaccaaaggcaagtaaaagacagattttgctctacacatgcattaatgtataagcagcatttatgtatacatttatttttactttacaaaagataaaattaacgtgtttttttcatgatccaaaattgtatttttaaacagatactatcttcatttactgataaagaactcttagcgtatgcaaaagctggagcagtagctgaagaggtcttggcagcaattagaactgtgattgcatttggaggacaaaagaaagaacttgaaaggtttgagtttcttttttaaatggatagatatgttaaattctgtcttctcaaatgcccttcagattgacagtgttatttataagcattttctcccatatatatgttttcttaaatagcttaatggatgtattacagcataactaatattttggagaagttgcaattctaattgtacttttcttttatctgctaattcaaagagttttctagatgggcaataacataaaaatagtttccaaagactgaaatgtattttatacctctgatttttttcctctatcaagttaattagtgattctctaatattgactgagtattttgtgtaagatctatggggacattttaatccgtggttcattttcctttctgcccctattcagctgacatatgctacatgatttggaagataaaaatataaccaaaaagcacttatgtgtacaaaagttcaaaatcttttatattatgtgttgtttagtattatgcttacaactgttcccttttattagatttctgaaagcatagatggtaatttattgaaatttagaatataaatcagattactgatttctaagcagcaacagattttatgtaaaattgaatataaattataatattctgatgctataacacttcaatcttatgaatataaatatctttgaaggtatgaaaaagtaaactgtattggttaagggggttatacattgtttggtacagccatgaagaaaaccaagggaattttcagaaatcagaataatggttagctctagggaagatgagaagttgtgtaaggagagccgaacacacagcaggggattctgtggttctggcagtgttctgtttcttgatctcaggtatacttacatgagtattcattgcataatttttttaactgtgcatatgtgtttggagtacttttgttctatggtatattcacacatataaatatatgtcttctgagaataatttataatggttaagtgccatagttcaaaggaaagcaatatctatgttccattttgatttttgctaaagtctttgcttttgctttaaaagatgtctggctaataaaatgaggagtcctgcttaatgactgagcaaatattcaatgaaataaatccccggctctcatggagcttaaattctaatgggggtggtaaggttacagacaaccacaaataatcaaataggtaatacaccagttggggtaaatattatttggggaaataaaataagagaatcatgaggatactatttagataagttattcagaaaaatattttctgattagttgatatttgagcagagacataatgaagttttgagtttggaattcttttccagttttcctcagagaaaaggtggaccagaaaaataatatgcccaacagcccaacagcattggaagacagacaaaacttaacagcttcttcctggtttctcagctggaggaaaacatctccccatagaagttagattctcaggcctgactgctatctgcagatggggtctgaatttatactactctgtgaagtaggaaacaatctctctccaaagctgaggatttcacattaaaaatgagtcctaatccagtgataccagagtatctggtagaagaaatacaaaattattgaaaattaaagaactaaacatctaaatcaagaagttagggaaagaaaaataaaatattagaaggaaataataagggtaagagcaaaaattaatttaatagaaaataaaggcaaaagagtggaagattgacatatccataaactaattctttaaaaagacttataaataactattttatatgtttaatcaggaacaaaaaaagaatgaatagggaaaacttgtaacagattaaaaaatctatttttaaattgcagctttataccaataaatttaaaaaccctcatgatatagataatatgctagaaaaatgtaggttaaaactctcacttaagaaggagaagatctgagtaaacccataatcgttaaaataattgaattcaaagttaaaaatctccattttccactgcttctctcccacaagcagaaatcacaaaacaagtctggataattttgtaggcaagttctaccacaacttcaagaaagagataaccctatcttacataaattgttgtagaaaatggaaaaaaaaagttgtgagttcattttatggggctagtgtaactttgatactatattaccaggcagatataatatgagaaaggaaaactaaaggacagtttcacctaaaacatagatgcagaaattataaataaataaataattagctaaataaatccatgtgaaaaataccaaattgaaaacatcctgaacatgttggctttatcctatgaatggaaagatggttttaacattaggaaatctattaatataattaaccatattaatagactaaaagaaaaaatttgttgtgatgtaaggggaaaagcatgaattatatatgattcatgacaaaaactcgtaaaactaggaataagaaacaaccttcttaatatattagagacccgcaggaaacatttagtggtgaaacattaaaaatattttaacacttaaaataatgaatgaaataaatacatactattttgtctgtcaatttaaaaaataaaaaacaaataatgaatgaggcaaatgtgtttactatcatttctatgtactgttgtactagtactagataataagaccaataaaacaaataagagtaagaatgaaaaaaagaaaacgaaaaagaaaaacagtaagtattggaaaataggaagaaaactgtcgttattcacagacgataagattgtctacacagaaattccagtaggttttataagctaacaaaatacaataagatctctgggtacctatcattattcagaataaatggcattcctgtaaaccaggaatgaacaattagaaaatatatagtatttcatccattcagaatgaatccatcatctctgaaatggaaataaacctaacagtcagtgccatcttaaatttgctatggatctggattgaagtccaattctatcaggcaggatttatgtttgcttctgctattcaccaagggcactgctaacctgagaccaccttacattaaattatgtgtctagttgtttttggacaacactggtagtgtgaattcatgctcagacctgcatgagtcctactttgtggtccagattctcagggaggtttttttccttccttcacctggttggtgccaagactgagacatgcaagttctgctgtgtgttgcttaatatactgaggtatagccctttgagtcctagctgcatatggaatgttctattaaactcatttcttaatgctttataaaatgacagaataccagtacttgctacaattaaagacatcttaaatttgaggaactgacaatatttttaaggacattattagcaacaaaaactataatgatggatggaataaaacctgagaaggaggaaatggacattgtgggagtgaagcccaacatttgtaacttagataaatctgatattttagttcactgaaagtttaaagggattcagatttaatggagtgctttaattagttagatatgaaaatatttttcctagcaaaaatgatcaaattttaattagaagaataaacaaatggacttacacagctatatccagagattcctatatttgctctaagtagtattttacatgtggaatcatttcttcagaaaatataagttacttgaatgtatctttgaaagggcagtctccttcagagaactgaaactaattttgcttggagatcaagaattgacgtaagactacaaactgatggcctaatgtccttcccaagttggccatttctttaaagtttatttatttgacaaatttattcagcacctacaacatgccaggcactgtgctaggttctaggttttccttttcttttcttttttattttataaagttctaaacaaagctagggctctaggttttcagctgtgaatcagaaacagaggttattttgtgatcttcagtcaaaatagtaaaatggataaaaatggaaggaatggagaaagggaggaagaaatataaggaatcgtcaaagaaaaaaataaaaatattgatttaaaaatgtgatctgaaagaatcaaagagtgtgaggatgatgaatggtcaagttaactttaaatacggtggttggggcaggcctctttgaggaggtttcatctcagctgagacctgagggatgagaaaaagcaagccatggtgggaacagagatgggatgggtttgaagaagagtcttccaagtttcctggggtggccaagaatttagtatgttctaggaaacgtcataaggcttgcatgactgaagctcagttgaatgaggggagattggggtgggcaggggccagaatgtggggatgatgggccatgatgaagagttaggattgtattctaagggcacaggggagtggttgagggtgttaaaaagaggaatgactatccacgttatgttttcagattgtttgtctgtaatgggtctcatgaatggatgcgagaagtcaaagggtggaagcagggagaccagtggggaggccggcagaatggtccaggccagagcatctccctgatctggagcagaggcaggagaggggtgacaggtacctagatttgggatataacttgaaagtagaattgatgactattcttagaccagacataatcagttttctttcctgttcttctccttcccttctctgcttctacataaagtaattgaggtcttaatctggctttctcttcaaattagcagtgcaggagggaagctggctctctttgaatggaaatttaaccagaagttaaaataaattccattcaatcgtatagaatagttttgttccttttcacttaaaaatatttttctctcttttatgtgccttgaaaatatatttatctattaatatttatttctgttggcttaaccaaaattgttccttattcttaaagtagttacttgcattattgataaatattttcacaatatttaagaagagtcatatttcctacataccaatggttttgttatataactttagtctcttttagtcattcctactttcatgaccatttctgtactaaagcctttgatgaatggatgattttaatatctagttttatgtatggcatttgtatggaaaaacaacaaagagcttatggaaaaggagtattgtttatatctcatttccctttgcccccttctttcctttatttctcctttctgatgtctaaatgattttcttccttgtgcttctgtgcaaatgtttcctctggctgcataggacaacatcagactggtttctacgttagtcttggtaagcgagaactgaaataaaggagataacagagtatagtacatatgtattaaatgtccttaaatatattcttatgtaagttatgcccagtggtagcttttacctcagatcaactcataaagtgagagatatgtatgtgtctgtgtgttgtgtgtgtgtgcatatgtgtatataaataattgaaacgtttctcaaaaataatttttctgttcagatgataactggcaagttgaggatttacattttggggggtagaaactaatgatgtgttgctatgttgtcactatgaagttctgtttaaatttcatctttagtgaacacggtagtgatgtaaatttcacttggcatgcttttgtaactctgtaatgtacctagttaaagtagtcatgaaagcaagaaacaatgcatgttcatatctggacagtgcttgagctctgctgtacatgctaatggaacaagttctccaaaggaaattaatataatgctatataatatttatatagttgtgaatttatggatcaaagaccttaaagtatgacttttatatggaagtaagttcatgaatttcaacaattattagctcctcctctatccaaggcaatgctctaggttctgcagggagttgcgattaagaaaatacagacagatttaaggcaatctgtcctgtttctctaatccttttaccttggttctacatttgcaaaattccttatttttctttaactctgggctccattagcttatctccatagctatcctcttaaacagagtagtcttctctgttcctttcaaatgaaggtcgagttatagacatcatctcctttaactttaccgtcaaaaattgaccaccctctgagggtttaaaaaatatttgaattatcagttgggaataacctgtaagtcattagaactgcagaaataaaatctgtcagtgactccaacattgtttttcgattttttttcatttgctcatttttgccccttttgtacaatttcctatatttgctctaagaagtattaatgggtcctcaccaggtttggttaatgtagggtaggcctttgtgctatgaatgggttcagggctatagatatgctaataatttaatttttctcagcccttgagttagtcagaagccgtggatggcccaagccaccaggtcagatcctgttagttcagcagctggcagctatggcatgacaagtgttgggagcattaatagagggaaggacacatagtcaatatgtagaaaggagaaggaagagagggaatgctgatgaataatgatgtgcttttataaacctgtaagccaaataatttttgtaggtcagtgatttttaaaataaatgtctacggaagtaagataaattgtacagcttatttaaatgtaaaaagtattacatggcaattcagaactctcaaaatgctctcacacatgtaacctctcagttggtcattccgacagtcctagaggaaggcaggacagagagcaaactgtctccaaacttccttaatgttcagagatttaaatgactgtcccttttttttttttttagtactttctaacattatctctccattttattaattaaagaggcatgcagattttgaaggaaagacacaggttttttccatggcttttactttgtcttgtgtatgaaacaatgtaagttttagaagtttgctaaatattgcttcacttatttgctattgctaaagccagagaaggaaattttagaagactcccccacaaataagttaatctctataaatgtcagtttcttcttctgcaaaaagggagtaaaacagtactactatatagggtcaatgtatgagcagcaggacaaaatgcatgtatatcacaggactgaacacatcctagccactctgtaactatcatgctatatcgacatgttttcataaaatgtatatgtgatcatttttgttctttttctcaggtacaacaaaaatttagaagaagctaaaagaattgggataaagaaagctattacagccaatatttctataggtgctgctttcctgctgatctatgcatcttatgctctggccttctggtatgggaccaccttggtcctctcaggggaatattctattggacaagtactcactgtaagtggtttacattgagaaatgaaccattattataaaatgccaatgaaatccagtaatgttggcttgactttagaagaatatattttgaacaactgttgaatactacagacatatgcactactaggttaaaaagtggaaggccaggcacggtggctcacacctgtaatcccagcactttgggaggccgaggcaggcagatcacgaggtcaggagatcgagaccatcctggctaacatggtgaaaccccgtctctacaaaaaatacaaaaaattagccgggcgtggtggcgggcgcctgtagtcccagctactcaggaggctgaggcaagagaatggcgttaacccgggaggcggagcttgcagtgacctgagattgcgccactgcaccgcagcctgggtgacacagcaagactgtctcaaaaaaaaaaaaaaaaaaaaaaagtggaaaaaaattagatgcatccgacaaccagttttttcttttatttgcttgtttgtttttgcagatatcttgcacaatttatcctgtagcctaaataatattaacgttagcaatctcaatagcatgaacttttatttgttgagattatttgtgccaaacttgttgctaaacacttcacttttattttctgatttactattcacaaaaatggcaaaatacacattttgacttcttttcaaattatttcgaatggcagctaatccacctcacaaattatggaagtataaattgttcctcttcctaaaagattgtttggaagttttctgcattatagacctttgtgcaagcacagaagtcttgccatttaatgttatcctcttttattttaaagacaatgaaataatttgcaaaccaaactcaattcatatctggatctaataaaatacactgttagaagagtcacttagttcctttttcgtaggccaagcagaaatagattgaggcaatgagagatgatattttgtagaatcccttaaaacaattccctttttcaggagccagatttgtaatatggattcaataatcacttctttttctttttttttcaaatttgccttatccaacattgctcagtggggaatggcttttcccatgaagttttttttttttagtatagtgatgctgtgggtgatccttggttgtcataacagatgttttctgtttaactgtgattgagataagcagtttaaatccagtgttcactgggcatgaatatacttcacacactggaggcatccaaaatagggagtgtggggtttgatatcggaccaacttgattcaaatggcagctttgtcacttattagctgtatgatttagggcagccagctaaacttttcaagcctctgctacctcttctgccaaatgatatgacaggaatgaaccctaactttcagcgtgttttgaggactaactgagataatgaatatagaatcacttagcaaagttccttctgtgtaaattattgagcaatataattccatgtgatttagaaaaaatgaataatgacattaattctcatcaaccccaaagagaaacacagttaagtctttaccaataagaaactgatttgcacaaaacaaaaaaacaaaaggcctaaagagaacacggccttgtggcaaaaaagacaacctgataaaggatcagtgtcttaggtgtgtgtgctttataattaacaaaaaatgttcatatacactgttttatcatgatacaacatctctatgattgctgggtagggagaacagatagaatcttgcctgtttttgccaatgaagaaattgaagccaaagattctaagagaatggcctaacaacatataactagttattactaatttaggattcagaactgggtcttctgactcctctgctagcatttatttccactttaccttactgatgatctaaataaaaaaaaaactagacattgaagaaatataaaaatatcctattataatattctagccctgtgaaatttaaatcattgtttattgagcaagtaagactaattctgcattctaaattgaaaagtatttatatttccaaaatatttttagtatgggcaacatagtgagatctcatctctataatttttttttttaattagccagatatggtggcacttgtctgtagtcccagctacttcggagactgaggtgagagggttgtctgaacccagaggttgaagttgcagtgagccaagattgcaccactgcagtccaggctgggcaacaaagcaagaccttgtcttaaaatttttttaaaaaaattttatgctatttttaattgacaaatcataattgcattacacttacggaatacaatgtgatgtttatgtatacacacacatacacacaaaatgtggagtgatcagagcaagctaattaacatatctatctcctcacttgacaccttttgaggtgacacatttgaaatttactcttggctgggtgtggtggcccatgcctgtgatcccagcacttttgcaggctgaggcaggaggattgcttgaggccaggagaccaggctgggacacgtagcgagaccctgtctctagaaaaaataaaaaaaattagtcaggtgtgatggtgcatgcttgtagtcctagctacttgggagactgaggcaggaggattgcttgagcccaggaggtagaggttatgacgagctatgattgcaccactgcactccatcctgggtgacagaatgagaacctgtctcttaaaaaggaaaaaaaatgaaaaaaggaattaaatgtactgttagttacaaacttttaaaatatttttaacacctagtatttatatgttgcctcgccattttaaattttaattacctatgttagaaaaagacagaagaagtatgaaaaaaaattgctgtcactatctcagtagcctgatggtttttcttcacattcctcaggtattcttttctgtattaattggggcttttagtgttggacaggcatctccaagcattgaagcatttgcaaatgcaagaggagcagcttatgaaatcttcaagataattgataatgtaagtctgagttggccatctatccacctatctaaaagattgtccagttaagtcaatttctttgtcactttatccagctctccacaaaatatcactaaaagtagttattgtaacctagtaatctcttaaaatttgattctgtttagaagccaagtattgacagctattcgaagagtgggcacaaaccagataatattaagggaaatttggaattcagaaatgttcacttcagttacccatctcgaaaagaagttaaggtacagtgataaatgattaatcaacaattaatctattgaatgaagagtttctgatgttttcttgtagagattataaaaaagtgcatgtatatttaaacctagtgaacagtcagttcctatatcctgtgtctgtgaattgccttgaagtttttttctcactcgtcctggtagatcttgaagggtctgaacctgaaggtgcagagtgggcagacggtggccctggttggaaacagtggctgtgggaagagcacaacagtccagctgatgcagaggctctatgaccccacagaggggatggtgagatgacccatgcgagctagaccctgcggtgatcagcagtcacattgcacatctttctgatgttgccctttcaattacaaatgtatgaaagtcacacttactttttattccaggtcagtgttgatggacaggatattaggaccataaatgtaaggtttctacgggaaatcattggtgtggtgagtcaggaacctgtattgtttgccaccacgatagctgaaaacattcgctatggccgtgaaaatgtcaccatggatgagattgagaaagctgtcaaggaagccaatgcctatgactttatcatgaaactgcctcatgtaagttgtccttgccctttgcctttctagaggtgcaaaaaataaaatgcaggcctactatgcaggaagttaggaaactactataaatcggaagaagggaaatcctaagaagggaaagtaagattacttcagatttgaaagctctagcagtatcaactggtcgtagatacatttttaaaaactgaggttggttattgtgttaaataagatttaaagaactggacctgtattacttgtgagacttgggctgtgtataggattccttaccaatttaaaatatgagctgagatagcttgtccttatgctaaatcattctgggttttctgtggtagaaatttgacaccctggttggagagagaggggcccagttgagtggtgggcagaagcagaggatcgccattgcacgtgccctggttcgcaaccccaagatcctcctgctggatgaggccacgtcagccttggacacagaaagcgaagcagtggttcaggtggctctggataaggtcagtgaggcttagttcaaaccaacctgatttataagcataagaacattctactactaattcttgttaatattggtcttagaaaaggaaatttctgatagcttctaggtgattccttcagctattaaaataaaagcattgggcctctttgaaatctttttctatttgtttgttttattgttcaatttctatttatttctctgatcttattttaaatgttgatgaatacattttcatttgaagacacttgctaatcttttaaattaaaaaatagaaatatagacacatgtgaaagttcatcttcattgtgatcttcaaaacttgactatgtggataaccctgttatttaggttttgagagtttgtaatattgccaagaagagaaaaatacaacctgaaggtccatatataattttccaggtgttgaatgccacttgaagactctatgcgaaataagaaacctcttatttccaggaaaggggcagatagcctgtgatactgaaaacctacctaagccatgacaggttattgactatcaacagagtttgactgtcctgcaattctggagtccatatgactcattcaccaaatagcatttgagtgtttgccgtgtgccgggcactgtgcctttgatctccagcacgtgatagtaacggggataattctgtgaggaccgagaatgtggagatggagacattataaccaaaggtgttccaagttgagatgtcacagtagaattcaaagatgaactcatatttgtttcaactctccctgtctctaataaaacaacacttgaatgttccttaacatcctgtcaatgtgcttaataaatttttgagagagaaaaaaagcagcttactaaacattctgtgaaccaaaatagaggccgatgggattctggttactatttttcccctcattttgcttaatctgtgatttcatctctgtgtttttctttttctttctttatttccttccttccttccttccctccctccctcaatccctccctctcttgctcttcctcttcctttcctttctttcctttcctttcctgaccttcccttcctttcatttcctttcccttcccttccctttctttcccttcccttcccttcctttcccttcccttcccttcctttcccttcccttcccttcctttcccttcccttcccttcctttccctccccttcccttccctccccttcccttccctccccttccctcccctcccatcccctcccctcccttttcttttcttttttctcttctcttctcttcctctcctctcctgtcttttcttttcttatcttatcttatcttttcttttcttgtttcttttctcactctgtcaccaggctgaagtgcagttgtgccatcatggccactacaacctctgctgcccagtctcaagtgatcctcccacctcagcctcacaagtagctgggaccacaggtgtgtgccaccatgccaaggttttttttttttttttttttttgagatggagtctcgctctgtcgcccaggctggagtgcagtgggacaatcttggctcactgcaacctctgcctcctgcctcagcctcctgagtagctaggattacaggcatgcaccgccacacctggctaatttttgtatttttagtaaagacagggtttcgtcatgtggcccacgctggtcttgaactcctgacctcaggtgatccacctgcctcggcctcccaaagtgctgggattacacgcgtgagctaccgtgcccagcccccagctattttttgatatatttgtagagatgaggtctcactatcttgccccgactggtctcagactcctgggctcaagcaatcctcccgcctcagcctcccaaagtgctggaattacaggagtgagccactgcttactggtttgcttatctgtgtttccttattaatctatagtgaaactatgtattaaattataaataaaaacaattttaaaaggttatattttaaaatactttagggtgtaaattttgaggggaaattccacataccccttttttcttaaaaagatacaaaaattgatctattttcttctgtattttctagtttctaccacctaatttttccttgtgtattttttctttttgaagttttccacttctacttatcctatggatcctgaaaatgttgtgtgttggttttgagaattgtattgctagttattagagagacatatagagtaacaaaaattatgagcattgggaaagttacaaaggttagagaagtctcagacaaggcctggatatctggctctgttcctttatgaaaataaaagagacttacgtgactcttcaatttttccataattcttcaacctaggaataagtatcactaactatggataaggcacagtgttgagtactttatgtgctttattttatttagtcatcacaactactctaagaagtaaatactattattatccccattttacatatgaataaattgagtctcacacagtttccttggataaaatattttattggataaaataaattcataaatttatttcaggtcagtgtgacattgaggtctggactttgctgcctcacatttattgtctgtcttgttcatccagggggtcatgcgggataggatattataattcctagggctgattactagccggtgtgtatcagtacagcacaatggcctgtgtttgttttgattggccaacgcctggtctgtaggaatttgttggtttgtacaagcccctgattattattatttttttattttttattttttttttttgagatggagtctcactctgtcacccaggctggagtgcagtggtgcgatcttggctcactgcaagctccacctcccaagtagcggggactacaggcacccgccaccatgcccagctaattttttgtatttttagtagagatggggtttcactgtgttagccaggatggtcttgatctcctgaccttgtgatccacccaccttggcctcccaaagtgctgggattacaggcgtgagccaccacgcccggcccaagcccctgattattactgcaaatttaggttaaataaaatatttgggggcttacataatattaatatgtgactgttatatttgtgtttgtatttattacaaggaaacatcatttttaactattatcaattgtctatacatttattgaagtcagaggctatcttatatagatttgatggttttacaatgcccacagcattggttcagtaaatatatgttgaatggttaagtttcttcaggtaattgttaatgtattcaaaaaccaaatttctctctctttaggccagaaaaggtcggaccaccattgtgatagctcatcgtttgtctacagttcgtaatgctgacgtcatcgctggtttcgatgatggagtcattgtggagaaaggaaatcatgatgaactcatgaaagagaaaggcatttacttcaaacttgtcacaatgcaggtatagtttaacttcagaattttcctaagtcatctcagtgataaactgattttgcatttaatgctaaaaataaatattatttgatttgattaccttacaaagtaggaaacaacacctgggggattcaggatgagaccagtgtttaagattttttttctctcttgaaagaggggaaaataaagaaggataaacagataaaaaaattaaaaggtttcaaggtgagttatccgttatagtagtcagtagccacatgtgtctgtacagcatttaaatggtagtgaatctgaattggaatgttttaagtagagtgtgcacatcttgttctgaagacttagtacaaaaaatgcaaaatatctcaatttttatattgattacatgttgaaacgatatcatgggatatcaataatatattggatatattaggtgaaataaaatatataactaaaattaatttcacttctttctttttacatttgttaacatggcttctagaaaatttaaaataacatggctcatagcatggcttgtgccatatttctgttgaaagcactgatccagagtaaacttgattgagtcaaaacacccacaaaaaatggcgtgagaagataagatacatggaatgaatgccagattatttcagtatatgcagtgggaattcttctttggtggttttcgttttcaaatatcacacacacacacagacacacacagacacacataaaacaacacagcagattagctttatccttttctgcagttactaaacaaattgctgttttccttgatagctgacattcagtgattagctttcattggttaacacacagcctaatgagcttttgcatatttcttatttattttagacagcaggaaatgaagttgaattagaaaatgcagctgatgaatccaaaagtgaaattgatgccttggaaatgtcttcaaatgattcaagatccagtctaataagaaaaagatcaactcgtaggagtgtccgtggatcacaagcccaagacagaaagcttagtaccaaagaggctctggtatgaagggagatgcggagtttgttttaatctcactaactgtggttccctagtttggtgggctagggctacagtaggagtgggaacaagagaggttatccagaatcctcctgtcctatcccccagaatgtcaacattttagaatcaggttagaatttaaaagtattaatttacacagcagaatttttagaattaaaatttatagtgtaaagagactatagcgggtcttcaaatatcaaaatttccattctgtttactcctgcttataaatactcttgtcaggttctgagtaccaaataaaagtaagtgtttgtggaaacatcatttattttttaaaaaataaaggagtattgtagcaaaatttgtcaacatttttttgaagctaaataataatcactatgacattttttaaagcaaaattgtcatcacttattcattgataaggaataaggataggatatattcctttactaatttttgtgcgtatgtaagaattgtacatataaaagtttttaactagcctgttgtaataatttgtgttttctaggatgaaagtatacctccagtttccttttggaggattatgaagctaaatttaactgaatggccttattttgttgttggtgtattttgtgccattataaatggaggcctgcaaccagcatttgcaataatattttcaaagattataggggtaagtgtgatgcccatttgtgtgatttacttgtgaatcctgatggaagaatgaacgaataaagtgcttgtgtctgaactgggatacaaaaacaacaaaatccacgtatctccatatgaaactaattggcttgaagatgtaagaatagcagtctggtttgtgataggagagctaactttgtgaaccttcctttgtcatcacagttggtttctaacctgggcaactaaagaccagcttcctgaaatagtcaatgaaagtgatgagatgactttctcatacctgccaacatttggctctgaacaaatcttgtgaactttcatttcaccaatgtgcaaagagagttcctcaaatgtttgtcaggctggcttgagaatgcactgttctctaacatacatactttccaggatgtgagtaagcctagcatgcttcttttgtaagatgtaattttcatcccacttgctaagattaaaacaaataggaacggcttcctaaagattgaggttgacatgtgttagttccacctcatcttaatggtggcattttcaacagtaaagttacaatctgaaaggaatgctctctgtttagtgacatatgtccaaacatcaagctgaggacacccttgccataactgctgaaaacattgtggagaaagagattgatcaccacaagaagcataagctaaacactgacttttgattctacaaaatatatatgactattcaggtctactcatgcctggttagcttatttcagtttaatatattcattcatgaattcatgtttaatgacattcatgcttaatattaaatatatttattcaagaattgttattattttttgagtctcgctcactctcgcccaggctagagtgcagtggtgcgaactcggctcactgcagcctctgcctcctgggttcaagcgattctcctgcctcagcctcctgtgtagctgggattataggcctgcaccaccatgcctggctaatttttgtatttttagtagagataggacttcaccatgttggccagggtggtcttgaactcctaacctcaagtaatccacctactggcatgagctgccatgcctggcctctagaattattttttgtgtctgctctgtgccaggtatttttctagttgttgaaaaaattccgagaatgtgatcaaatgtctgattctgtagagtatatggtccagggcaggagtcagcaaactttttctattaacagtaagatggtaaatattttaggctttgcatgccacatgatttctgttgcagatactcaactctgacctagtagtacacaacagcaatgtggaaatgaatgaacacgactgtgttccattaaaactttatataaacatttggccagtggcccatagtttgctgattcttgcactaacatgtgtcttgcaggttttgggggttggcgggggtagactgtggtgtcatcagagaaaaaaaaaaaaaggaaatggttaagttaggaatgggtttggttgtaacaaaacctcaacttatgattttatacttttctcattcttcatatgacaataagtctggaggtaagtgacccagggctgggatattagctcttagatattgagtaggcaaccagacatctgcctcattgaagatagtgggctctgcatcggattgcctggatttatatccttgagtcatcccttgctggctgtgttaacttgagcaaattaattaccttctctgtacttcagtttctatctgtgtaaaaccgtgatgataataaatcatacttctggagatagttgccaggattagaggaatagtatatatgaatttgcttagaataatgcctggcatagagtaagaatttggtaattgttatgatttttgttggactgactagtcaaaaaaaattatttaatctcttcaaaaatccttgttgttgttgttatttgtttgtttttttatgaaggataaagttgtctgtcctgggctaggaatgttactatcttacaagactgattttggcccactgtgaagggagatacgtgttttctttccctgaggaatggttatcctctgtgttccttgagtccaaaacatcctattagcccttataactatctctggaaaaaatttcaggtatggtgctaggtcaggtagctgtagtttccaactggctctcttaactggccatcctaccaagaaggcaggctcaaggaaattcctttctttttgaaaggcctgggctgagtgaatgaccaccactctgtggttcaccaaaaaaccacatcaggttttccccagacaccttgggacagtttgaaatgtccaaatagtaaagcaatgaactgccataaatgtagttccccaccaagggaagaggagagtatttgttctgatttcaactttacacagttgaggtggcactcatgactccaagagggaatccgaacagaaaaaatactggatcaatttatgaatgatagacctatccttggcctccacagaagggagaatgcagacacctttaaggctggcaataggaaagccaaccccaatttccagcgtactaaggctctcctgacccctgaatactgggccagatgggaaatgggtcaggtccaggatgggttcttcactgattgaactaaaaatcctttaaatgttttctcacaggtttttacaagaattgatgatcctgaaacaaaacgacagaatagtaacttgttttcactattgtttctagcccttggaattatttcttttattacatttttccttcaggtaaatgtttccattttcactatattcattttgagaaatgcatcattattcaactggggggatttataaacatcagtgtaattggccttttagtagaacttctctattaacatggctactaacagccaagtttttctgacatagtgaaaaaagatgtttgcctcctctggctcccttgcttaccttctcctctccacccttacctcccgcaatgaaaccagggggaacagagtatttggcctgatatgatgattggaggtgaaaggcagggacttcaaaatggggtgtgggggagccctggatgtaagtttggatataagtattgccagtaaatgtaaatactcaaagaaatgtcttcccgtgttctaaaagcaacaacaaacaaacaaaaccccataagcgggtcacatgggtttaaaaagggtttgaagagtttatcgttcaacttttgttcaaggagaaagaatcatttcagtgatggaagaatgtcaatcctccaacaaaaaatgtaggaaacatttgtaaagagtcagatttttacagcttgcaaatcatttggctgaaatgaaatggcaaggaattaagtactctaaaagtttagtatgagggccaggtgtggtggcttatgcctgtaatcccagcactttgggaggccgaggtgagtggatcacctgaggtcaggagtttgagaccagactggccaacatggcggaactctgtctccgctaaaaatacaaaaattaacagggcgtggtgatccacacctgtagtctcagctactcagtaggctgaagcaggaaatgtctcaggaacccaggaggccaggaggaggaggttgctgtgagccatgatcgtgccactgcactccagcctgggcaacagagtgagtccctgtctctaaataaataaataaataaataaatactgtttggtatggcaagacagtattggttttggttcaagtgctccttgtacctgtttctgattttgtgtccttgggcacataagtaaactgtctaagcctctgtttccttagcggtaaactagggatgcaggtacctgcctcttgatgattaaaaggatcatgtgaccaagtgctcaggcctgcatgaggcagtagtaggtaatcacttattaattgaatgattagccacctgtaatttttaaagataaaactgtgactagatctctttatttaacatgtaagcatgtattacatttttaaaaaatagaatatttttctggacattataagaggtgcaaaagaaaaaacagactgaattctttctttactgagtacttacagcctcactggggaatttgaccttactagaataaatgtgacactctaactacttataggattgccataccaactattaataccacaggtgtttggaggaggtaaagattgctcaatgtaaatttggttaagaaagttggagtgaggtgggctttgagctggtcccttaaatgttgacgatttgaattggtgaagcaaaagaagttagaggactaccttcataacatggtgcttggggggactggaacctagcttgcctagaaaacaggtgagaacaaagtctatgagttataggaccttagaagtctagagatagcaaaatgcctaaagatgttagaccacccaactcctcatcttagtaacatggggagggagtccagtgggtaattaaaagctcaggctctggattcccattctggttaggattctcatgcatctggattaagattccaactctgtgaccttataactgtgggctatggatcttatcaggctctctaagcctcagtttcttctgtaaagtgggcttttctgtctacaccacccgtacagccttgtgccatggcacacagtcacagaaacatagcaagcccttgaaatcaggctttctgactttgtctgatctcctgctttagcaaagacatcaattctccctccttttatttaaatggtggctgggtccctgacaaggtatgttcctgcccacagggtttcacatttggcaaagctggagagatcctcaccaagcggctccgatacatggttttccgatccatgctcagacaggtatgtctatcgagggctgtgccctgggatgtgtagaactccccatgtgtgccccttggactcagacagtgggagctctgtcatgtttcccaggcctagctcctatattggttgtccctcagtctcacgtcagagatgcggttgaaccgcccactaggcacagatgaggctctactgtctgtcaggtctgggtgggcacaaggaactggaccagtttgagacagagcctccagcgtggattcacctccagcctgtgtctcagcagtggtgggcagtgcaggcagaaggcatctttgatacccctcatccctttcctctctttccttctttctcctggcaaacccagggcacgagtgtttcttcccaccaagagatgccctctgtactctttctttccgcaaatcaaaactcatccctgtgtcctgttcttcactgcccattttcttttctgaggctagtctgaaatactagttcaagctgcagtgttactggctgataatgggtttaatggaatgcttctcacattttgcagcttcaaaaccctaaccattgacacgtgtgaatgttttcctggggaaatggggaaggaaattagaggaatgtaactcagagcagcctggttcaaaggggaaagttcctttaacaatcatgaaaattttgtatgtgacctaataactttccgttttaaaaatcactaatcacttgccattgagtaaaatgatgctttagaagtctgccccagatgtgccaggggtactcgaaccctggctaagaggcatcagtttggtgtgttaggctttctagagggcattcacattttaccagctgtctctggttcctcagttcttccccattcctcccatcaccatttagaaagaaaatgtatttatgggaattgctagctagtgactgacagagccaggactgaatctaagtgagagagcacagtttgatgggaaaccctgtccttggactgtcaggtcgaactgtatttataagtcagattccacttaggtctacactgaccttgctccagggccaaatttcccattacccaaccagcctccaggccaactgctgtgcccattatactttggcagctgagctgatggtttgtggaatgtctcctccataaattgttaagtagggcaagcatttattaagtgccttctgcttacaaggtctagtacttagtattgtaaggcattcaaacctgaatggtccctgtgttcaaggaagttacattcctgtgtggagacacttttaaccacttaagaatattgaaaagcaagttgatacatactataataaattatagcactattttttcttaaatatttttgggaaaaatgatagatacttctttaatgtaaataaccagtttagataacttcttagggaccacagttatttgtaaaacatataaattcatacttcaaattcacaatcatgttagtatctgtgtatttaaaaatataaatggttttacaaagaaaatcttattttatgttgaatgttatattttaatctggattacttttgctgatttgtttttgactcaaatcacttatactgccctgagctacatttatctaactgcttattcaacctctctattggatgtctaataagagtttcactgtttaacatttccaaaatggagcttttgactcttcccctccccaccagccttattccttacccactcttcccctatatcagtaagcgacagctccgttctactagttgtttgggctaaaaaccttgaagccatctttgactcttctctttctgttaacattgcaaaagcttcctaactgatctccctacctccatttttatcccaatcctgtagattcacctaaaaacagccacagtcatttttctaaaatagaaatcaaatcatatcccactgcccaaacctgctgaaggctgcctgtagctcacagggtaaagtctggaatcttgacagtcgcctgtaagaccatacactatgtggcccccactctctctcaaatctcatctcctataaccgcctttttccaatacaccgtctactccataaacagtggctcactgcccaagagtaggggaggggaggatcagaggagccaaatcagaacacaaatctgtccagaggaagggggtggcttttacaaattcatacaaaggttctttttaggctgctggcagcctttaaggctttcttgctggtgtatgaacagattaggtatgcctttgcctcagggtctttgcacatgctgtttctgctttccctgaggtattctcatcctttccttcattcaggcctctgttcagatgtccccttagaaaggccttctgtttcccctccccagtctctaaaatagcacctcccctcacttttctgttcttcttaccctgctcaatttttcttttatttgtaccttccatctctagaatctaaacttcatgaaagcagctactttgtcttttttgttcgtacaggtccaacacttagaaatcatgcgtaggagaaagtaggcactcagaaatttttctgacaaatgaaatgatctatttatgtgtttttatattaagtttctttcttgtgtattgaatgtcacatcctgagtactaaatgcagggggtataagtataaacaaaactgaccccatcgctgccctcttggagctgagagtctcataaacagctttaaggtaataaaatcattttctgtgccacaggatgtgagttggtttgatgaccctaaaaacaccactggagcattgactaccaggctcgccaatgatgctgctcaagttaaaggggtacgtgcctcctttctactggtgtttgtcttaattggccattttggaccccagcatgaaactaattttctccttacgggtgttagttatcatcattaagaaaatgttgaataaatatctaacctacgaatatatcacatgctttttgtagcaacatgttaactatttaaacattatatactgtagagcatatagataacttataaaccatttgctattgctgttattcatgctattaacaagatgcatgtagaatagttatttagaaaagagagtataaagtgctcaatcaacataaaacagtaattgctactgaagaaaggatgtatttaattgctgtaagaaagtttagagtcactatggttacagaagggagggaagacaatcctctaaaatataggttgaaggaaatgaaaagcacattaaaaaattaaggcaagaatagaataacttcagtctttatctttaataactttaaactttaataattttaataacttaaattttgctactgtatgaatctcttgatataactagatactattgaaccagcaggttttgatttttggctgaagtgacaatttcttctacaactgtttatggcaaaagtccacaaaatgatgtagaatttgaaaaaattcatgtaatctctggtgtgtcttttcccctcttgaaccttatccatctttatctttaaatcttttctgtaagttagtactatactaacatttcttctatctaatatatggggcttctttaagaataaattaagctataaatgaggaaatacatagagttataacgttgaaatataaaccttaggagtccctctttttctattgtttggaatagtttcagaaggcatagtaccagctcctcttagtaattgttgttttaatacaaacttctttgcctaaagcaaacaaaacaataaaaacaaggtttagatcaagttgtatagaatgtaattacaggtgcacgcctgtaatcccagctactcgggaggctgaggtacgagaattacttgaactcaggaggtggaggttgcagagctgagattgcaccactgcactccagcctgggtgacaaagcaagactatgtctcaaaaaaaaaaaaaatgcaaagaagacagagtggctggaataaagtgagtgaaaagaagagtcataagtgtgttaaggtcagcattatatccagaagtagatggaaaaccactgtagggttttgaacacagaagtgacatgatctgaaattttgaaaggatcactatagaaactgtgtgaataggccgaagggggcaagcatagaaggagtctgttgcagtaatccaggaggagatgatagtgttttagactaatttggttatacaaaaggctataagatataattaattctggatatattttagatgtacagccaacaatgtgttggttggataagatgatggatatgagagaaagggtatttaaagatgactccaaattcttttacctgcacagtggaaaaaaaaatggagtttttttttttttttttttttttaaagagacagggtctctctttgtagcccaggccagactgcagtggcatgattacagctcactataacctagaactcatgggctcaagcaatcctcccttctcagccttcctggtagctgggaccacaggtgtgcaccaccatgtcgagctaatttttaaattttttgtagagacagggtctccctatgttgcccagtctggtcttgaactcctgggctcaagtgatcctccctgcctcagcctcccaaagtgttgagattacaggtgtgagctgccatgcccagctggagttgatctttatgaaattcagaagcctgttggagaagcaggcttgggggagaatggagagttctgtatgagacatggtaagtttgtgacgtctgtattagacatccatatgtagatgtcaagaaggctgaaatttgcactgctaactttagtaaaccttttttataattggtttactaaataagttttactatgcttctccattcattttggtcctcacaactctatagactcctactctgtaggaggaatatacatgagacagtgagcattagtctttggaataaaggaacagtaaccagtgcaatgtgacattgcacaatatgacacagaccctgtggtatgggctcatgtgctttgatggacaaatatcccgcatcacatttgacgtggaagacacaatcctggaggcaactcagtcttttgcagcagaacccagagcagatgtattcagggcattctgtattgcagtttttcttcctgcctctcaaattcctctggtgttatgacctgccttaggccacagtgagttcctatatttgtaaaattggtggtcactttttccctccatagtgctgtttgtgaggccctttgccatattcactgtctctaattgcctgctggggtcaaccttctgcttttcacttgtttcctcaaagacacctcaaacttggccctgccaagatggctgcactcaccttatatgagccactcaagcaaaactgttttccagaacttaaaacagtggctaaaaaggaaagaccagggaagaggaaatgagcaggttggcaaacattgtcaacctaggaaagcccaatgtagctgttatcacagattgactgagagaggactgttggatctactttacaccactagctgacctgtttttggctgacgggttttagttcctcccctcaaccctagtctttacaatgaaaattttctggctactaatctgtgctcttccattcttcttagtccccatatttctatagactcctactctgtagaaatagatgtaggacagtgagtgttaatcttcagaataaaggaatagtaatcagtgtaatgtctgaagtgctaaatcaaatgaagccgaggggttaaatctccttgcagtttaaggtcttagacttcttagttactctttttggtacattaaagaatttgccatctttgatccatcttatttatttctgtggcccttcactactatccaaagctgcacatttatatgtctgaaaagttaaatagccaggtaattcctctgccatgaactcacacctagaagtgattctaggtgatattctaagagcttctctcacaagcccataagtcagtagctgcagtgggaaatgagctctgagtagaacttgtagatactgagaacaggagcaacttatatcatccctgtgccacagccgttctccagcttgcatcctttgaccttcaaactaaagatgtgaaatgcagagagctggctttgaaaaccattccagtctgatttatcccaaatttggcaaatcatccctttaatataagctcaatgattgcatcaacaaaatatacaggtgttctattatttatgatacctctttcagccctggtgcagctccatggtatggaatttaatgtatttaaaggctactgatagttatagcactcttttcctaaatactagtctggtgtttatatcagacaggtgttaaatgattttgtagggattaatgtagggaattataaaggattctattgttactagaaaggggtcccgatgcagaccttgaaagagggttcttggatcttgtacaagaaagaattcaaggcgaatccacagagtaaagtgaaagcaagtttattaagaaagtgaaaaaattaagaatagctacttcataggcagaacagcagcatgggatgctcagctgcttatacttattgttacttcttgattacatgctaaacaaggggtggattattcatgagtttcctaggaaaaggggtgggctcttctcagaactgagggttcctcccatttttagaccatatagggtaacgttgccatggcatttgtaaattgtcatggcgctggtgtgtctttgagcatgctaatacattataattagcgtataatgagcagtgagaacaaccagaggtcacttttgtcaccatcttgattttggtaggatttggctggcttctttaccacagcttgttttatcagcaaggtcttagcgacctgtatcttgtgctgacctcctgtcgcatcctgtgacttagaatgcctaacctcctgggaatgtagcccagtagatctcagccttattttacccagccccttttcagaaaaggcaggtctggggccagggcaggcatttggaatggcttgagggcacagaatatttccagggtagaggagatgtgctggactaaattatagagtgatggactaaactgactttgtagcttgacttttggtttcagagttggaaatctggtttacagttggacattatacagtggtggattaaattcactttgcagtttgacttctggctttagagctggaactcagtgcacactagtgaaagtcatgcttcagactccctctggaattcaaggggaagataataatgcgcgcttactatcttaaattaaattccataattttcagctctgtattttttccaaattaaacattatatctcaaacagacccagatatatttgaatattattaatgacaaacgttaggcttaaattacaaataataatatacctaacattggaaatttccatcattcctagtttgtcagactcctttatcttgctaatttgcagatattgctttagtaatgttgccgtgattaatgaaggttttcttggtattaaaagatccaaagagataggaatatgtaattgaactctagattgttgatattctactttcagcattctgaagtcatggaaattcttactgtagaaactcaataaacttacaagtagacctttactttttagttcattactgataaaataatgaatatagtctcatgaaggtgagttttcagaaaatagaagcatgagttgtgaagataatatttttaaaatttctctaatttgttttgttttgcaggctataggttccaggcttgctgtaattacccagaatatagcaaatcttgggacaggaataattatatccttcatctatggttggcaactaacactgttactcttagcaattgtacccatcattgcaatagcaggagttgttgaaatgaaaatgttgtctggacaagcactgaaagataagaaagaactagaaggttctgggaaggtgagtcaaactaaatatgattgattaattaagtagagtaaagtattctaatcagtgttattttgttactccctactgcttactatgctctaagaatgtgtttataaccattcctcaaagcaatctttttcatgcttattcagtaaattagaaacttacagaaagtagcaaagccagttcttggactcaaaaactgataattaactttaacagactttttcagttttcaggccattgtcttcacactgttcttccttcctccccactttcctccttcccttagttattttcttctttcttttctctcactttcactctctctccactccttccttccttctttccttccttccttctttccttcttttctttccttttttccttccttcccttcttccttcttttctttttctttcttttctttctttctttctttctttctttctttctttcttgctttcttgctttcttgctttcttgctttcttgctttcttgctttctttcttttctttcaagcttaaatccattcctttattgaggaaagtaagcccattttatttgtacatgtgaggggggagattaaatatggaaaaatgctaggggtatttattatatctgttttaaattactaccactctttctttttttttatcatgctcctcccttcatcctatttctgtttatctttaccctttttttacttcttttttttcccctgcatacttgtcttttttttcccattatttaacaaatgcttatgtggcatttactgtgtttccaggcaaatgtcttattccttatagcaaccatatggggtctattatctcatttttctagtggggctgaggcacaggcaggtcatggctctggactttagagctgataggtcttggagctgggattcaagctcagacagttgtgctccaaagttgtttctctttctgttataaaacaaagagttcctctgatggcagaatgcagtctgatatcacatgatctgtatcatagtggaaatgagaggtcagagcagggctgactgccataactaacatttaggacagggatatatgtgtgatgaacattctgagattcccaggagttagggcagggactcacacagatcagagtggctctggttgtcagtaggcccagctacctcaccaagtgaatgatgaagaaggccccagatgttggtcattgccactaatgctttgtcctttacctctctgctatctcttcagactctttatcccatttttggggggttccctctggaaaatcttttgggccagctgtagtacctccccagccagtgtctgtaggggacaaacctcatgcgaggcatcctatcaggctcccggaggcctatttctggaggtacatcaggatggtgctgacccacagggttctattgtggtctggctcaagtaacgttggcccctgccagggaatacattctgtgccaatgacttcctttaatattgtactttgggggtctcccccatggtgttgactcttcccctgagaagatggaaaaatctaggacaaaatataaaaaaaggagaaagcattctagttaacagtgtcattatttaatgaggtatttgaaatgtcccagaagggagtcttagattgcttttaggaagaagatgatacaatctgatcctaagctaattcatgcaaaccacaggttagcacctttgaagtgacacatgagatttaagactcttggagttctgtcagaggggccaaaggaaggggagcagatggaaatgaattatgtgtggatatggcagattttctgagcaaaggtcagggatgtgatacattttctaattcaggggtggctcatgagagggacagaagtaggtagggaaagtagtggatctgcaccaaccagtccacataatattgaaaatcaacttccacctgaacacacttctcaagctgctatttagtacttcttatataacaagtatcattctaacagctctaaatacttgatctaatttaatgctgtcaataaccctgttgaattatccctgttggatagataatgaaacccaagattcagagagatcaagtaacttgctcacagtcacacagcaacagcctcctaaccaatctccctgcttcaacttcttccattcttatccaactatagtctacattcttacagaagtcattctgacctctcataaataaaaatctaataatgccaacccttacttaaaactcccaaatggcttctgatcatacttggaacaaaatctaatcttttatcatggattaccaaactctgtatgatctaactcctgatgacctttatggccttatctggcatcacagtctcttatgcctgtgtgccctggcccagtgggcattcttgcaattcctggaatgttttaagctgattgcctctgctcttctcttggctgactttacgttattcatatcccaaaattattacctcttcagagaggccattcctgacacctgaattaattcatgatacttcgcagcccttgatgtttctttcctatttctttgtttattggttaatggtgtaccatttgtttattgattaatggtgtatgtgacattagagcccacacttattctgactgcatgatgtcaaaacctgctcataacctctaccctgcctgtgatctgtgctctgcagtttttcagcacattattgtggactagtgagcatttttataaaatacaggtgacccttgaacagcacgggtttgaactgagtgggtccacttatatgtaggtttttttcaataaatgtattggaaaattttttgaagacttgcaacaatttgaaaaaactcacaagccatgtagcctagaaatatcaaaaaattaagaaaaagttaagtatgttataaatgcataaaatatatgtagttactcgtcttattatttactaccataagatatacacaaacctataattaaaaaaagttaaaagtgatcaaattttatgcacacaaacacttacagaccatataagtcaccattcacagtcaagacacatgtcaacaactgtaaagatacagtgttacatgttttggctctgtgtcctcatccaaatctcaccttgaatggtaataatcttcacatgttatgggagggtcccagtgggaggtaaatgaatcctgggagtgggtttttcccatgctattctcatgatagtgaataagtctcatgagatctgatgattttataaaggggagttcccctgcatatgctgtcttgcctgctgccatgtgagatgtccctctgctcttccttcatcttccgccatgattgtgaggcctccccagctatgtggaactgtgagtccattaaacctctttcctttataaattacccaatcttgggcatgtctttattagcagcatgagaacagactaatacatagtgttaaatcataaaataaaaccatagtatgtactgtactaccccagtaattttgtagccacttcctgttgctactgcagtgagttcaagtgttgtacctgcttaaaatgcagtgacactaacaatctcagcaggagcagttcatctctccagtaaattgcatattgcaataaaaagtgatctctcatgattcttgcgtattttaaaaatcatgtttagtgcaataccataaacattaaataacaccagggaacccatatcaagtgacactagtgttgctggaagtgctcccaacaagcagagaaaagtcatgacattacaggaaaaagttgaactgcttgatacatactatagatgtgaggtctgcagctgcagttagttgcctgccatttcaagataaatgaatctagcataagaaccattgtaaaagaaaacaaaacaaaacaaaaacaaaattcgtaaaagccatcactgcagctacaacagcaggtgcaaaaaccttgcactttttgtacaatacatttatctcatattgaaaatgcagctttcacatgggtgcaggattgctgtgagaaaggcatacctatagactctaatatgattagaggaaaagcaaagtcaattcaaattaaaagtaagattaaggatcagagctgggtcatttaatgccagcaaaggatggtttgataattttagaaagatatttggctttaaaaaaatgtcaagatagcaggagaaggagcttctgccaatcaagaggcagcagaaatgttcctagatgctattaaaaaaaatcattgagaagaaaggatatctgcctgaaaaggtttttaatgcagtcgaaagtgccctattttagaaaaaaaaaatgccacaaaggacttttattaataaggaagagaagcaagtccaaggatttatgtcagaaaggagtaggctaactctactgttttgtataaatgcaatccggtttaggatgagtccatatctatagatatgctcttatgtgtaaagctgttcatccctgatccttgaagggaaaagataagcctcagctgccagtattttggttgtacaacaagaaggcatggacaatgagagcactttttccggattggttacattgatgctttctttgttcttgaagtcagaaagtacttagacagtaacggactgccttttaaagttcttttgatattagacaatgctcctggccacccagaacccatgagtttaacatcaaaggtattgaagtggtctgcttgcctcctaaacatgtctctaattcagcctttagatgagggggttataagaatctttttttttttaataaattttttgtagacatgaggtctcactgtgttgcctgggctggtctcgaactcctgagctcaagcgatcctcctgccttagtctcccaaagtgctaggattacaggtgggagccactgtgcctcgccactcataaggatttttaaggctcatcacaaagcacatggtactctacagaaaggattgttaatgctatggtagagagccaccagagagaagaacatcatgcaagtctgtaatcctaaaacgataaatttctgctggagaaaactgtgtccagatgtacatgatttcacaggatttatgacagagccaatcaaggaaaccacaaaaagaaataggagatatgaaaaaaaaaaaaaggtggtgggtgaaggctttcaaggtatagattttggagaacctcaagagcaaataaacatcacaccagaggaattaacagaagatgacttgataaagatgagtgtttccaaaccactgccaaacaatgcggaagaagatataggagaagcagtgccagaaaactaactttacgcaatctggcaaaagagtttcggttattcaggactgcttttaacttcttttatgacatggacccttctgtgatacaggcactgaaactgaagcaaacagtggaggaaggattggtaccatattgaaacatttttagagaaataaaaaaggaaaaagtcagacagagaccacaatgcatgtcagtcacaccaggtgtgcctgcctttcccgcctccccttccacttcctctgcctcttcccctctgccacccctgagacagcaagaccaatccctcttcttcctccttttccttagcctattcaatataaagatgatgaagataaagacctttaaatgatccacttccgcttaatgaatagtaaatatattttctcttccttgtgattttcttaataacattttcttccctctagcttactttattataaaaatacaaatatgtattacatataacatacaaaatacatgttaattgactgtttatgttattggtaagacttctggttgacagcaggctattagtagttaagtttctggggagtcagaagttatatgtgaattttcaactgcacgaggggtcagtctccctaacccccatgttgtccaaggctccattgtagatgcttttttacttttcagaaataaaagccataaacttgtttatttgagggtaggaagagtaatgtcaggaggctattttttctttctagaaacatacatttttatttcttcaaaattatttagtacacaacagtttccgagggaaactcgatgctatttgttcttggattagaaattctctctcctgatggtgattactgagtctccatttaaaactcttggaataaacaaagctgtgaggatgcggggtgctaattaagccttttcctaattgcttcattgtgcgtcaagatgaagacagtcctgaagttattatactgttttactcaccacttttaggtctgtgactcaaactcccacttttattcggctatatacacactaaaaagcaatgacatttacaaaccaatctcagaccagacactcctgccttagaacatggtgcacagaaaatatttcttaaaaccattacactgaaatatacagtaaaatctgtttttcagcagacattgttatagtctgttgaattttcttactaatctagaaaacctgtttgttagaattctgataattagaaatatttctttttttttttgcttgtgaaacttcagcttttattttatttttttatttttattatactttaagttttaggatacatgtacacaacgtgcaggttagttacatatgtatacatgtgccatgttggtgtgctgtacccaccaactcgtcatttaacattaggtatatctcctaatgctatccctccccccttccctctaccccacaacaggccccagtgtgtgatgttccgcttcctgtgtccatgtgttctcattgttcagttcccacctatgagtgagaacatacggtgtttggttttttgtccttgcgatagtttgctgagaatgatggttctaatgtgtctgacaaaaggattgtctttgggaatttgaaggtgaattttttctcctcaccttttgctttctgcacttttacgattttctaaagtgactatatatcatttttataatgtgtaaaagaagtttatacaatattttaaaataaacctgccattttcctaattttctaagtatcttgtggtaaacataattcaatcttcttggcctgtcagtgtaagaataatattttaaattttatttttaaataagtttttgtttctaagaatgttactaatttttttttttacttctgatagattttgatattagtcttcaaaactgacttaatgtcttatgaaatgcttgctgttatgtttgaagttaggtaatttatgtaagattcagtgaagaataagtggaattccatgtttatgattttaagctataaaacactctaaattaaatgtgtctttattagaatctgttctgaccagtgcagaggccaaagagaggaagaacatcttaaacaataaagagtcatttctcttggtgacttataattctggaagttatttctcttaaaatcatagcattaaaagggactttagagaccctctagtccatcgtcctcattttgcaaatgaggaaaatgagacagcatgttggttcaaggtggtgcggctgatgtaggctgaaatctcatcttgtacactggtgttctttgctttttccatatccctttactcagactccagaggtgatgaaggatgtatgtttcctaatcagattgccttgttggaagtaacatttgattacaacataattgaatgatggaaactttctttttaagatggagtctcactctgttgcccaggctagagtgcagtgacgccatcttgactcactgcaatctctgtctcgccagttcgagcgcttcctctgcctcccagtagcatgggattaaggcatgtgccaccatgcccagctaatttttgtatttttagtagagatggggtttcaccatgttgatggtggctggtctcaaactccttacttcaaatgatccacctgcctccatctcccaaactgctgggattacaggcatgagccaccatacccagcccaaaactttctggaaaacagattgatagtatgtgccacattccttaaaaaattaaaaaaattaattcaagccaggtgtagtgccatgtgcttgtagtcttagctacttggcagactgaggcaggaggattgcttacccaggtgtgtgaggctgcagtgagctatgatgatcacacctgtgaattgccactgcactgcagcctgggcaacagagcaagaccccgtttctaaaaaaaaaagttagttttctttgacttattaatttcaccttaagaaattttcctaataaaccaattcaatatggacaaatgtttaggtacaaagatgtttatctcaccactatttttaataaaaaaggaattgaaaacctggctcaacaataaaggaatacttaattggttatgatattaaaggactcattacacatctcattattaatgtgtatttaatgaacttggaaaatgcttttgatatgaaggtaaaaataatgatatagagctaaatatagagtttcattccaatctttttaaatatatttatgcacttaggaaaaaaacaatatggaaatgtgtaaaatatactttttttttaaaaaaaaggacacatttattcagcattatgatcagactattacatttaacaatcaacagtatgggtgccaaaaaaaatctacattaaaaccctttgttgtaatgctttacactttccacagaacagaaactaaaagaatctgttacacaattagtcacaaatatagtcctcgagttttttacccatacacatgagtatttgtctaaaacatgtcttcttgtagcacttaggccctgccaccactgtgcttgtctgagttcacaaatctgttgtaaactgtagcttccctgtcacttctctggctcttatctcctgctaagatttgtttcctggcagtaatttaaaatcttctgccactgctgtagctactgctgctactggaactgccatagccaccttggtttcatggtttggcaaagtactggcctgtaccagcataggggccagagcttctgcctccaaagtttcctcccttcatgggtccaaaatgtaaaactaattgttgtaattgccaaaatcattacaccacctccaaaattgcttccatgattaccaaatccattatagccatccccactgccactatatccaccaccaccacagctgccaccaaagccacaatgaccactgaagtttcctccacgaccaaagttgtcattcccaccgaaactacctccacgaccaccaccaaagttcccagagctgctttgcctctttggctggatgaagcactcaccatctcttgctttgacagggctttcctaacttcacaagtgtggccattcacagtatgggtatttctcagtgacagtcttacccatggagtcatggtcgtcaaaagttactaaagcaaagccccttttcttatcactgccttggtcagtcatgatttcaatcacttcaatttttccatactattcaaaataatctcctaggtgatgttcttcagtgtctttaatgccaccaacaaatatctttttcacagttgggtgggcatctggtctttgagaatcttctcttgagacagctctctttggttccacaactcttccatccaccttgtatggccttgcattcatggctgcatccacctcctccacagtggcatatgtgacaaacccaaagtcccttgagcgcttggtatttggatctctcattaccacgcaatccatgagcattccccattgctcaaaatggctcctcaggctctcattggtcaaccaatgtagagctcaacctccaatgaagaatttcctcagctgtttgggctcattaggagactctgacttagacatgacggcaggggaaagagagactttaaggatgcttccttggtggcgtccacgggcagaaaggggtaagcgtccacaggcagagaggagtaagcctttgaatgtatctaaaatttactttttattgcctgcattctttcactattttccaaacattcttcaattgtcacaaatggcaatgataaagagaaaaatataaacatcacattttaaaaataagtgtaaaataactgtgaacttaaaatgtgatcatcatagaagaaagagcactgcaatagaagtactgtgagttctctggttaattttgcgaagccacgtaaagctgtgtggctttaagcaatgccataatccatttaagtcttagcttctatttctgcaaaggagaagtttgaattagtcaatcttccttccagatccataactcagtttgataaattacttagtatctttttctacagagaaaatgctcatacataataataaatatgtaatcataaaattattttcattagtctgttttatagaattcaaattaatcaccactatttactcttgtgcctcttggtgatcggtgctgtctgttacagatcgctactgaagcaatagaaaacttccgaaccgttgtttctttgactcaggagcagaagtttgaacatatgtatgctcagagtttgcaggtaccatacaggtaataaccgctgaagagtgggaggagagtgtgaataatttttcaatcatcatatttgttttcagagggattactttggctagaaggtagggagcaagtggagaaagtgctcgaaggtaaaccattgagaaacagttgtaattatgcaggagagaaagtacaagaccctgaactaaggcagggacatctctgaggtagaacctgtaagaatgggtcactgatgagaagggagggagacatgatgctgagaatgactatctgatgtccaggtaggatatgaccctataatttgctctagttgaaaatgagttatttatggaacctgaaatttgaggtacctgtgggacacagagaggatggtgcttcctgggtttacctgtctttctgctttttaccccttctccagtgcagaccttcttcctttaatacagtcatcccagtgagggctctaataagtggtgtgaacataagcaagcccaacctttctgagtctgtttcttataataaaaggaaagctggactttattgatggatttttaagcttttatttaaaaaaaatgatggtagagcctttttgtctaaaaaaaaattatttgaaatcttcatatgtgatgaaggtaaaagcagagttgatctggtagcaggaggggttggaagcccagggctgcccacttgctaacctgcccccacccacacctccatatcactgagctggatccatatcatgattctagaatgtcaacccctttttaaagccttctctgagacccccgaagaatttagtgcttctcctttcttcctataacagattattcataaggcacctctaatgcataaatagtaattcaactcaagtcaggtctcctaagtcaagaacatgcctgtttcctctatgtcaacccatcatggcccctgcaccttgtaggtgttgggtaactgtgtgcagaatgaatatttacgtagagtacttccatactgtgtgtccaaaagtggggagaaagggagataacttttacttattgatccctaaccggctctttacagtcattggattattttctctttacatcaacactttgaggtgtagttaattctacattaaagataaagacactgagtctcagaggttaggcagtttcccaaatttgcacaactgttaagtgtaaagtgaggaccaaacttagttctttggaaacgaaacccatttttgttggtcatgcctctgtgccctactgccaacctatcaaaagttacattttaaggactgagaaatgaaagtggaatgagttttcaaatgtcttcttttcagaaactctttgaggaaagcacacatctttggaattacattttccttcacccaggcaatgatgtatttttcctatgctggatgtttccggtttggagcctacttggtggcacataaactcatgagctttgaggatgttctgttgtaagtattgggctattatttagttaagctctaaaaataaagctgggatgaacatgcttcatgtctagataggaaaccctactgtgaagcctcatgaagagattctggtgattcctaaatcggcatttctgcctctgagtcttcatgtgccaccattgaagcaccccctttcatttggaggagcagtaacttctttcctcattgctggctcacacatagttgaccttttcaaatctgtgactgagtggagtgattccattcggagattttgagaaggccttggcatttgggaagaagcctagccctgagcaaggagtctgactggctccttttaaaggactttcttacagagcaagtaaaatacagatgtgttgtactaagttctgcaagcctttggcaattccaggatatgtttactttcccttgataagagaggaattggaaggtaagagccaaatgaattcagaaatgacaaaggaaaagttatattgggatttttctgctacattgttctgaatgtagataattgtacctcggtcagaggaagataagcctgaagcaattatactacaaaagtacccaaatatgcaatttggtggtcaaaagtatgtgtaatctttctgagcttctagatttggaggtgggtaagattctgcctcttgatagcataacataattagtagcgatataattttatatttaaaccagaatcatataagcctggcagtataatgtgttagtatagtatttctgtcctttttaaacattgagttgttcatgcattacagtttgctcaggatgacccccaaaaagacatctaaatttccattaaagatgtacattggacaaatgatatgcaggtgctatttgtgattatggcctagagatcaaaaccaagtatcactggcattggggctttgattagataattatttgatatattgctttactccaaaaaattgaattgatgaaagttgctgacattggggcatttaggtttgcaaaatcaaccttccaagttaaggaaaaggaagacctgtctgaagaacagtgcattagaaaaaggtcccataggtttaaatgatcacaagtccaagattaactatcggtattttatttagtgctagttaaacaaacaaacaaacaaaaactaatgacacaatatgctacacaaacataggcatagagtccagaggaaagaaagcgatgaattccctgtattctgggcgggttcccaagtattatgtctgttccaggcttgtgtttaaaaaaagcatattaataaatgtgtctagagaagggcagtgaaaggagttatcaaagaagcaaaggagtttttagcaatatttcaagacttgtaggcctgtcttatgtaaaaggaagtaaattttttcttcagtttgaaaaagaactgtttaacaatagacaatcaaacatgctacttcctaaaacagaggatggaagccaatttaggggaggtgtccaggcacgaacatggagagctggacttgatacctgtaaggtccttcccaactttaagttgctgtgattcccatgtcatagataagaacgtcaatgcatcttaagagcaacatgatatctggctctgtaagaaactttcttttggttgcacaattcataggtttttaagaatctgatgtaattccaacatcactgactgtatccgttgttgattaccacaataatgctgtgtaacaaccagccactaaacctcagagacatacatatttttgcccacaaacctatgggttagctgtgaagttctactgatctggattaggcatagtggatctcggctggacttactcatgtgtctgtagtggattgtgtctgtagctggttggttgggattcagacagctctcctccatgtgtgcctcatcctccagcaggctatcctgggtttgagacagtggcagaattctgagagagagagagagaaagagagagagaacacatgcatgcatgctcacaaagcatataaggccccctgagtcataggcttggaactggcaaaagtgatttccaccatatcctgttggccaaagcaagtcacaaggccagcccagattcaaagggtgctgcaaaggtcacagtgcaagaagatgaggatacagagagaggtatacagagggaaaaaaatgggccattttgcaatcaatctatcacatagacatgaacttataaggaaatgtgtttgttttatttttaacatctgttttataactattagaggcaaagctctctggttatagaagtgtcaacttttggccaggcatggtggctcacacctataatcccggcacttttggaggctgaagcaggaggttcacttcagcccggtagttcgagaccagcctgggcaatatagggagacccccatctctacaaaaaataaaacaattagctggtgtggtcatgcacagttgtagtcccagctactacagaggctgaggtgggaagatcgcttaagccctggagatcatatctttagtgagctctgattgcactactgcactccagcctgggcaacacaggaagaccccacctcaaaaaaaaaaaaaaaaaaaaaaaggagtgtcagctttctagcattgtgatggtaatgctgtgcacatgttttgtgtttgtgctttccagagtattttcagctgttgtctttggtgccatggccgtggggcaagtcagttcatttgctcctgactatgccaaagccaaaatatcagcagcccacatcatcatgatcattgaaaaaacccctttgattgacagctacagcacggaaggcctaatgccggtgagtttgatgtttcaactgtttgatctactcctgactcctgaatgaaagtattttaagtggaaacttaataaaatttgtactttcaaatatgctgatgataaaataaaacttcctagatcatagattcctttcaattactgctaataatatacatcaacattcagtacttttacgtagcaaaggttatagggaaataggaatactgctcactttataagcaaaacctattaatcagattttttaaaaacaatttttttttagagacagagtcttactctgtcatccaggctggagtgcagcagtatgatcatagctcactgcagccttgatcttctgggctcaagcgatcctcctgcctcagcctcccaagtaactgggactacaagcgtgtgccatcatgcccagctaattttttaattatttgtagagacagggtctcgttatgttgcccaggctggttatcagattttattgtatgtaagttactgtattcctgaggaacagatttgagttattgtagctgtattgcatattcatattgtcttaacaatacatgctatgaaagcttttactcttttagatctcatttattaaattctagcagtctgaggtcaagcacagtggctcatgcctgtaatcccagcactttgggaggccaaggtgggtggatcacgtgaggtcaggagttcgagaccagcttggccaatatggtgaaactccatctcaaataaaaataaaaaaaaaaagattagctgggtgtggtggcacacgcctgtaatcccagctacttgggaggctgaggtacgagaattgcttgaacctggggggtggaggttgcagtgagctgagatcatgccactgcactccagcctgggtgacagagtgagactctgtctcaaaaaaataaaaaataaataaataataaaattaaaataaaataaattctagcagtttgaagtgaagccaattgtaacacaaattaattatcttctgacacctggtaatcgagagagttagctatacactttattttcagtattgcagcattcaaatttactgttattcttctcattgcagaacacattggaaggaaatgtcacatttggtgaagttgtattcaactatcccacccgaccggacatcccagtgcttcagggactgagcctggaggtgaagaagggccagacgctggctctggtgggcagcagtggctgtgggaagagcacagtggtccagctcctggagcggttctacgaccccttggcagggaaagtggtgagcacactttcacatttagctcagttcaggttttcatcatccaaatgtctgaatgtatttaattctcaactataagccatgttttttcaaacctttaaacaacagtcccacttggataaagtctgagagcctaaatatggtctccaagtggtgtcatctgtcccagccaacttctccaggctcccctcaacactacccctctaccctcctttgcaagcaccctttgtaccacctgtctcccttgctgtacttaggtttcagctgacttgaaaagaaccaacaaaaatggaagtagccagaaagatacaggacaggtgctaggagtgagatgaaagccaaggatggagactgtttcaaagatggtggtcagcaatgacagatggtatagagagattgggtaaggaggagactgagaagacatgatagaatctagcaatgaatgggctatttctgacattttaaaatattcttagtgaagtagtgatggtaggaaacagttaagggtggctgaagtatgattaggggaagaaatggagatgtaagtgagcatagattatcaagaagatggaaagtaaaagaaaggcaaataaggacagcacttgagtggggaggcagagtccagggaaaatgtttaggggttgaactcttgagcatttttatgactggggatgagacaaaatcattgatggagagagggcattgaaacatcatctgaggaaaaaaaagtagaatcaacaaatttgggaaatgtaaaaagaacatggaagtatgcccttttgtcttagttgctggggatgagggaagtgtctggcagggagtagtgagtttaaacgactatgatgggggataggaaagaagacaaactaggaaggaatagaattaagagcaagacattttcattatgtaggcatgtaattagttgtactgagaagtgatatttaaaattcttaacaatgggaacagcatggacactgaccaatcagaatggatgcctgctagtacaagtcagatggatgcccacccgctgtgtatggacgctggtagcatttaatgactcaaatgaaaagagagttttcaatctttagtctaggactctttttacttcctcacagcggtcactcttactcataaatgtttgttattgtattcaaagacagttatgcctttattcagtttactcttaaatcattacaagcttgttccctacttttactctcttgctttatattttctgtgaactctgattgtgtccttcaattttgtggtgaacttaaaaacaggactctaaataaagacgtcgctgacagccaaagcaattagaggaggaaatgttagctctcagacactgattatggccctcaacagacagttattaagtggtgtgttaaagattgtgctataatgaattgtagggcatgatatctgccctcaaatactttaactgaggagatggggcatatagttttgtgagttaaaggagataggcctagagctagttcttaagagataaggatttgcatatgggtgaacagtagggatgacattcaatgtaagagaaaatacaagctgcgatcagtgatttgttcccaatgcagcaaataggacactttggctgaaatgggagtttagtttgagtagtggttctcaaacttctctgatgagaactcatgtaggaaagatttaaagatgtcaccatccactaatgtactcatagtcactttccagtgggaaaaacacttggtgataacaaaatgttggagttgaaaacaacaatacaatacagcacaataatgatacaataaggaataattaatgattattctgcaagtatataaacacaagcagaacataataaaacatggacagcatcagttacagttcagagtaggaaacagaaactgccctaggtatttcaagtagataagtatttaataaagggaattacatgcttacaaaatctttggaagggctggaagagtgaaaggaggctatttgctcccagacttccaaatcacagcactgcagctgtgattctgtaaccaagaagctgcagaaaattatgccgatatcacagctgttccaaatttaaagacacgagactagaatctggctgttgcagaaattcttgtctgccaaagatgagttaagccgttagcttaccacagctgctgaaggagagctggtgtctacctcccagattttacactgtgcatctccctcgtagaccctgacttacttccagaaccaagggaaactgggaaatagtttttagccttctagtcccttgatgtataaaaggtcagacacagaagtatatgaaaatgaatgctgagtgcataggacagtaagcatcccaagacattattgataatgcactgaaaacaaagtgtcctcatttattgcaggaatatccattatcttctcctgtgcatttgcactagggcttggaaatactgccagatggtgcactgcagccagacttctcagcagaaagtgtccacaataaactctagtaaatgtacaaagttttgtttatggacatcaatgagtagccctgaataactcagtggattactactaattagtttttattgccatgtaaaaatgagtctgtggatttgagcataagaattaaagaaaggattggaccctaaggaccccctgaagtcaggaaattctcgtgaccatcagtggaccttgaatcccatgttgaaaaacattgacctgaaatggtggttctaaagcttcggtgaatattagaatggcctcaagagctagtaaaaaacacagccggcctggattattcaagtaggctagggtttggccttttatttttataatattccgaggtgattctgatgccaaccatcattcgagagccactgaactggtaaatttgaagaaagatttaggttaaattgtggagagtcttgaataattaagctatgaaattgtgaagatgggaggatcctccaagttttgagggacctgaaggttatacaattgtagggattcaacttaaagtaaaaaaaaaaaattttttttttaatgcaaaattagatacaaaggtggatatttacttcaaatgaaaaaaaaatcataaccaaatactggaagcttaaagattctggtcccttttcatttttaggtaatttatcatcaatacttacagggaagagcttcctgactacagccttgcctccctcccacccagaaaactgttcgacttcccagaatttacatgtaattgagggctcttgaagcttaaccttcatcagtgtcactgttaaatcacccctgctttgagtcttccccttacctttcctttctcccctttccagtctctcccatatacaacagtcagaaccccctttgggatacaattagaagctgcttgtcattgtctggttataacccaagaagtgcctgagccaagatgggggcattcccctttcaaggggggacacaaaatatctttcagttgtgaggtattagtgttaccaaaacccaacctagagtgtttagatccagtcttggttttcccccaattactaattgtgtgaccttgtataagttacttaactttgctcatttccttatcagtaaaatgggaattaacatcacagtgaccttataagtgttgctatgaaggttaaacaagagactgtatgagacatgcttatcacagaacctacaacgttgtcagtgcttgatttttaaaaatcaattattatttcacagtaaatatgcatagaagaatacacatttaacatttacatttttgcgctaatgaaagcaagcaatagacttaacagtctacaatagagatagccaatcattttaatctggcctttcattatttcttaccaataggtttactttcctagttatatttttatttaggccaggattttttgagcacttctcatagattccccagagttccttggtctttcctcagaccaacaccattcctcagccaaagaagctctgcttctttgatctgttttacattctaggcatctaaacttgttttacttaaagaaagaattcttcagtcaacacaggttttaaatagtttgcaattctagggtattatgcggggacgaggaggcccaagagtgtattcagtgtaatgaagaaactcattataacttgctgagatcattcagatttgcctgtgattatattagttaggcagtgtctgttttcctcccaggggtataaacctggaaaattacaacaaaaacaaaagcaaaaaccaaactcctcctttccttaaatttccacttctcaagtacagtgttttatctaacaagatctgctgcttagccacatccttgtttggctttcactgtctctctccaccctctactttccaccttcatttattaacattgtaaggaagcctggagcatacatgtgtggaatagtctccatggcaactcagcttggaactaataaggttatgggagagcttccatccctgcacctgccagtgtcacaagcagaagccatgttcctgtagcaaagattgtactctactgctaggcagctgtccccttgagccacccagccaggcacatgggatacagagagtatatggctcagcacgcactagtcactactattagaaaagctcaaagctgagtcactggtgccttcttcagaagggatgaacagctctctcacttgaatgccagaaaattatcttgcaaagcagacctatctgatagacatatttgcatcagagtagggcttgttatcagcaaggctgtaaggtgccctccccagtcttctgcaggataatccagggagccagattatagagaaagggcagccctctgttcctactcatctggctcagtattgaggatctccattcaccctttcctacccctgttcacctatccatcccctgtagttcctgacctgcaaagctattatgtggtcatagttgttatttatttccatgctaatcctgggcactgtttctctgaaaaatggagatttaagaataaggctgtcaggatacatctcagaagtattaggcgttgtattagtgtggctgctataaccacttgccacaaattcagtggcttaaaacaacaccaatttatgactttacacttctggaggtcagaagtctaaaataggtctcagtgggctcatatcaagtgtcaggagggctgtgttccttctagaggctccaaaggatgatctgttttcttgcttgtggccccttcctccattttcaaaaccagcagtggctggttgagtctttctcacactgcatttgctgatactcttctccctccttcttcttcagttaagagcccttatgattacattagtttcaccaagataattcaggataatcttattttacagtcagctgattagcaaccttacatctactactttagtttctttttgccatgtaacataacacattcacaggatccagggattaggacacagatgtcttgtgggagagggaacattattctgcctaccacatgcatacatcagaaaccatggttgaaacacaggaaacatgacagttcctcaaggcatacaattatgaccttgttgggttaaccttcactatccaaattttaatcacacaaacttttccttaatctcacagtaacttggcagtttcagtgtaagaaataatgatgttaattgtgctacattcaaagtgtgctggtcctgaagttgatctgtgaactcttgttttcagctgcttgatggcaaagaaataaagcgactgaatgttcagtggctccgagcacacctgggcatcgtgtcccaggagcccatcctgtttgactgcagcattgctgagaacattgcctatggagacaacagccgggtggtgtcacaggaagagattgtgagggcagcaaaggaggccaacatacatgccttcatcgagtcactgcctaatgtaagtctctcttcaaataaacagcctgggagcatgtggcagcctctctggcctatagtttgatttataaggggctggtctcccagaagtgaagagaaattagcaaccaaatcacacccttacctgtatacaagcatctggccacacttcctgtttgggttagttgttacctttacctgatcacctgaccctccttgtgaggaagggatgaaagtgttcgaccacttcaggtttaggagagaggaacatttctgggataggagaactggaacaattgtcttgatccaaagctataggcttgaggctccacctttgtcagccttaggggtaagtacaatatctggaaagcctttcactttaagtccaagtacagagtctgggtccccacctgcacatgctgcttctggcctgctgaggaagtaggcatgactgtctctccccatgtctctcccctatttctcttccttcttcctccttgcagctctctcccaagcctcaaaactcactgtggagtcagtccagtccagagggctgaacccatgccagaaagagtgctctctctgaataagggttgaaccattaaagtgaccatggtatcatgtaatctctcatcgtcatacatttcatgggccccaaactttgtttacagtgaatggttgaaatcttttctagggctccctgggctgtggtcctatgggtgtcctctgaattcctcctaggaagttggataaatggaacctctcatcctctctcaagccctcttaggtcctgtgtattagtttttgtgttttgttttgttttggaatacaagttgactattccttgtccaaaatacttgggaccagaagtgttttggattttggaatatttgcatatacataattcacttatatttcatgtataccttatacacatagccagaaggcaattttatacaaatttttaataactttgagcatgaaacaaagttttgactgtgttttgactgtgacctgtcacatgagatcatgtgtgaaattttccacttgtggcatcatgttggtgctcaaaaagtttcagaatttcagattttgaattttttggattatggatgctcaacctgtattaaaagtccaaaattagattttttccaacctttattttagacttagggggtacatgtacaggtttattatacctgggtatattgcatgatgctgaggtttcagggtacaaatgatcctgtcacctaggtactgagcacagaacccaataggtagtttttcaacacttaccccccttccctccctacactaatagtcctcagtttctattgttgccacttttcatctatgagtacctgatgtttagctgccacttataagtgagaacatgcagtatttggctttctgttcctgcattactttgcttgggataatggcctccagctgcatccatgttgctgcaaaagttaggtcctatattttgaagtgcttctcaacctaggtaatctacctcacccattatcaccagttatgctctttattctaaggaagtgccccctaaaacaaagctcaggagcctcaacccggcggggaagacagtttcctcacgaggcaggcaagcaacaccaggtggctctctttcccaagattcccttcttccataggctcttctttggataactgctgacaccaatctcattaagtcccagggaggtggccttgtctcccactctcctttcacagtctagcccaactagataattgacccttctccaggctcaaacatttaaaacagaaagctccaatcccctttactgatgagaggatagtggttctcaagtatagacacggatcagcatcacctgggaacctgttaggactgcagatccagcaatccacgttttaagagcccaggtaatactgttgcaggctcaaattggggaaccactgggctaggggttaataaaacacaaacacagagagtaactattatctatctttttaaatatactttgcctctctggcatttgtctaccacaggacaaatcctggtctctaatctgtcacacagaacacacctgtagacaccataattctcttcctcagtgtctagaccaggagagaaaaggtaaaacccctaagtcctattacctaaggatccacttctcctaagtgattaatactaggatttacctcaccctgtaggtggctggtttagctacctccttgtaagactgccgcactgcctttatctgcctcaacaggatcagtactatatcaagagtgcaactagtaaaccctccactcacatgagatacacttcagtgctcctgccttctgagacagccacagctctggggtagagccagtcccaagcatctgccaaaacctcatctggcgtcttctccctctatttacagggggaaacccagggctgagtgccacaaaactagggttgccagatatagcaaataaaaataggcaaccctgtactaaaatttcagcctggaaataataagatagtattgttttctaggttacaagtgcagtcacatcctgtttctgctctctcctgagtaacctttaactgctgtccctatcatcatagtgaatagttggtgacaattatccattgtgggaaacaacacgggaagaattttgggagcactctaacaacaaaaatgtttaaaaaggagatgttcattttcaaagttagatatcaaaatggaatccattttgatagcatccattaaaattgtttaagtgttggagatactttcataaaaacagacactaaaaggctgatatcccaagaatgtctttcctcaatttaaaatcatgcagagagtgtcacctgctggttacaagtaagatgagcttcaattattttattatgaatactttgttcaaatcaaatttcctttctcctgccaatctttgtcccaaatataatgaaatcagaagatggaagatactaacattgcaacaatattcttcttcattaaaatgctgacctgtttacactaaaacatatcatcttaaggcccaaacatttattttcaaatagatagtaaacctgccattttgggcttttttactgttctttccttaattattcatgaaccattcttagcttctgaacctaaatttttggagtatatagaatcgtctatcctactttctataagcaagctgttagaactttactttcagttctactttcataacaacaaaaccttatttacagaaatatagcactaaagtaggagacaaaggaactcagctctctggtggccagaaacaacgcattgccatagctcgtgcccttgttagacagcctcatattttgcttttggatgaagccacgtcagctctggatacagaaagtgaaaaggtaagaatttaaattgggttcatccatacttgaatcagtcatccttaaaaatgctgtattctccatagtaaagaacaaaatgcagccagattattgacagttacttacatcacctttcagtaaaatgtaaacactttctgtagctgttattcaggagagtaaagatgacacaaggcagattagtcttagagcacatatgcttcacaaaccatcactagatcagtttgcgttgacctaagaagctgctttcaggaaccatatttcctacttctactggcagcatctcttcagcaaccataaggaaaagtggtagtgtaagacagtgttaaaatctggctgtaccttttaagataaatattagcaatcatttctagtcagagaaaacgttaaaaattcagattatctgaaagacgaactcagtatgaggtattctctacaataaaaaaattcgggagtctgtatttggcctttgctcaggcttcttgaatttactgtgagctggatttgaggtctgttttcaaggatgttgtaacatccttgaaactaaggtaaacacattagtaaatgtttttaaatgagtcagtgaactgtatttactgccttaactttaagagtagatgactgctggccggcacctactgccgtggctcacacctgtaaccccaacactttggaaggctgaggtgggaggatcacttgagcccaggatttttgagaccagcctgggtaacacagagagacattgtctctacaaaaaataaaataattagctaggcatggtggtgggaacttgtagtcccagctactcagaaggctgaggtggaagaatcgcttgagcccaggaggttgaggctgcagtaagccatgattgtaccactacactccaccctggtgacagagtgaggccctgtttcaaataaaaaaaaaaagttagggatagataactgctgcctcggaactaacccaaattagggttcagtcatctgatatgacaaatcctttgttttcaaaaacctgttctatttcactgacaccttgttaagaaggatctattgttgtattgttgtggagcttttttttttttttttctttgagatggagtctcgctctgtcgcccaggctggagtgcagtggcgcaatcttggctccctgcaagctctgcctcccgggttcacaccattctcctgcctcagcctcccgactagctgggactacaggcacccaccaccaagcccagctaattttttgtatttttgatagagatggggtttcaccgtgttagccaggatggtctcaatctgaccttgtgatctgcccgccttggcctcccaaagtgctgggattacaggcgtgagccaccatgcccgtcctactgtggagctttttatggaagaggaattagggaaaagaactattatgagaattaatctatgtgattatggaataggttgtccaagaagccctggacaaagccagagaaggccgcacctgcattgtgattgctcaccgcctgtccaccatccagaatgcagacttaatagtggtgtttcagaatggcagagtcaaggagcatggcacgcatcagcagctgctggcacagaaaggcatctatttttcaatggtcagtgtccaggctggaacaaagcgccagtgaactctgactgtatgagatgttaaatactttttaatatttgtttagatatgacatttattcaaagttaaaagcaaacacttacagaattatgaagaggtatctgtttaacatttcctcagtcaagttcagagtcttcagagacttcgtaattaaaggaacagagtgagagacatcatcaagtggagagaaatcatagtttaaactgcattataaattttataacagaattaaagtagattttaaaagataaaatgtgtaattttgtttatattttcccatttggactgtaactgactgccttgctaaaagattatagaagtagcaaaaagtattgaaatgtttgcataaagtgtctataataaaactaaactttcatgtgactgg

SEQ ID NO: 389 - DNA, 6609 bp, Homo sapiens
cttcccctcggaggaaaggctcagctcccagcgcgcccctcccgtctccgcagcaaaaaagtttgagtcgccgctgccgggttgccagcggagtcgcgcgtcgggagctacgtagggcagagaagtcatggcttctccgtccaaaggcaatgacttgttttcgcccgacgaggagggcccagcagtggtggccggaccaggcccggggcctgggggcgccgagggggccgcggaggagcgccgcgtcaaggtctccagcctgcccttcagcgtggaggcgctcatgtccgacaagaagccgcccaaggaggcgtccccgctgccggccgaaagcgcctcggccggggccaccctgcggccactgctgctgtcggggcacggcgctcgggaagcgcacagccccgggccgctggtgaagcccttcgagaccgcctcggtcaagtcggaaaattcagaagatggagcggcgtggatgcaggaacccggccgatattcgccgccgccaagtgagtgcgcgccggggcaggagtaggaggtagcgcggggtactggagggagcggggggcgggtgttccagggctgagggtaccgagacccttctgcgtgcgctacactcccgggaaagcaagcccagggcctctggactcctgggtgcccggggcgttcggcgcgcccagtgcgccgtccgcatccaagacaccctctgggtaataaccgcgctgtgtgtgtctgagactccctcgacatacagattgttttttcaagagcgaaccccagctgggtttacggggtcgctcggtggtccgtttctacagccctcggccctgcgctctggccacttggcttgtttttgtttcactgttccccggagtctctgcctggggagtgaaggagttggatccatgttcagtgagcacttggatgtaccaggaacgagacaggttcaaaactcaaccctgagagttgtgcccccattttaaagatgagctaactgggcttagccagacattgaggagaaaccattttctttcgtgagtcccgcgggtgtcgaagccggatcccacgaagggatggtggcaccagggatggtggcatcagagtctggtgcggggaggaaatgtctctctgtggtctccgcagccagcacctccccggcaaggttctgagcttcgccgggagcgggctggggccagaagcgcacgggctcttcttggctcacagtaataattaaccgcattccagcagggcttgagagtttgcagagtgatgttcactagctcaccagatcgagatcctcactagaacccccaagtgtagacactggacttgtgactaccctatttttcagacgtggacgctgaggcttttaaagaagacggcctttgcttgtcccaggttaccaacaaccactgattggccaggggcacctgttgcccacgccctgctcctctgtttgatatgccctgaccacttttgcgtcctctccccagagagactaggtagagatccgcacctgcaccccacttgagaattgaggctgcagagaattctccgcttcagcatccatttttggtccctgagtccttttacaatttggagacgtcatcctttacagcctcttttacttttatctcttggcttttatggtttctctaccccctaatttcccaccacgccatcccctacctgtaggaaaggtgagggtgggggctgtggagggactttctccaaagctgagagagatcctttcactatttacatcattcagccctcaagactagacgcactgtattttgttaacaaaacaaggccatatacccaggcgtcagtggctgtcccctctggcagtctctctccaccctgttagaaactctgaaagattcaaagggcgaggagattaagggactcaaagaatttaaactcaagtttggatagtgctttatagcacttttcaccgtattatcttatctcctctgtagggcagcagccggcctcttaacagatgaggacatttcagcaaagttcagagaggaatcggcagtttgggcctgaccaaaaaaaaaaaaaaaaaaaagctggggaccatttaatgatcacctaccaggtggcagacagacagggctctgggtactcttaaaattttagtactgtggaccacattgagggattagtgttacttacccactttatcgacagtgaggtagaggctcagaaaattaaaagacttaatttgtttaacaaatattgagtacatagcctacgcctatgcccagccaatgatacaggccttaaatggagtagtgtccagaggttaggaatcctgccatcctttaggcctgtgggtctggaaaggcaatgactactacccctctaaacatctctgccctgtgctcaagcttccctgctctgggtaaggcaacctcgggcccaggctgtgaccttcccatgaaaagaaccagaaattctgagaaccgagtttataacctgcacattctgcacatgtatcccggaacttaaagtaaaaaaaaacaaaaaaacaaaaaaaaaacaccatgaagaattgttggtgctttgggcctggaggtggcagcgggaaccctgtggtcagagtagtgggtcctgagaatgccaggcgacggagcctggggcgagagggagctacccgcccgggcctgattttgttatttggaggaagtaggataaacgctgttttgccttatataatcgcatccttcctctggctggtttaaaattaggtgggggtggagggatggggagtgttgcattgggaggaagcctcatagcttcatggttttgatacacatgtgcgatcccggtcacctggatttcataattcaaatgtaacccgaaggaccagctggaattaccctgcccaggcgcacagtgcttcaaaaccccacgtagagccaggagcaagagtatatacacgctaggaacttggtatctgagctgagacacctgagtcctcctgagggcccggcctagtttagaaagggcgagaattttgcaggtctcttgagagtctctgacagtgttgttaatttgtaaattaagaagctggctccccggctgtctagtaacttagggattagcaaatgcaaaagtatagacttttatggtagtttcttatccttccctttcccagatttctgttctttggttggttacaaagcctcttatctctttttgattcagtaaagtgatgggtaataatgcgacactggaacaaatccatctcttgttggaaatggaagctgggttgggacttgtgctgtgtcaccctcaagtatgaagtgtaaactctttcttgggccaccaaagtaactaaacaagaaatgcaacattctcccatgaatacattagagttaatactgtggccacatttggaaaattagcatagctcgtaaaagccaaatgcagaaaattaattgttaagtattctatcaccacagctctatcctcctccgcccacccacccttgaggaagacaagcccaaagttagttgatgctatggaatcacaaggatgtcccagtccgtgatttgctgtaattgaatccattttaaatgtggagtctggatgctgttggcatacctttattttgcttgtttttccccctgacaaacaaatcatttacacatttgcccgaagccatagaatgggtagaggggatgactaagatgtcatcacgtgctctcaatttggaggcagcatgatttcccctgacatttacatttatgggctagctaatttttcccttcgtcttagtaaagtttatattacagaagcgcccagccaagaaccttatcccacatccagatctgtaaaatgatgttcagattttataatctgtggactggatgcaatgacagcttgtgactgtttattgcgtgggactgcccccaaattcaaagatgctattaatttaccacagaccttatctgcacgattatccttcataaatatgctgacgcaatccactttttctggttcagagaggagaccaagggaaacagctaacccggttgctaaaacctttttcattttccttcccatatgtgattgtctccatgtccaagggaggctgggctaatcatgaacctggtctcccatttttaaagagaagataaattatgctcagaagagatagcggttcatttctcaccgaccacttgattcccttgtcttacattaaatgttctatttctgttatctctaatgctgtttgttttccatatagaaggttcagttacaccattacatttccaaaacttttcttaaaaaactcatttttaaaaaacgaagcaacttacccatttatatatggtccccctccccccaagaaacacacatagttttgacaaaggtacctttttcaaagatgaaacaaagtatgtctttccatacatagatatgtgtgtgtgtgtgtgtgtgtgtgtgtgtatatgtatgtatatatagatttttttaaagctaagtgctttcagttgagaggggaggcccgaaaggaaaaaacctagagagatgacgggggagatgggttttttttagtattattttaatgtaactttcttttgctaatccgctcctctctctgttctctaggacatatgagccctaccacctgcaccctgaggaaacacaagaccaatcggaagccgcgcacgccctttaccacatcccagctcctcgccctggagcgcaagttccgtcagaaacagtacctctccattgcagagcgtgcagagttctccagctctctgaacctcacagagacccaggtcaaaatctggttccagaaccgaagggccaaggcgaaaagactgcaggaggcagaactggaaaagctgaaaatggctgcaaaacctatgctgccctccagcttcagtctccctttccccatcagctcgcccctgcaggcagcgtccatatatggagcatcctacccgttccatagacctgtgcttcccatcccgcctgtgggactctatgccacgccagtgggatatggcatgtaccacctgtcctaaggaagaccagatcaatagactccatgatggatgcttgtttcaaagggtttcctctccctctccacgaaggcagtaccagccagtactcctgctctgctaaccctgcgtgcaccaccctaagcggctaggctgacagggccacacgacatagctgaaatttgttctgtaggcggaggcaccaagccctgttttcttggtgtaatcttccagatgcccccttttcctttcacaaagattggctctgatggtttttatgtataaatatatatatataataaaatataatacatttttatacagcagacgtaaaaattcaaattattttaaaaggcaaaatttatatacatatgtgctttttttctatatctcaccttcccaaaagacactgtgtaagtccatttgttgtattttcttaaagagggagacaaattatttgcaaaatgtgctaaagtcaatgatttttacgggattattgacttctgcttatggaaaacaaagaaacagacacaatgcacacagaaaatattagatatggagagattattcaaagtgaaggggacacatcatatttctgcattttacttgcattaaaagaaacctctttatatactacagttgttcctatctctcccccgccccccaccgccccaccacacacatatttttaaagtttttccttttttaagaatatttttgtaagaccaatacctgggatgagaagaatcctgagactgcctggaggtgaggtagaaaattagaaatacttcctaattcttctcaaggctgttggtaactttatttcagataattggagagtaaaatgttaaaacctgttgagaggaattgatggtttctgagaaatactaggtacattcatcctcacagattgcaaaggtgatttgggtgggggtttagtaattttctgcttaaaaaatgagtatcttgtaaccattacctatatgctaaatattcttgaacaattagtagatccagaaagaaaaaaaaatatgctttctctgtgtgtgtacctgttgtatgtcctaaacttattagaaaattttatatacttttttacatgttggggggcagaaggtaaagccatgttttgacttggtgaaaatgggattgtcaaacagcccattaagttccctggtatttcaccttcctgtccatctgtcccctccctccggtatacctttatccctttgaaagggtgcttgtacaatttgatatattttattgaagagttatctcttattctgaattaaattaagcatttgttttattgcagtaaagtttgtccaaactcacaattattttaagaggtgttctctgttcttagctgggcttagctcgaaagtgctacccacatgagggggaagctggtcttttttaatattttaatgtaagtcaaccaagagttgtggccagattcagccatgttggggtgattggtggtggtggggagtgaactgaaactactgaaatactttgaaatgtttcctctggcagcttgttacttatggaaaagaggtggaattgctgcgaggagtttttc

SEQ ID NO: 390 - DNA, 23039 bp, Homo sapiens
cggccggagcgccggggcgggggcggggaccggctctctggccctttttggcgcagcagctctgggcgctgcccgctgccgccgctggggcccgagagaggcgagccggcgacggcggcgcttctgcggcggcctcctccctccccacccggtgccgcaggattgcagctggcactggagggtgggcaagctcgagggaggggcgcggagccccggcgcggagccgggcgcggggctttgatggatttagctgcttgcgcgagcgcgtgtgtgctccctgccgcggcggcggcgcccgggccctgccgggtccgcacgaaccccgagcgcttccgaggtgcgggtcccaggcccggaatccgggggaggcggggggggggggcgggggcgggggcgggggaggggcgcggcggcggcgctataaccctctccccgccgccggccggctccacacgcgcgccctgcggagcccgcccaactccggcgagccgggcctgcgcctactcctcctcctcctctcccggcggcggctgcggcggaggcgccgactcggccttgcgcccgccctcaggcccgcgcgggcggcgcagcgaggccccgggcggcgggtggtggctgccaggcggctcggccgcgggcgctgcccggccccggcgagcggagggcggagcgcggcgccggagccgagggcgcgccgcggagggggtgctgggccgcgctgtgcccggccgggcggcggctgcaagaggaggccggaggcgagcgcggggccggcggtgggcgcgcagggcggctcgcagctcgcagccggggccgggccaggcgtccaggcaggtgatcggtgtggcggcggcggcggcggcggccccagactccctccggagttcttcttggggctgatgtccgcaaatatgcagaattaccggccgggtcgctcctgaagccagcgcggggagcgagcgcggcggcggccagcaccgggaacgcaccgaggaagaagcccagcccccgccctccgccccttccgtccccaccccctacccggcggcccaggaggctccccgcgctgcgggcgcgcactccctgtttctcctcctcctggctggcgctgcctgcctctccgcactcactgctcgcgccgggcgcgctccgccagctccgtgctccccgcgccaccctcctccgggccgcgctccctaagggatggtactgaatttcgccgccacaggagaccggctggagcgcccgccccgcggcctcgcctctcctccgagcagccagcgcctcgggacgcgatgaggaccttggcttgcctgctgctcctcggctgcggatacctcgcccatgttctggccgaggttggtgccgcccccgcgccccgtccctgcgccggctcctccggcgcacaccccccgccggctggggcgccacgggctctgcagagagcgttttggttcctgccagggtggtcgatgtttagattttcccaactgggttctattttctgccatgcctaagtgtgtgtggggagtttccagcgtgttgcgtcggtcgctctgcctcggggggaccggggagcagcgaggtggacgagtgggcagaaacttcggggggcgcagtgtcctctccggggaaggggagctggggcgcagcgggcgctgcagcagcggggtgcggggagcggggaagggggtgtgtgtgagccggcggagcctggggaggagagaagggcggcggataaataggtaggggcggctgctgcggaagcccctggccgggcagggtgggcagcgccaagctgcagccctcggttcccagtccccaagcccggcggggctcagggccggcgcagtcccgcccgcccgggcctgcttacaggtggctgagcgaggcgagctggggctgggccaggcgtccgcaccctcccaccgcggcgtccccgcccccccatccccatccccatccccatccccgggagctttgctgtgatgaatgactttccacagcccccgtcgtgggaacttagtgcttcaggctccccagcgacccccgactctccttaaaaatcggggaggggagtgggggaggccagaggtgagggtggtctccgcagggcacggagagctgcgcgaggtggaagtttaaccctcgctttccctggaggcttcttctcccggccgccggctggatttgggcgtcttagtcggcgctagggccgcggctgggccggagcccggggtggggcgagtgtgtgagtgagatgtgtgtgcgcgtgtgtgtgtctgcgcgcgcgtgcgtgtgtttgtgagacggagagacctctccacgggttcggcccgggattccggggcgtgaaatttaagccctgcctggattaaagtgttagggctgccgtgactctcgccgacccgtgacgcattttaacttgatctttctagatgttgatctcactattaaatcagaaactttcggccccctcgctgccccctagaccttctgtaactgacaccccgggtggaggggccggagtgcgggggcttttgtctgaaaatataaaggggggggggctttgattttgcaaagggcggaacatggatgcgggtggagaatttggggtctcttccagccccacccccggcttctggttccagggccggggcgagggctccgcgggggctggggcggggactgcggccggcgctcgcggggtctcctcgggcccggggcggcggcgctcctggcggccgggggcgcgtgccggcggggtcggggccgcgggcgctgaccgtgtggcctctgcttgcaggaagccgagatcccccgcgaggtgatcgagaggctggcccgcagtcagatccacagcatccgggacctccagcgactcctggagatagactccgtaggtaaatcgcgccccttccctccgcgcgcggggagggcgcgggcgggcggcctgtgcgccccgagctggggccgggcggggcgccgcgcaggagcgcaccgaaaggtcagaatccaatccccagccataagcgcccgggcggatgagtcaggagtttctcttccagtctccactttctctcccagcggcggccgagggctgctcgctcgccccgggattgttttcgcctttaaggaaaacgccgcgtgtgtcacacaaagttcagccgcggcctccgccaggtgtgcgggccccgcgcctgccctcgggccgggggagcggcaggatccggcccagaccctgggcgcagagccctggcccgtgcgccgggcgggcagcccgcggagcgaggccccaagggcaggcgcggctcccggtccgacgggcgggcgggcggaggcggcccccgggtcagggcccggccccctctgtaatccctgcgagctggtgccgcgttcttgccgcagggctgggcctctgtggctgcagaagccggtgtctttctgttttcacgacccaatgaaaagccttggacgcatctgctgcctgggggctatttttgcggctcaccctcgggccctggggccgggccactagagaacacagcttgtttgcaagcacagagttttgctgcgggttggcaagggttaaaggggcctctcaccccgggggaccccggtggaccacgggtgggtgggaggggcgagggtgtagggtggccgcccgcccgctcagggctagagagccccttcctagaaggcgaggtctctcttccaggcgtgcgtggcgctcttttcaaaatgagcactcggcctgggaactccagtcggagccttaacctggtttaaaaaggggctctgcgatgaacttgttaaaaagagtaactaaaggcagcagaattggaagaagttacgtgacatgaagattcttctctccctgcaaaggactctgaaaaagggggggcatgcggggattaagtgaaatcacatggtctagtcatttggaaatttgtacctaattatggtggtggagaggcctgaactattttcgtttcatgccaaaaccattttctaacaaggccgatggtttctgtagtttcttgacccaggaaatccctgggctgatccttatcgggggcggagggtggggggtgcggtagagtttcactcccacagcacagctgggcggggggattttgaccggatccctcagtggataactctagggaaaaggatctggctctggtttgtgggggggaatcccttgcctgaatctcgctggtcctggatgggtttggaaaagtggggggggggggctgcttcctggagaaggtttcagggctttttctgggggggggtgctagcagaaggggaggcttgtggagagctgggcctcctcgtgggactggctttggaagctgcagggaaatgggccattcactttctgctgggactattcttattctggtcttggcgccccgcctcctccacccccacccattatcgcctttagcattgcagcttcgtggggtatgctgatggcattcctcacccgggggcttctaggtcgtagggtccgaacagaaaaaaacaaggatgcccctaagctagtcctggccggtttcaaattccctctgcagtcatgtcccaggagctctctcctcctgccccagggaatgcagagtggatctcagccctcctgtgtccgtgagaggttttggggtctgaataggattctcctagtgtctgggaggctttgtgtgtgagaatatgggggtggcatctacctcctctcttgcccctggtgggggaccttttgtaacataggggggcctccttggtcctgtccagtcccctccccaggtgtggctgaaaacagaaccagagaaacccacagtctctcgcctgaggacaggagaggcaccggctgctcctccagcttgtagggggtgtcttttcttcaactcccgttctctgtcgtagggagggttgtaaactggttgaggtcagttctcattgggtaagcatccctccgggtcctggactcccttttcaatccagaggtgcttctggtctgttaggggcaggggacagtgcaggggctcatgaggaaggggctgggtgctgggagaaacccaacgcaacgaactttccctcggagtccctttataacccttccaggctgatgttcttggcattaggtgcctctaaggcccacgctgtaggaagcagaaaagaggctttgaggaatcccaggggtgcgccccagctatgctgactcctcctccaggtgggtggggctttgtgactggcatttggctcctcccagcatgcaggctgcgtcccactgtacagttggggagactgagccaggcaccgtctggggtcttggccgctccttgactgtggctggaggagcacgggtagtgggattcctcaccatcctcccggagcccaagcgtttcattcggagggtgtgctggagtgaagagtgaaggcttttcacctgtggcttttagatccagaggccagcatgtggtcttttaatgaccggcagcccgcgtttagggcctgtttgtcctgtgtgcagtggcagctggggagctttgttccccaaagtggtctggcctggcgcccgtggttcattgagcggctgataacgtaaatagccccatctcgggccagtaatgccagaccaggactgatggttgggagattctccctgtcctggagttgtccttgggacatctgtgcctaaaagacaaaagggaaagcctcctggttaactgtcctgggagcagttttaggggtgattcttgccggccaggccacctgggcctgggctgctcagagctgtgtttggtgagctgtgggcggctttggtgagcgtggtccactctcggcatcttgagctgggagcaaagggtgggcttggtagactgggagctattccccctctgtcccttgtctcaagaaatttgccagctcaggctttctgggggtcaatgagctagcacggctgccgtcttctctgtttattaagccagggctagagggtggcggggcacggggactgtgctctgtggacgcagaccacatgagtctcctgcgagccacttctggtcctgttatatttctctgggcctcagtttcctcggatgtgaagaagtgatagcacccaccgcacactcagaagctaagtcattggtaaagcagctaatgcaaacgtggctatcacaaggcatcggaaaatgggagctggtgttattgaattttctcctacgagtggagaacggacccgttactctttggtttggccatggcaagatggccaccaccaggatgtgattcataagtgtcactttttcatgaaaagaaatgctgcttgtaacagttggttgatgggaaattcttactgcatgagtagttctgttctgatcttattttgggtctcaaaaaaaattagtgtcattggaacattgagtcattttcggtaaaaagttgggctccgggcgagcttcgtctttgcctgacaccttctgtgaggtttgcgggcttcattttaaatccgcaggctcctcgggggtgcggaggaagctgaggtttctccggttggtttgtggatagtcacggatgcctcgatgggctggggagagacactttgggctgctagtcctgaacccaggaggtgcagagcccattagccgtctggattggtgaccgggacttcccaagcttcccaggagggggcagggagatctctgtgcctctggagcatcctggctgtgaggctcactgtctccgcgcctgttcacccttggttatatggtggggggggcaggatggagggagatgggaagagactccccagctgggaccagggggccaaggcaaggaggcccagagccacccgcggtgcccaggtgcgggcagtgtgtccatgggcaggactgtgggtcctctccctactgcgggatttggagagacctgagactcccccagcctgtctgctgtagccgtcagcgcctgtgaaggggtggtgtgtgcagctgggtggggtggcggggataggttctcagttctgctccccggtcagtgctggtcttggctctgggccactgccccacctgcacctggccgcctggctgtaaacacggctcgcagatgccagcttctctcaacccctctccgcaggccgcctccctctgtcaggctgcgggaactcctccgtgtagcctccacgagaggccacgtgccctcctgcctctcctcatggccgctggccctagagtagactcatttcaggaatgagtggggtctggcccgcagcccagtctggcggcttccagtgcccctcagaggttaggccacttcttccaggagtgctttagtgagggggagggagggagacgtacaggcacctgcagaaatctcagcggcctctgcttctccctcgctccagcccccagacagaggtggggcctggcttagccctgtgcccctcggggaggtgcacggagctgggcggcctcaggcccctcctgccccggggcagccctcacctgggctaccttggaggaggcaccgtaggggagaccacctgcaacctcttccccgaagggccctgcgcttcgtcacgggcccctgaatgtggggacctctgtgctaacggggcgttttctgcggtttccagtgtttcatgccctgcatctctggaaagccctggtgggaatcgaggttctcctggagggcccctaatggcgggagctgtgaggggctgtgccgccaggtgcctgttccccagtggctcccaaagctggtctgtgggaagtgcggctggacaggcccagggcacagcgcacgggcctggggcattcacggtgttctccttccgcctgcagggagtgaggattctttggacaccagcctgagagctcacggggtccatgccactaagcatgtgcccgagaagcggcccctgcccattcggaggaagagaagcatcggtgagtccaggaggccgcgatgggcagggcagggccgggtcagggtgagtccaggaggccgcgatgggcagggcagggccgggtggggaggagctgcccgctctcccagcgcagtggcctcaggcaagccacccgttccctcctccctaaaataggcctggccctggtgcctctggctctggcctctcccgaggcctccctccttcgagggtgtctcctgccccagcccgcctgctcctcctggagtcctggtctgggccaagagagcttccaggagagaagagccatcataaattccttaagcgccctgtcttgtcggggcctgtccccaggagccttgccggaaacgtggtcgcgcctaatttccaattcgcagtgtgggcatcgtgctcctgcgccggctgctgaactggtggggacgcgcgtgctgtgtccggcggctgccccccgacaccctcaccacacccgtgtgccccgccccactcacacctggctccagggctccacccccgcgtccatttgggggatattttgtcccttcttacaggacagccccatggccctccagccccctgaggaggaactagcaggtttggggagttcaggggccagtccctgctttctacccaagtcccgcgtcctcgggggtcccacctgatgggtttgagccctggtgctgctcatggctctggggccctgagcaggtggacccccctctctgagctgtggtttcctccatgaagatggattttgtatcttccaccttaaagtgtcatgtgtggctggctagtcccagctgatgcaagcaggccctccccaggtgacatttgctgtggggtctgcattttgcacccttcagaccacttttgaaggctagagcatgcagcaagtgctgtaggattcactgttaaggccccctcctcccccagccactggccccacctggactaggttcccctctgcccctgccacccccagtctctggccccacctggactaggttcccctctccccacccccagtctctggccccacctggactaagttcccctctccccacccccagccactggccccacctggactaagttcccctcccctccgagccactggccccacctgtccaggtccctccagcctgcaggcaccgggctgggctcctctggatgtgtggtgctcctgcccacccagcccctaagcctctgctcccagctcagcctctgctgcctgggaggaatcctggcctgtggcttaccctggttgccccccaggcccagctggagccgcctcagccctggggtggggccgtggtcgcagaggccggtccccgctcactgtgcccccgccgttgcagaggaagctgtccccgctgtctgcaagaccaggacggtcatttacgagattcctcggagtcaggtcgaccccacgtccgccaacttcctgatctggcccccgtgcgtggaggtgaaacgctgcaccggctgctgcaacacgagcagtgtcaagtgccagccctcccgcgtccaccaccgcagcgtcaaggtgagccctcccctcccctcccctcccctcccctcccctcctctcctctcccctcccctcctctcctctcccctcccctcctctcccctcccctcccctccccacccaagcccggggccgcccctaccaagcagccagggtccctcctgcatccaccaccacagcgtcaaggtgagccctgcccctcccctcctctcccctcccctcccctcccctccccacccgagcccaagggccgcccctacctagcagccagggtccctcccgcgtccaccaccgcagcgtcaaggtgagccctgcccctcccctcccctccccacccgagcccggggccgcccctaccaagcagccagggtccctcacgcatccaacactgcagcatccaggtgagccctgccccacgcaggcctgagggtcgcccctactgggttgccagggtccctcctgggaggccacaaggtgcccctggtgtggctggtgggggtgcacggctgcgctcccatctccctggcaggtacactgaggcccagggaggagaaggagcacctgggggtgcgggaaaggcagggccggccggggcttctgctctgctgctctggcgacgagcctggcctcctttccacgccctagaccacagtgcgggggccgttttgggccttgcgaggtgtcgagctgcttagccggaagctgtctggcgtccccgggccctggagggtcctgtgcgggctcttcagtgggggccgaggtgcatggcaggaggagtagggggtggatattcagagcctgcattgccttttgaagtgcctgacctttggagggcccccccggcttcccccctaaagcagcccaggagaaggagaaggagtgcttggggtgggctcgaggccagacagcagacttccttccatagaatcccagggtgagcccctctttctttaagttgggggtggtgcctgccttcttcaggctgctttagcagaattccatccactaggagctgattagcaacaaatgtatttctcaaagttctggaggctggaagtccaagatcagggcgccggcagactgtgtctccgctggagccgtgttttctgggttcatagatgacaccttctcgctctgccatcagtgtgaggggcgggggatgaacatgctccctaggctgctttcgaagggcactaattccattcatgaagcctctaccctagaaactaatcgggccaggcgaggtggctcacacctgcagtcccagccaccgtggaaggctgaggctggaggatcgctgagcctaggagttcaagaccagcctgggtaacatggcaggaccccatctctacaagaaatacaaaaattagccaggcgtggtggcaagtgcctgtcgtcccagctactctggaggctgaggtgggaggatcccttgagtcgggaggttgaggctgcagtgagctgtgatggcatcactgcattccagcctggacagtagagcaagactccgtctctaagaaaaaaaagagaaaaaaggacttaatggctaccttaagacaccccacctcctaacgccgtccccttcatctgggatttcagcgtaagaatcctgggggtgctggcgttcctgccacagcagggccttcctccctggggttgcgctgggggaggaacagcacccgggtgaacttgctgaaggtcttcttgcgttgctgaggccctggggctcatggctgggccccttctccctgctttcagggaagtgtgcccagagacctgcaggatgcagcgccctgggtgggctggctttggcctgtgtttgcgcctctctggcctcattttcctcacctgtgcaatgggtctgaggcagggcctggcccttctgggagagccgaggctgctgccatcttgtttgcaagggaggtttcctgcctgttggggcatcagtctcccgttttcgggatggggttgcagggtgagtgtctaaggtatcttctagcttctgtgaggcctggctggggctggcacctccctggggctcccatctgggagggatgggctctcttagggctcttctccctggaaactggcttcagttgggttaaagtgctgttgatgctcccacctgacctgcaggacccatgagtttgagcagtgggcacaggcgggtgcggcccctagtccaggaggctgttgctttgactcagagcctcctggcttggcctcagctgagaatttttttttttttttttttttttttttttgggacagcttcttgctctgttgcccaggctggagtgtggtggtgcgatcatggtttgctgcagcctcggactcccaggctgaagctatcctcccacctaagcctcctgaatgctacaggtgcatgccaccatgcctggctaatttttaaattctttgcagagtcggggatctcgctgtgttgcccagcctgctctggaccccctgggctcaagtcagctgaggatttggtgacagctgagcctgcttttcctggaatatggggtcactgaaatgatgtttgaggatttaagttttggggctacattagtaaccattctttaactttagaaaagaattatttcacacccccgccccccactgttgtgactcctaggccccggagggagatggggcggcggggagaaggttctccgggaaggactttgcagccagccgggtcgtttcctcgtcacacgaccgggcactttagacccataactgggacttatcttggcctctggggacttggtcctctgaggtgctgggtattgagtaagcagattccacatcttactacccgggatctccaaggccactcactccccttttgaagccccaagatttttccagggccctgggagtgcttgtctgcggcactcttctgtcctcaggatatttaccgccggggggtcagggaaggaggggaggggagggcctaactcaggcctccaggtccaggtgtggctgggtccccctggcatgagcccccctggcatgagcccagcaccatcccctctgtcctgtgtgcctccctggggcgcagtttctgcctttcggtgggccttggcatcctccctggttatattttggaggcccttgtgagctctgagtccgggatgcctgtggtcttgttctcattagagattctcatgtcagttctgggtgctgggggaggcttggaggtacggggagaggctctcagcccatggctcagccttgtgcagcccctgcccttcccaccctggcctgtcatggggtgaggataggagggcttggccctacagggcagtgttctctccctcccccggccccctgaggaggctgggtggggtctagaggcttccagcaccctctggccagtgcagtgttgggggtgagggccagttccccgctgggagtggcccctgctttgctctgtgcagtggtagagccaggaccagggctctccctctgggtctcatctgccgggacagggtgtcctaaggcctcagggctgtgtcctgcagcagagcctggcggcccagttcccacctcctcagacccaggcccccttcatgttcccgcttctgggaggcgtcttctccctgcccacccatccgagggttggaggaaaacatccggctttggacccagggggctttggctgaggggacaaaggtcagagggaacaggaggcccattttggaggctcagccaagagaccggtcctgccgctgcggatggaggcggctgtcaacctggcgaggagatgggccccagagcctcagactctgtgcctgtgagtgggcatggatggggtcagctgaggtcaaaggggttggggctggccgggaggggcccccaaagtctgtccacccaggatgggcatggcatcccccatttccagtttttatgcctttccggtcaacattcagaggtctcttgttagaagatggatggtagtgaagctgggagtgtcactgcctggcacagaccctgctgggatcaccaggatgtgactgaccggcagccctgggggagtgactggccggggtccctagctgggtgggtgtttccttgcactctgcctggcacagttagctcttggtgcctggacgcccgactctcccccagacccaagcctcgggggtaggacaggagtgtgggcctgaacgtggaccatggggatgagatgccagcccgaggactgcaggggtctagcctggacggagctggctctgagcccaccttgctgtgctggaggcttccagaaggtgtgtgctcacctggtgcttgggatgggcctctgctccctggaacagagtggctggggtgttacgggtgagaagctcccagccacgactctgtccactctctggggtctggtgcaggagtctctaggtgggcggagtggaggtcctcttgagccaggctgggcaggggcctcttacacgagcttgaggtctgggcattgcttccattcttaatggatatgggggcagtgctgaaggaggcaggatcttctttttttttctttgttataaagacagggtcttgctttgttggccaggctggtgtcaaattcctgggatcacaggtatgaacctcctccacgcccgacttgagggattttttttttttttttgagacagagtctcactctgttgcccaggctggagtgcagtggcccgatatcagctcactgcaacctccacctcccgggttcaggcaattcttctgccttagcctctcgagtagctgggattacagacactcaccaccacgcctggctattttttgtatttttttagtagagatgaggtttcgccatattggtcaggctggtcttgaactcctgacctcaggtgatctgcccgcctcgacctcccaaagtgctgggattacaggcgtgagccaccgcacccagctggggtcctcatgacccaagtcagcatctggattgagtgacattccaagtctctgtcgagagacacccaggtggggctgtggggcggtggggccagggctctggactctaggctttctttccgtgaaagaggtgagaaggagtgcaggctagggatggagattcaacgctgtgtgactctgggcaaggggcttcccttgtctgtgctgtgtgttctcatctctagaatggaccacgatggtgtcctcacagggtagctgtgagggttacagtgacgggcacgtgcggtccagtcaggtgtctttcatggctaatactctgtcttggagccttgaaagggtcaggccgtaacctggagttggggtggggtcccccgcagggagtggctgtcccaagccctcctcagggggtctctgcagcttctgggctttgtagcagtagggactcggcatcccaggtctagaggggtgacggcatccctgggttgtagtcttgggtgagttcgcgccgggagtgttgaggtggggcggcttacgacgcagatgaactcagccgtggggaatcggaatgtctggtgtgataaggtgcagcccacatctctgggacggaaaaaggggagggacatggggaccccccccatcacttgggcttcggcttggggcctgggggccggggtaccccccgtgggggtcctgaggacattgtagtctgttctttggacttggccttcttttatggaggaggtttttgtgagaatccaatattcattttgtgttcttgggagaaaaatgtagctatttcctggccagacagaggtggcggaacggcccggaatcctggcatactcagaaacaggtgcaatcatcgctgtttgtttttgtttgataaaaacgggcttgtctgaggaggcagtgggttcccagacgagcggccgtgccatgtgcctttcgcacggtgcccagaggggtggcatttctgttgtgtcctgggagcccacgcgcccgcggtggccggccatctcgagtggttgagagcgagcctgcccctcgcctgggcgtctggtgtctggccagacgggcctgcggtctctgccgagccaggccctggtatctgccctgccgagggaactaggtgaggctgcttgttgaccaaagaggctgtgccatccggagggtcagggccgggagcagaacagggcgccctgcccgagcccatccccacgaacccagatttcagagcccacctgccccatgcctcacttggccacccctgcagaggctgggggtgggtgggagcagcagagtatgggtgcttcgagcctgggagatggcagggtgtgaggctggtgctgttcctcctgctgggacctgtgtccagggcctccaggggaggggaggaaggaactcggtccctgctgaggcaggagggggctgggcctggttttgcgcactgggatccctagttacttactacctgggcagttcttgactcagggagggctgaggacatgcttgcagggctgggggtggctgaggtcccaggtggccctgctgctcctcttggggctttgctgcagttcatcctcgggccgggcctctccgaccccaggccctcaacaggagggtggctctagacccactctctgcctgtggtgggtgggtggtggtactgtgctgagcttggggaccagggggtgggttggttttggggctctggattagaatccacgccagtggcagcccactcttgaaggctggctttgtcctcgtttctggggccttctgcatgtgcagcctcatttattcctcaactcctgggtgggtgtgattggtctccgttttacagatgggaggtggaagtgtgtgcacggcctgcggaggcctctctctggaggattctgtcctggggaaaggggcagattgccgcgggagtgtggaggctgatctgaggcctcccgagtggaacggagccccatgtaggaagcggcagtgtcctggccgctttctctcacgctttgtgacgtagcgaaacctcccaggccaggtcctgtttctgagctggctcctgaccccaggcgccccacgccctgcaactgttgagctcatacttggctgtctgctcacgccccaggcagcccagaccacttcacacgcctgcaggcaccctttgcactgtgggttaaccattaactcagcctcggacaagcctggtccccagcgccttagggaccggcttaccttcggagcctgcctggtcccagggtgcagagctgaccttctccctgggggccctgctgatgcccagtctccagagtctggagtccccccttccccccaagaaggttgggaaacattcccctcctccctccttcaccctcctgactgcctgggaggcagggccactgggctgggggcatctggccttgggctgaggtctcctcattcacccagcagcgtgcattcccccacgcccctgtgctcagggggtgacccggcctccgtttcctttctagcctcagtttccccatgaaccgtgaggggtgaagtgggtgatccatagtggctgttcttgcatttagaccctgcatgcggcagggctggttccgtgggcacagatggagcgcctgctgggtgctcagctccccagggcctgggagggcaggaaggtggtggctattccctggtgtgtgctccagggggcaggtgggacagcctagcaattagggacaggcttagttagagcttgcctgcgcctcagtttgttctgtaaatggaggtgccagtcttgcctccttgtagcatggttgggaggatgaaatgagtgctggggtttgggctgggagagccaatactctactcatgcagtccctggctgtgtattaggggtctgttgatgccaggcgtgtgcgtgcttgcactctgtgtgtgtagtaagattcccacgatggggcccctgtgtacattacacatgcatgactggtggggggtggagttgcctccccatgacagggtatgtgtgtgcattatacaggtgtgtgtgtggggtggagttgtgttcccgtgacagggcctatatgtgcattatgtgtgtgtgtgtgtgtgtgtgtgtgtgtgtgtgtgtgtgtgatttcttgcctctcttgttgaatgcctgaagctcccctctctggcctggactgggccattgtctgcctgcagctccccggggaaggggctgtggaggcaggacccccatgttgtggttttgtgcctggagaattgagggcaggcgtggctcgcagacaggcaaagtccagtccgaagaggggaacccagctgaggtctggttcgcttttgagctgcctgtgcctgatagccacggcctgctggcctgtgctcctcctggatcatcttgtgtagcctcggtgatggcccaggatccctggccctggtttccgaggtcaggcctctccgagcccaaggagagcctcggacctgggggagccatgaggggaccctgggtatgggtctgctggccctgctgcctggggccggcggggaggtggggccctcatcaggccagcagctgggattatcatctggacgctcaagtccacagcaaccttgggctaggatacagccacgaaccccccattcctaggccatggctttaaatttttttttaatattaatagagacagggtcttggtgtattgcccaggctggagtgcagtggtgtgataccagctcactgcagcctcaaactcctgggctcaagcgatcctcctacctcagcctcccaagtaggctgggactacaggtgccaccatggcttgctaatttttaaattgtttttagaggcagggtcttactatgttgcccaggctggtcttgaacccctggagttaagtgatcctcccgccttggccttccaaagtgctgggattacaggcgtgagccaccatgctcagcctggcttttaaaatgtatttaaaaacaacgtgatcatttgaaaacatttcccagctgcacatccacacacaagcaaacactttccctggccacctgcaccccagaactcccaaacttccacaccttagcagtgtgcatccttcagcccccccaggcacacgtgaacctttgggtttattttaaacaaaaataggatgagtctgctaaataccatgctccaacaccaggcgcggcggctctcacttgaagttccagcactttgggaggctgaggcaggaggatcacttgagtccaggagttcaacatcaacctcggcaacatagcgagatctcatctcttccacacaaaaaaaatatttaaaattagctgggcatggtggcctgtgcttacaggtgggaggctgaggtggaaggatcacttgagcccaagagcttgaggctgcagaggctatgattggcctaggtgacagggtgagaccctactcagaaaaaactaaaacacacacacacaaaactgcactgcagcttgtaggtttttcacctggtactgctacactccccaccacaaggtagtgtttctgggaggaggtcaggggtcaggctgctctctcctccctctcagcctgtccccggctcccagcacgtcgtgatgtccgaagctccatgcaggcattcatggccgggctctgttctctctggcaggtggccaaggtggaatacgtcaggaagaagccaaaattaaaagaagtccaggtgaggttagaggagcatttggagtgcgcctgcgcgaccacaagcctgaatccggattatcgggaagaggacacgggtgagtggctgccttcgtcggcatcggtgttggagaacaggtcttcagagccttgcttttggggtgttaggtggcccccttgagcgcaacgcttactgctgtgagcatctgggctgctgttgaaggattcgttgccctgctcccgggccagatgcctgcgggggagacggatcccacacctgcaggtgtccggtggggagggtggcccaagctgcggcactggcaggagaggagattcaggtctcactgagaggggctgggagtgcataagacacccaattcattagtgggctgcggggctgagctgagaagaatctgcagaagggcctcctgccagggtgggcgggaggagcaggttcgaggactgcagttgccctggctggctggggtctctccttcaccccgccacgcggactccacccaggagcagaatggcttctgtgccctgctatggctgggccctgggagcatgaggggactcagaagtttctcggtgccagggtgctggccttctcttctggaaagataaacaaatgccgtaggtatttgttgcttcagttcttcaccccgacggccgtccctcggcccactcaccgccctgcccttttgttaacaggaaggcctagggagtcaggtaaaaaacggaaaagaaaaaggttaaaacccacctaaagcagccaaccaggtaggactgtctgccggacacactgagtcctgcagggcggggaggtgcaactgactgatcacaccagcaaatcacgcttcctgtctcgccgggtgcggcggggatgtggccctgattggccttgatggtgtctgctgggcttgggtctccttgctccccgtccgctcctgcctcgcagaacgccctggcccgtggctcactcccgcttgggagcctgcctccagctttgtccttctctttgtcgttgattggggatgcaggagcattgcacatgaatggaacaggttgggcgacctgagcagcggtggggcagctctgagcgcctggccactctgggatcacccaccccatttgacagatgaaaaaactgaggcttaactgagattacagataaggactgttggaggctgaatatatctggaaatcctttataaacgtgcagggctgttggctactgtgttggaaattgcatttggctgctagtaacaccagacagcacagggattgagataagatcgagcttcatgactttcatctaagggtgggattgcagagcagggagggtagtcttgaggtatcatcagtgtccgccttctgtctggctagtggcatccatctgcagttgcctcatggcccaaggtggctgctaaagctccagaaaccacatctgtgctccaggctggaagaaggagtgagcgggggggggggggaagggcaaaataacacccttagagagctatcctggaaatcccacccagtgacttttgtgtttttctcagctgccatccctccactgcaagggagcttgggaaatgtctcctagcaagacatgtcgcttcccagatggaggtgggacctgggcagccgccatcatcacggaggaggcagtttcaagccttcctggtccttggcattggcccgtctggcttgggaaagttggagccctgtctggcctggttccccctcctggcacgtgggactccatggtggccaaaacaaatagtttctttagaagagaggaggatctcagagatagggtgtctgagaaccctggctcctgtttgcaatgtgggacttgggcctgcgggtgaggtccattcatgaggagcctcttgggaggaaattgtccacttgggcgggtctttgaagcagtccaggactgttggtcagccttggctttgtttgctgaaagtgtggcctggtgggtggttttgtgcctgcctgtgggtcccatttctacagagcgttaggctctggcctccatgggcctgctggtgacagaccccatggtgagaggctggcactcctgttgtcccatgcctggctggtactcatgttcagcctataggcagcccacgtgttggagtgtgcgatggagaggccacatgggatgtggaagaattgttcttaaacgatcagcataggtctgcctgggtgcagactcttctgtctggctggtggcctccatcctcagggttgtctcatggcccaaggtggctgccagagctccagaaatcacatctaagccctaggctggaagaaaggaaggcagagagaagggcaaatgagccattcttggcctcagtttcccccatctgtacaatgggagaatggggcttggtctctagacatgttctgtgagatgctgtgagcctaatcccaattcctgtcagggtactgcaacatggccaatgtggcaaatgtgattctggaaatttcttgaaaacttgaaatccctgtgtgcccctgattgggttaaatgttttcaccctgttttcctcctatgcagccatgtgtgtgctgggtggttcacttggtcggtggtctcagtgtctgtctttcccttctccctgcagatgtgaggtgaggatgagccgcagccctttcctgggacatggatgtacatggcgtgttacattcctgaacctactatgtacggtgctttattgccagtgtgcggtctttgttctcctccgtgaaaaactgtgtccgagaacactcgggagaacaaagagacagtgcacatttgtttaatgtgacatcaaagcaagtattgtagcactcggtgaagcagtaagaagcttccttgtcaaaaagagagagagagaaagagagagagaaaacaaaaccacaaatgacaaaaacaaaacggactcacaaaaatatctaaactcgatgagatggagggtcgccccgtgggatggaagtgcagaggtctcagcagactggatttctgtccgggtggtcacaggtgcttttttgccgaggatgcagagcctgctttgggaacgactccagaggggtgctggtgggctctgcaggggcccgcaggaagcaggaatgtcttggaaaccgccacgcgaactttagaaaccacacctcctcgctgtagtatttaagcccatacagaaaccttcctgagagccttaagtggtttttttttttgtttttgttttgttttttttttttttgtttttttttttttttttttacaccataaagtgattattaagctttcctttttactctttggctagctttttttttttttttttttttttaattatctcttggatgacatttacaccgataacacacaggctgctgtaactgtcaggacagtgcgacggtatttttcctagcaagatgcaaactaatgagatgtattaaaataaacatggtatacctacctatgcatcatttcctaaatgtttctggctttgtgtttctcccttaccctgctttatttgttaatttaagccattttgaaagaactatgcgtcaaccaatcgtacgccgtccctgcggcacctgccccagagcccgtttgtggctgagtgacaacttgttccccgcagtgcacacctagaatgctgtgttcccacgcggcacgtgagatgcattgccgcttctgtctgtgttgttggtgtgccctggtgccgtggtggcggtcactccctctgctgccagtgtttggacagaacccaaattctttatttttggtaagatattgtgctttacctgtattaacagaaatgtgtgtgtgtggtttgtttttttgtaaaggtgaagtttgtatgtttacctaatattacctgttttgtatacctgagagcctgctatgttctttttttgttgatccaaaattaaaaaaaaaaataccaccaacaaaa
